United States Patent Application Publication US 2020/0377945 A1 - sequence listing, part 32

SEQ ID NO: 5586 - DNA, 5271 bp, Unknown
  gut microbiota DNA sequence
gacggggatcgaacccgcgaccccctccttggcaaggaggtgctccaccgctgagccactcgcgcatatcttacggacaagttataatatactatagggctccggaaatgtcaataaaaaaagtgtgcatcttttttgtaaattgcatatacaattaacgcagcagtattctacgcagccatccggtgaatttccgctctatcaggatccagcacagataagccagaacaatgcttattacaacgcttacgatcagtccgacaacagacaatacggatagggtggaaaagtcaaataccacacggtccagaaacataaccggatagtagtgtaccagatacagggaatagctgatatttcccaactgcacaaaaaagcggggcatggaaagctgcaggcctgcgagaaaagcaaggattaacaatagcagagccgggagcccccactggggaagcctgaggaacccaatcacattgatccggggcgtaaagtaagcaagcagacaaaagattaccgggatacataccgcggatacgaggcttactgtctgcgaaaccggatgaagggtatgcctgcgatacaaataccgcagcagatagtaagccagaattccgaagagaaattccagcatgacaggatctccgtaaaaaatgaggaaaggagaaagtacattacctatcggagactgccaggatgagatcgccggagcaaatatctgtaccattcccaccagaatcaccagaaatgcgctgcagattagaccgcggtatttcatgctgatgtgaaaggcaatgaaaaacagcagatagaacagcatttcacagttgatggtccagccgatccgtaccaaaggctggatcgctccgctgccgatatcaaaaggaataaacagcagacttttgaccagataggaaaaatcgtgtctggtctgttggaacatggaaggaaacaacaacagcaacaaataggttcccagtgtcatcaggtagtaaagcggaagaatccggaccaggcgtttgcggaagaaatatttggtacttttttccgtggtaaacatgatcatgaatccgctgatacaaaaaaagatgtccacaccgaaagctccgaagttcagaaaacggacatgctgaaataccacaaaaagagcagccagaccgcgtaaagcctggatgctgtcaaaatgcagttcatgaaactctttattaactgttatattttccatagaaataaccatgcctttttgtactagcttacgaaatataactccattttaacatttttgcgggagattgggaaacattttattcaggaaaaaaacttgcgtactgcgatataaaataatacaataataagtgaatatagattatgcccaccgggctgggcataggaaccggcgaaccgcaatttgcggaactgacatagaataacaggacggtatggatatagatatgagcgcaacgagacagcaaatgttagagacagcagaacgcctgaatcagcagatgacagacggaattccttttacctgggagactttggaacaggcacttacctctgtgacagaacaggatgataagggaatccacggatggatctgctattttgctgccttttatcaactgacaacagggaatcaggagggctgcctgcattatctggatgagagcgtcaggtgtcttctgggaacggatcaggagcatcatgtagccagagtgtacaatatgatcggtattgtggcacatatgcagaacaacctgtcgctggccatggaacagtacgataaagcattggattatacggaaaaatacgatgataagatggtgcacagcattgtactgagcaatatgtcggatgcgtattatctcataggagcttatgaaagagctgtgcagtgccatgcggaatgtatccgcgaatttgaacaggcggatgacaacagtacatacagcaggatcaatttccggaaaatgctggcagagtacggatgctgcctgctgcatctgcatatggatgacgaggcggaaaaggtactgtgtaaactggaagagaccgggcagagcaaggaggtcatacgtgagacaaggctgggtgtcaatgtatttctggcttatctggcggagcgaaacggagaccggaagaaggcagaagagcatgtacgtacagcggtaatggcattagaggatatgacacaggtctcttccgaatacgacagtattcagaatctgctgcaatatgtggaaaagataggcaagacggaacagatagaggaagtattgaactgtctggaacccaaagctgccattgaacagaataaaagtctgctgttgcagcttttgtctctgcggatgcgttattgcagttccagaatgactccggaagaattcaaacagagcgcagacaccttcttccacttgaaagacagctgggagctgacagaaaacagtcaggtcatgtatatgatggagcttagaaagcgattacaggcggcagaagaggagcagaaggaacaggaacgtaagagaaaccggctgttgtatcaggcagaccatgacgagctgacaggactctataataagagaagcctgaatcgttatctggaggatgtgtttgaagactgtcttctgaatgagaaggaactgggcattctgttcctggatattgaccatttcaaacagttgaatgatcgctatggacatggaaggggagatgaaggaatctgcgcggtagcggatactctgaaaaaatgttttccggaggactatgtggcgcgttacggcggagatgaattcctggtggtcatgacgggacgtgacagggagtatgcagaggaacatgcaagacagctatgtatgggcatccgtgaatgtgagattcccaatgaagactcttctgtggaaccctggcttacgatttccgtgggtggtgtctgtgctattccgaaggaaccaaaccgagtgtgggatttcctgtcggctgcggacaaaacactttatgaccagaaaaatgagcaaaaaggaaaagtacgcttctatgtgggagaaggacaatacctatagctctgaaaccaaaataaaggaacacaacaatggataacaagcaatattccacccgcgaattgtttcgcaggtttgcaccttattttaaaaaataccgttttaccttgtggatggatctgttctgtgcagcactgaccacggtctgtgaactggtgttgccgttaattatgcgctacattaccaatgaagggctgcgggatcttgcgtccctgtcggtgaagaccatactttcactgggagttctgtatttcggacttcgtatcgtggattgcatcgccagttactatatgtccgatatgggacacgtcatgggcgcgaagatcgagacggacatgcgcagagatgcatacaaccatttgcagaagctgtccaatacttattataacaataccaaagtcggtcagatcatggggcggatcaccaatgatctgtttgatgtgacggaattcgcccatcattgcccagaagaatttttcatcgccggaatcaagaccgtaatctcttttatcattctggcaaatatcaatctgccgctgacattgatgatctttctgtgcgtgccgctgatgtgcggtgtgtgcatgatcctgaatttccggatgcgaagtgcctttcgcaagcagcgtaaccagatcggagagctgaacgcccggatcgaggacagtctgctgggccataaggtggtcaaggcatttaccaatgaagaggtggaaaatgtcaagtttgagaaagataacggcacttttctggatattaagaagctgacctaccgttacatggcggcattcaataccacagtgaagctgtttgacggattgatgtatctggtggtattggtggcaggcggtatttttatggtaaacggacggatcgccgctggtgacctggtggcatatatgctgtatgtatccaccctgatcgcaacaatccggcgtatcatcgaatttgccgaacagttccagcggggcatgaccggtatcgagcgctttttacagatcgtggatgcggatatcgagatcttcgatgagccagatgccatagaactgaaggacccgaagggagaaatctcttttgaaaaagtaagctttgaatatccggatgaccataacaaggtattcactgatctgaacctgcagatccacgcgggagaaaaggtggccatcgtcggtccttccggtggtggtaagacaacgctgtgcaatctgatcccgagattttatgatgtctcagaaggcaggatcctgttggacggccaggacattaagcattttacgttaaagagtctgcggggcaatatcggtatcgtacagcaggatgtgtatcttttctccggtacgatctatgaaaatatcgcttatggacgtcccggggcttcgaaagaagatgtgatcaatgcggcaaagcgtgccggggctcatgaattcatcatgggactgaaggacggttatgatacttatgtgggagaacggggtgtaaagctgtccggcggacagaaacagcggatcagtattgccagagtatttctgaaaaatccgcccatcatcattctggatgaggccacttccgcactggacaatgagagtgagttcgccgtggcaaaatctctgggagaattgtcggaggggcgtactactctgactatcgcccacagactttccagtatccgcaattccgacaggatcctggtgctgacggatgacggcattgtggaggaaggcaatcacgaccagctcatggaacaaaaagggatctattatcagttctatgaaacagccaatgctttgaaataacattacaaaaacggaggtagagctatgaaacttgtgtttgtgggggcagaccatgaagtaaccggaagctgtcattatctggaggttgccgggaaacatattttagtggactacggtatggagcagggtgtcaatgtatttgaaaatgtgccgctgccggtggcggaatccatgattgattatgtattcctgactcatgctcatgtggatcattcgggtcttctgccgcttctgtatgccagaggcttcagaggacagatctattccacggatgctacagcggatctgtgtagcattatgctgcgtgactgtgcacatatccagagtgccgaagcggaatggaagaatcgtaaggcaaaacgttctgcgaataatgcagtggtggagccgctgtataccatggaggatgcagatggtgtgatccg

SEQ ID NO: 5587 - DNA, 245 bp, Unknown
  gut microbiota DNA sequence
ggatgaagaacctaattttaatttgagaaagaagaagaaaaagaaaaaacaacttaaacagtaaagacatggaagataatttgattttagaggggcttctctctatggttacggaactgaaagagaagcaggaagcacaggcaacgccagccagtcgggaggaaactctcgaacggctgggagcaatcgaacaagcgttgtcggaactgcacagtaattcggctgttcccgaagaaaagttgcgg

SEQ ID NO: 5588 - DNA, 284 bp, Unknown
  gut microbiota DNA sequence
atgggctatcagtggatcggcggtgagcctcgatgaagctgcaaaatttatctgtcagggcatttttgagaaaaattgtggcggggactctgctcactgccgctttgctgctgttgatttttttcctattgacgaaagatgtgcgtgttgtcatctgcggcattattttgacagctgcattttacatttggggcatggtttttctgcactattttcaaaagaaactttctctgttcaccgatggtttgtgccagacattggatcacatgatggacagtacagac

SEQ ID NO: 5589 - DNA, 1816 bp, Unknown
  gut microbiota DNA sequence
gtacccgcaatgccttattggtgtacagggtctccatcatttcactgatggtaaacgatctgccgaaacctgccgtcagctggacgaacagtttggctcctgtcttgtggaactccggcatccactttgccagatcctcatacatttttttcttcttatatagccactgtccgtacatgggattgtataccggctgacatcccggaagcaccagaccgcaattatttttcgctacttccagaataaatttcgcaccatccttgtcaaaatggttcacttccatccatcccaacaggtttgtgccacccatggatgtcagaacaatgcggttcttaatctcgcagtttccgatcttccacggcgtaaacaacggttccaactgttgtttcattgtaactcctcctttgccttctctcttgcttaccccattacacaatcttataataacacattttaatagtattcccctgataactcattccctggaataaaattcttcaccggtttccagacaaatgccctgcatgaaccagaatgtactgctatccatttaacgaccgttctgcatacgcttcaaaatttcagaacatcatttcgttcttctcctgtaaacttccctcatgttttgttgcgttgtcaacaacttctttattgtaacaaacatgttacagtttgtctactctgccttccagagatctccccatatggaatcacacaaattgacacagtattctctggaaaactccggatcctgcgaaacgatctcattttcctctgccagttcttccggataatcctccagaaaatatgttgtcacaccttcgggaccggaagccacatgactgatcatcggtttcaccccatagtctgcgatctccacctctccatgatcatttttcgtaatcgttacctctgccatgccgcccaccatgcggttagcgactccctctccggtgccggaggtccagttcacgaaatttcccagcgaataatacacaagcatttcatgctcgctcgcttcatctgtcacccattctatgggttcaatgacatgcgggtgggtacccaggatcagatccgcaccgttttccgcgaatatcttggtccatttctcctgcgaagcatctgatgtcagcctgtactccgttccccagtgcggacatacgatggtgaaatccgccagttcctctgccctctgaatatctgccgccacctgttcctcattcaaaagatccaccgcatagggcatatccgccggcagagaaattccgttggttccgtaagtgtagttcaggactgcaatccgcatgtctcccagctcaatgatcgatgggtctgcgccacaggaagtggaggtatccgcagtatcatgaatgccaaggacagtgatctgtgggtattcgtccctccagtactctgcacaatttaccagccccgcacgccccttgtccatagcatggttcgtggcatgacagatgacatcgaatcctgctcccaccagtgaatcgcagagactgtaatccgcattgaagcagggatacccggagattccaagatccgcaccgcctatgatcacctcctggttcaccagagcaagatctgccgcagcaatctcctctttagtgtgggaaaacagcgaatcatagtcgtaacttccatccggccgcagacagctttcctccaccggagtgtgaagcagtacatcccctaccatgatgatcttgtactctggggtggcttccgatggttggtcagtagatgactggattgcatcctgcgtttctgtttctattgcttctgtttctattgcaatagt

SEQ ID NO: 5590 - DNA, 9448 bp, Unknown
  gut microbiota DNA sequence
cccaggacacctgcaatattggccagtgctccggcgcggttctccacctgaagccgcaggaagaatctgctcttcgtctcctccacatccagtacgggaagtttcttgtggctgtcactgccaatcttgccgcaacttccatggataatattacgcatcacatcgatgacatctcccaataccgcactggcagtgggcatctgtccggcgccccgtcccatgaacatggcatcatcacaagcctgaccatgaacaaatacggcattgaaggaatctctgaccgtggcaagaggatggctgtccgggatcaatgtgggatgtacttttacttcaattcctttacctgtaagctttgtaatacccaacagtttaatcacatagccgaattctttcgcataccggatatcctctgctgtaatcttcgtgatgccttccgtataaacctgagggaacgtcacgcgggagctgaaagcgatggatgccataatggcgatcttgcgtcccgcatcatagccttccacgtctgctgtgggatctgcttccgcatagcccagtctcgtagccatatccagagcttcctgatagcccataccttcctcggacattttggtcaaaatatagtttgtcgtaccgttgacgattcccatgatctccgtcaattggcttcccgccaggctctgccgcaaagggcggatgatgggaatggcgcctgctactgccgcctcgaattgtaagtcgcatttattctccgtggcgatctcaaacaacggatccccatattccgccagcagatccttgttggcggtgaccacctgtttgccggccttcattgcttcttccacataggttctggccggttcgatgccgcccatgacttcgataacgatctgaatctcaggatcttctaaaatctcctgccagctatctgtaaatagttcctgtgggattccctctcttacctttcccggattccgcaccaggatctttttgatctccagctgtgctcctgttttcaggcagatatcttcttcctgcattcctgccagcttatacacaccgctgcccacggttcctgctcccaataatgctgcatatatcttacggttctcgcccatgatttctcctctcgttctgtaaatactatctgggaaatacaactatgtatcattataacagacctgtctgccaacacaagattttgcttacattgttttcaatttatttgttaaatagtgtatcttctggtaaacatcctgtcggatctgttctttttcttcttcctctgttattcccatgaatgtcactacatctgttggtccggcatgctgtggcgaagcaaatttttcatccagcttctgacacatttctctgatcaactctctgtctgtataaggcataaattctttaacaagtgttcttacgcctccctcatatttgtcaaccatgtaatatatatcatacgcatccttcggttttcccctccccagtgctgctgtcttcatgaccagataaggtaccacagaaatcactttcacatatccactgtcctttgctccatcctcccgcatatattctattttcacatccgttggcggaaaatcaaatgcaaaatttcctcccgtagccggtaaggttttaataccatccacatgtttgcttacatttccgccatcgccgccatattttccggacaggaaatccacgtctacgtcataggaaactccatctaaaactattgtttttataaatgtaaaatatttttcttcatgtcttctatacccattttgtgtcagtatccgtttaatcgtccgatagctttctgcctttttgatctccagttgattcagcagaacatctacatcaatagaacctatatgaccaccgtccgggtataaaagtgtcggaacccatcctcctatgattctgatattatctgaaaactcattcaaaagatttacgatctctccgagtaccatgtatgcggctgtcttttgtccctctgaatagtcagttgcctttttcagttcttctttcatcctccgtcctctccgggtattctctgcgcaggatcgcctccgcagcctcttcccctcttccggcatcccccagcagatcaattaccgtttgtgccggagaagttactaatgtatcatgaacaggctttgcgtacatacagggggtttcgtcatgcggtatcgttatcacaacatttcctccggtgttgaccggctgcaattccagatcttttacaaattcctgaacaaattgaggttctacatatatttcggctttttgataacgtactgtcggcgcatatcgtgccgcagccgaaaagccacctaatatagctccattatcatgtgttttactccattcagcggctgattgttctatctccggaaccgtatccaaagaataaaactgtaattttctcgcttctttttgatgataatcctttgcccatgtataaaacagttccctaatgttctgcaaacggaattccgtagtactcttatctatccagtctctggcaagcaaaaaacttttcacattagatactgttcccaatgccgtattgctctcctgagccagcgttttcacctgccattttcgctccggttcattcagcatggtacgaataattgctgatgcagcacttgacgatttggataagtaatttttcttttccctgtgggttatgaacttgttatcctgtccactgacatagagcagaaatcttttcgttaagatataacaatttccggacagatccatataactgcatttttcctctttcattgctctggctgactgctccgaaatatatggtgccataaaaatataatgcgttttatcatcctgccgcatcacgatttccataaaatgattaacgaatctcttttctccgttagacctgacttcaatcacaaataaaagaggctcatcgctgtcctccaaatacacctttgccttgaaatcccccaacggtgcattcttcttttccaaaaacacctcgatatccgaaacaaacggaatttctttcagccggttgcaaaattgttctctggccagttgctcatattgtatttgtgacaaattttgtttcatcaattcaccccttttcaccgtttcgatgaaataattatattttatgaatcttacattgtcaacggtttcatcacatatagaaacaccgcctttttacaagacggtgtttacgttctctactttcttttcctatcccagagccttttccagttcggcaatgacaatcttcaatgctttgatccgggcatattttttgtctacggattccagaatatgccagggtgcatactccgtgctggtcttctggagcatttcgtttacggcatcttcatactgatcccatttatcccggttgcgccagtcttcgtccgtgatcttccactgcttctccggggtgttctgccgttccgtaaagcgttccagctgggtgtccttgtcgatctgcacccagaatttgatgatcaccgcaccccactgggacaattccttctcgaactcattgatctcattgtaagcccgctgccagtcgttggtactacagaagccttccagccgttctaccatgacgcgtccgtaccaggtacgatcaaaaatggcaatatgtccggtcttaggaagtctcgtccagaatcgccaaagataatgtctcgctttctcgtgtggttccgggctggcgatggggtgtacctcgtagcctctgggatccagtgctcccgcgatccgcttgatattgccgcccttgcctgcggcatcccagccttcgtaggcgatgactaccggaatctttttccgataaaggcggtaatgcagggcattcagcttcttctgcagatgacgcagttctttcttgtattcttcctcggagatttccttgtccagttccacctcggacagcctcggcatcttcaccagtgggaatacattctgcaaaataggcacagcaaggctctcattctgcatggccacatggataccgctgcataatgtctccagcacttgtaattccgcccactttttgtccccggagtcgataatgtaccacggagctacggaagcgttagtatctgtgagatatttgtcgaagacttcctcacatttgtcataatgcttgttctgccaccagtcgttctcgcccacacgccatgcagtgtccttgttgccttccagttcttccagccgcttcttctgttccttttttccaatctggaaaaagagcttcaacaccagataaccgttgtccgtcaactgtcgttcaaaacgtttaatgctctcgatacgctccgcgtactgcttatccgacaattcaccccgaagtcttcccttcgtcacctcatccatccagccggaatccagaaattcgaacttcccggcttccggaatttttacaaaataacgatacaggaaaggtttccgcttctcttcctctgtcggtgcagacatggaagccaccttgaaaaatcgcggatcgatatttttaataattccgccgatggtactgcccttgccggccgcaccccagccctcgatcagcaccagcaccgggagcttatgctccttgatctgcatctggagtctaccaagctcctcctgcgccgcattcagtcgtttttccagttcctctttttccggcttcaccgccggaatccactgtttcagcatactgtaaccaccctttcccgaaatcctcgtttactaacttacataagtttagtgtataccatttttaaaaaatataaaagcaattgggaaatatatttacaaatattatttttccatccgttctctgatattattgtagatttcccatgtctgcgcatcatctgcaccgtttagaataacggtgctcccctctacttccatgactacataagtgtcacagtcgttatgagtatagcggatgtaatctgcgtggatttcatcgcgaaaatgtcccatggagtatttcaagttgccaaaaccgttcgtccggattgtattcgtatcccggaacatattctcttcgtaagcaatgctttcgatagcgtcatatttcactgtgtaatcctgccagccctccgcctgaacagtaaattcattttctccgtaacagatctcgatttttcccgtatataacgtccataccgtaaatagcacacacgcgagcattataaacacatagaccgcaaccactttatggttgtagtgtactgccagcccttttccggtgcgcaacttctttctataatagagataagaatacaggatgctgccaaaagctgctgccgtgatagcgacaataaacagaaataatgcagccatgctgtcactgaacagtccacagatcatgctcaatagtcctgctgccacccatattttcccactgaagcggtgcgtggcattccagttctcctcatcctgcaatgtccatacgacgcggatgccgatggtgcggttcggtttcaccttgggcagataattgcccacaataacaaatagcaatcccattccgacatacaaaattgccatgagcagattctctttccttacacccatatcgatccatctggcgatgccgttatagagcaatgtcattcccggcacgatccacgtaaccattcttatgaccttgtcactctgctgcctgtttctgttgtcgtaaaaagttactgccattattaccacataagtcactgcaaaagtgccgtttatccacagactgttctcaaaggtatatcccaatataatgcccacgcacataacaaatgccgagcagatcagcctgcctttatttttctgtatcatttccttcattatccgatgctcctttcaaatctgtgatccataacatgatttcttccagcacggaagcattcagttcataataaataaactttccttcccgcttgtcccggatcagatctgcctcctttagcaccgacaaatgcctcgatatggaagcccccgtcaccggaaaatgttcgcagatctctcctgccgacaatcgaccgtttttcagaagatttagtatttcacgccttataggatctgccagcgctttcaatgtatcctgtattcccaaaaatgaatcacatcctttcatccaatcgtttaacatttaacctaatcgttaaatatattgtatcatgcggattatttaatgtcaacagcttcacagatcaaggcagatacttattcctgcgtatggatacatctgtacataaaaatccctccgtcttatgacgaagggatctcattcttctctatacttacgtaccatcttccggcagtccccttaagaacaccactgccaccggcaatgacaaaaccgcagataaaatatcggacaccggctgtgaccactggatgcctcgaagtccgaagaaggctgtcaggatcaggagagccgggatatagatagtgccacttcggaaggaggctaagatcgtcgccctgccgccctttccgatggactgaaacagcatgttgccgcagatacataccggaataaacggtagcgtcagacattggatctgcaacgcataaaatgcaatctcataggcatccatatccgtaaggaattccagcaacagctctctgcggaacacatacaccacccctgcaaacactgccatggtcaccaggctggcacacaatgtgaaccagaacgctttcttcacacgggaatacttctttgccccgtaattgaaggacgataccggctggaatccctggccgatgcccagtgccacactaaatacgaaattgaaaatacgggacaccacgctcatagcggcgatggcaatatctccgtagacagctgcctgtgcattcaacaccatggtggacacgctattcagtccctgccgcatcatactggggaagcctgctgtaagaatattcttatgcacggcaaattcccaggtaaaatatttcggtgccaggctgctctgtgtctttccacgcaggaaaaagaataacaggattccgaaggatatgtactgagagatcatagtggaaagcgccgctccccggatgccaagatttaagccccacataaggatggcatctcccgccatatttaagataccgccggagaccagtcccaccatcgcaagattggcatagccttcataccggagcacattgttcatcacacagctggatgccattgccggtgccgacaccagaatatagaaagcatagattctcgcatagggaaggatggtctccgtacttccaagcaatctgcacaatccgttcagatccaaaataccgataattgcgatcaacactccggctcccaccgccagataaaatccagtagcggaaaaagctttcgcccgctccttttcatgagctcccaacaaccggctgatattgcttccggcgccatgaccgaacatgaatccgaacgcctgaataattgccatcagaccgaacaccacgcctaccgctccggtggcactggtgcctaactggctgacgaaccaggtatccaccatattatacagattcgtgatcagcatactgatggtagtcggcagtcccagttccaggaccagccgtgctaccggctcctcggtgagccttttatactgtttttcctcttttgtcaaagttgtatcgttcatgttccctgactcctataagtgtcatcgcacatttttccatgcgattctctatctgcttatttttactattatatgtttctttctctcaatccaactaccgtatctccatgcatgattcggtgtagctactgagttttgacctaagcagctgtcttaccctcatgcatagcctgatatgcgattactacatcggaacagagatttgccgggcggattccggacttgcaccggttagaaacgtgcgctgcgggtgcaccacagtgaaaaatagcgtctgcccttccggcgcgacgctattatagatgattttctttgaaaatgtaagccctttcagctgttttttacttaaattttatgttcagcatcacagtttctcactgaaatagctcttatagccctccccgaagatctccgtggcactggtgacgatcataaatgccaggggatcctcttcttttacgatctcttccgccttgggagaaatgtttttcttcatggcacacatgatgacgctcttctccttgccgctgtaggcaccgctgccctgtacataagttacaccaatgtccagttcctccaaaagtctccctgcgattttttccgcatggtcgctgataatatagatcagcttcgcctcatcacgaccgtacaataccacatccagcaccactgatgtgataatgaccacgataccggcatacaatgccttgtcaatgttccggaatacaaacgccgatgctatgacgataaccacatctgtcaggaaaaacaatgctcctgtcttgaggtacgggaactttagtcgcagcagcttgataataatatctgttcctcccgtagtggatccggccttgaacacccagcccatggatactgccatcagggcacttccggtcagagaggcaagcaatggatctgtggtcactgctcctaccggtgtcagcaggttcgtaaacaaagaggtcattgccgtacaatagattgtagacagaataaaccgcagtccgaatttccagataccgatcaaaaggatcggtatattgatgagcagcatccaggtaccggtttcaatgccgaacagacgatttaagataatagcgataccggtgattccaccgggtgccagggagttcggatccaaaaataagctgacggataccgcatagacaaaggatgccaccgtgatcatcacataatcccagagcatctgtaagggtgtctttttgtccagtctctgtatttccagttctttttctgtcttctttgccataacttttttctccattccatacaaaagccgcatatctataatatgcggcttttatcggtgatacattcacttcttttcaaatcttaaaacttagatattggctcttaccagtttcggctgatagccttctttttccagagcggcaatgatctcattcttatgctcggtaccgaatgcttccagtgtgatacgcagttccacggcagcgctgcggttgatggatacaaactggttgtgctccagcttgatgacattaccgttaacgccggcaatgataccggatactctgcacagctcaccgggcttgtcgggaagcaatacggatacggtgaagatacggtctcttaggatcagaccctgctgtactacggaggacatggtgatgacatccatattaccgccgctcaggatggatacaatacgcttatccttcacatttaactgctttaaggctgccacggtcagcagtccggaattctccacgatcatcttgtggttctccaccatgtcaaggaaggct

SEQ ID NO: 5591 - DNA, 3963 bp, Unknown
  gut microbiota DNA sequence
cgatccagatccaataagccgagaaaatatccttttttgcgtaattcatgggacgaaccggagataatgtcgaacatatggggattctcgtaggggcgtcccttgtaaaaactgtcagcatagaggacagttgtgctgctttttttaaccagggatactgcggaagaattgggaatgtaattcaattcggctacggcatcctggattcgcttataagtggaagaagagacatgcatctgattgctcagtactcggctgactgtggaaatagatacattggcttttttggctacatccttgattgttgctaccatctgagatcctccattggtaaaacgtttgcgtaaattgtgcattttttatgggctgtttcgttgctatttcgcaggcggtctgctatttttagtatatcgaattcgcaaagaagattcaatactttttaaacatagcgctgtgttttataaaagtagaaaaacgttttatcaaaaggaggaagctatgaagaatgagaccacggcagatcagtatgtatttgtcgagcagcattccacttcctataatgcagcagcctggatccagggctttggcggttatctgatcaatgagaacagagagccgggattgaatctgccccagacggtagaagctatggaatatcataagcagtttgtgtcatatatgccggcagatggtgagtacaataccgtgacaactctgtttacggaaggaaaagcagcaagtactatcggaggtccctggctggtaccgggtatcaaagaagccggtattgacttgggaattgcgccgatgccggtcctgccgaacggcacatctctgacacctttttccggagtacagggcgttcatgtactgaagcatgcagcagagacgaaaaaggaggcgttggcagaagtgttgaaggtacttggatccaaggagaccggtgtggcactggcaaatgccgcaagctgtgcacctgccaacagtaaagcttatgaagatgcatctgtgtcagaggaccaaatgatcatggcactgaagactatggcaaacaatgtagtacctatgcccaacattccggaaatggatgtgatgtggtcagtgacagatgacctgctggcagcagtgaataagcgtggagaggatgtgcagacggcatgcgatgcacatcagaaggaagctttggaacagatttctgcaatgcagtaatttgcagatgtaatgacaggtaaggagtgaaagcaggatgaaacgaggaaagaagaaagtatggttctacagtatgccgtttctgatcattgtagggttgatgattgtcgtgcccttattgtataccgtagaaatatcctttaccaatatgagtatttatcattggaaggattatcattgtgttggactggacaattataaaaaggcattgctggcttttgattctggatttcttcctgcttttttacggactctattatggactgtatccagtatggcattacagttgatctttggctttttcgttgccgttgggctgaatgcgaagggattaaaactgagaagggtctacaagactctgctgatcgtgccctgggcgatgccggcatatgtatcaattctgttatggcgcatgggaatttttaatacggaattcggactgtttaatcagatactgaaacagattggaggcaaaacggtaaattttctgtccacaaacggtatggcatttatcagttgtctggtggtgaacctgtggctgggagttccgtatatgttcacgatgatggacggtgccatgcagagtattgaccggaatatctatgaaagtgcggaattagatggtgcgggattttggaaaaaacatttttatgtgaccattccgcagattcttcccattctgatgccggtgatcattatggctacattcacggcgtttaagcagtttgacattgtgtatctgatgacgatgcagaccggttcgaagactggtgcagatattaatacggtaatcacctatgtatatgaaaaagcgtttattaccagcaactatggatattcatccgctgtggcgtttattgtatttgtgattatactggtgctttacaagaccatgaaccgaagagagttttcaatctcggaacagtgaggggaatatgacagggaaaaaaattaaagaaaaagtaaagctgatattgctgaatataggattcattttactttctttcctgacactgattcctatcctgtatgcattcagtatatctatcagtgggagtaacagtattatttccacagaatttcatattttgccgaagacaatcactatggataactatattacgatcctgacggagagaccttttgggagatggtttgtgaacagtcttctgctaagcgcactgaccgttctgctaactatgctggtggctgtgccggctgcgtatgtattttccagaatgcggtttgccggacgaaagaggactttatatattttactggtgttaaatgcgttcccggcaattctctccatgtttgcaatttatcggattatcaagactctgaatctgttgaattcttatatgggattggtatttatctatgcgggaagtatggcgatttttgttttctggaatatgaagggatattttgacagtattcctgaggctatcgaggatgcagcgagaattgatggtgtgaatgacagacaattgatcacgaagatcgtcatgccactggcaaggccaagcatcatcatctcttctgttctggtggtgatctatgtgtggaatgaatatattttcagcacagtctttttgtcaggcgcggagaaaaatacactggcggtagcgctgtattctctgcaggctacggactatacgcgtaactggccgcttttttcggcagcggcaattctgacaacacttcctgtattgattttgtttttcctggtgcagaaatacatggtatcgggactgtcttcgggaggtgtcaaaggttaaaagcaggaggaacttatgattttacaagaagcaattttacatataccgctgtcgcagtatgcatttgcgaacagtgagatgaatcttacaattcgtatccgggtggcgaaggataatctgacagattgtgttctgtggtacggagaccgcgtacaacccggtgatcctattgtgtttacggcagtgtacatgaagaagatactgtcggatatgcattttgactattatgatgcaacttttgagactccgtatgacagggtatgctactattttgaattgaaagacccggaagagacgaggttttattatgcagatatctgcgcaaaatatcttccggtagagagaagcgaattttaccagtatccgtttatccgcagagaagagatctgtgaggaaccgaagtggttccgggaggcaatcgtttacaatattttcccggacagctttgccagcggacaccgcgagatcgtaggacagggaaaagagatggaatggcagaacggcatccggttgaaaagccgtctaggcggaaccatacaggggatccgggagaatctggattatattcagaagctgggattcaactgtatctacctgaacccggtattcacggcgggagagtatcataaatacgacctgctagactattttcatgtgtcccccaatatgggaacggacgaagagttccgggaattggtgcaggatattcacaacagaggaatgcacattgtcattgacggtgtgttcaaccattgcagctggtatttcccgcagtttagcgatgtggtggaaaaaggagaaagctccgaatatgccaactggttttatcggctgcagtttccggtgatacgcccggcaacggaagaagaaaagccgacatacagttgtttcgcttatgagcggaagatgccgaagctgaattcttctaatccggaggaaagagcttattttatggaagtatgccgttattgga

SEQ ID NO: 5592 - DNA, 1016 bp, Unknown
  gut microbiota DNA sequence
attttcgtagggctgctcatgaggaaaatccggagagtgttatgataggggagatatgggagagctcggagacctggctgaacggagacatgtttgattccaccatgaattatgatttccggaagaactgtcgtgatttctttgcccttcggaaaatttccgcagaggaatttcatgatcgtatcgtgaagatgctactgcgatatcgtaccggaacgctgcgtgggcagttaaacctgttagacagccatgatgtcaaccggttcctgtcgtactgcgagggagatctgcgaagattccggctggcagaagtgttcctgtttacctctcccggaattccctgcgtattctatggggatgaactgggaatggacggcagtagcgagacaacactgcgggggcccatgccctgggaaaaggtgcaggatggagaggatgatttcttttcccggctgattgctattcgtaaagaacatgaggagctgacctatggagattacactctgcgatatatggatcatgacggaggatatatctatcagagaacctggggagatcacaagattacagtctgtctcaataatggcagcacaacgattgatctgcgggagtatttgggaaagggcagcgtgcttttgagtgaatcctatgaagccggaaagcttgggagtatgggatatgcaattatagaagaaaaatagaacaataataagagaccggatggtgagcgattgctgtccggttttttcgactacattttacacagagtgttgctggttttcggtcgtgttttcccgcagaatatggtaaaataaatagcaaagagacatttgcgacaaataaaaaatggacattcataaagagaaaacggatattcagaaggtaaaggtggacattcaaatataaatgtaaacataggaaaggcagggcgaggttatgaaggattatgatgtgatcattatcggcgccggagtcagtggctgcgccattgccagggaactggcgaagggaaagct

SEQ ID NO: 5593 - DNA, 20670 bp, Unknown
  gut microbiota DNA sequence
gagagccgcagcaattgcaacagctttcggttgtaaagtaattttctattctatcactggtaagagtacctgtaccgaatatccgcaggtggacaaggataccctgttaaaagagagtgatttcctgtccctgcattgtccgttgagtgatctgtcccgcaacttcattgataaagaagcacttcgcaagatgaagaagaccgcaattctcatcaatgtggcacgtggtcccgtggtaaataatgcagatctgtatgaagcactggtggccggagagattcaggcagcaggtctggatgtcctggaaaaggagcctttggagttatctaatcctttaagccagttaaaagacagtaacaagctgatcatcacaccgcacctggcatgggccagcgtggaggcacgtacccgttgcgtacagggcgtctacgagaacattaaggcatttatgcgtggtgagaaccgtaacgtggtaaatttataagccatacggtggtatagaatttcataaacagtgattaagatatacacaaatgtctttggaatgcttgcatttaaggggatatttgtgtatatttgttatttgtagttaactattcagagccatgtaaatagtctcgaatgagcgtggaatgcttgcattcgtaagaacatttgagactatttatagggcgaagtaaccacatgagcaaaaagaaagcctcgtagaggcgattttgcgaatggggttctgaatagttttgttaaccttagcacagagaaatgaggaacaatatggtagaaaaaataaaggcactttggatcaagtatgaagagatcattgcatacctgatcgtaggcggactgaccacggtcgtatcctgggcagcaaaattcctggcaaacttcctgttatttgacaacacaatgtatccaacaccctttcagaatgttgtattaagtgttatcaactggacggcgggtgtcattttcgcatattttaccaaccgtaagtttgtattcaagagcaatgctccgatgctgtccgaagcaccgaaattcgtactttccagagtatccacgctgatcctggatatggtagtgatgcaggtactgaccgcaatcggtgtaaatctgctggtggcaaccctgatctccgcagttctggtcatcatcggcaactatgtattcagcaagctgttcgtattcaacaagaaaaaagacggcggagcagaagaggcaaaataaatatattaacttgcaagagtattataaaagcagtccggaactggcagaagatagaaaatctgctggtctccggactgctttttatgtgcaatttatatttggagttatgccagataagccttcaacaattccagcgttgcggcaactgcatccttgtgggaacgctcgtagccgtgggaagcgtagacacctgggccgatgagtccgtgtctggcatcaataccggcgcttaatgcggcatcagcatcggagccgtagtaggggtaaacatctgcggcgtagtcgatatgattgtcttttgcagcctggatcagccctttgaccacatcataatgataaggtccgtggccgtccttgacgcagatggatacctgacgatccgtgcattccagaccctctccgacgcaacccatatctacggacagcagttcctccacatcttccggagcggaagcgcaggcaccgtgacccacttcctcgaagaccgtgatatgctggtagaccttacgggacagcttcagatcctcgtcttttacatattttgcgaagccaagcagaatagcggtgctgagcttgtcatccagaaaacggctcttgatgtaaccggactccgtgatgcgggtccggggatccatgcagacgaaggaaccgttctcaatacccagtgccttgacatcttccctggaagataccttttcatccagcaggacttccacggaatcgaaggtacgctcggacttctggtaatcgccgttgacatggatggaagcatccgtcagctgtacggtgccttcgtatactttgccgtccagcgtatagatacggcagttctcggtctcgatattgttggcgtttaagccgccgaccttagtcagacggagacggccgttgctcttgatctctgccaccatgccgccaagggtgtctacatgggccatggtcagaaccgcgttgcctttaccgccgatctctacgagaacgccgccctttttggtcttgaccggtttgtagccgaggcgcttatactcttcacagaggtaatccgttactttttccgtgaagccggaagggctgtcgatagccagcagggcttcggcctgttttaagatatattcaatgtatttcttttcttttttcatgttaatatgcatgcctttctattgcctgcaaagtctgtgcagcaggcattgttttcgatccacaggacagccgcccggatcagatccggggcatcatagcctctaccagcttggcggagtggagcgctgcggccttttcaaaggtaggataatccatctcggcactgtcatccgccttgtcggaaatggcacggatgatgacaaagggaataccgttcaggtaagcaccgtgggcaatggaagccccctccatctcggcacagtccccctgaaattctttgatcaggcgatccttgacttctttgctggaaatgaactgatctccgctgactacacgcccggtatgaacgtgaatgtccggattgacctcctgacaggtgctggcagcaacctcgatcagatgctcatctgcaaggaattcccggcatcccagctggggaacttccccaggcttgtaaccgaaaatggtggcatctacatcatggtgcagggcatccttggagatcagaatatctccgatgtccagagcggcattcagggatcctgccacaccggtgttgatgatggcagtgacctgaaaaaggtctgccagaatctgtacgcagagagcggcattgactttgccgacaccgctgcggacgatgactacgggagtaccgttcagggtaccctcgtgaaattccatatttgctttggccgtgatattagtggtggtcatgtgagccttgagagtttccacttccagctccatggcaccgatgattccgatttttttcatgtgtgtttcctgttctttcttaaataattgtaatcactccggatataccagacggctgtcgtcaatgccgtacagcacattatccagatagcgttttgccagatagttggccatacccagattcatatccagatagttgccgcagtctttgggagaagcaccgggtacctcacccttgtaatcgcggatgaattcaaacatttccaccatcagaggaacaatatccttagaagagagatctccggccagcagcagatagaagccggtacggcatcccatggggccgaagtagacggtcttgtccttgtattccggatgattgcgcaggaaagttgcacccagatgctcgatggtgtgtacttctgcggtattcatcacaggctcttcgttgggactggtcatacgcagatcgaaggtggtgatgacctctgcaccgatgtgatccttgcgggatacatagacaccgggctgaagcttgatatggtcaatggtgaagcttgctattttttccatgatattctccattccgcacaatctttcaggttaataattgcgctttttctctgcatagtatacactaattcagtagaaaagaaaatagccggagggataagagtatgaagcattcagcggaatattatatagagcatctggaaatggagccccatgtggagggcggttatttcaaggaatgcctgctggaaaaagaagagaggaacctgtggagcagcatttattttatgctggcaaagggggaagtgtcccattttcatcgcctgaagtcggatgaggtatggtattatcatgacggcaatgcgttgacgatttatatgatcgatgaggccggaaaactcacagcggcgaaacttgggctggacctggaaaagggagaagtcccgcaggtactggttccgaagggaatgatcttcgggtctgccatggaggaagagggtttcagtctggtgggctgtatggtttcaccctgttttaaatatgaagaatttgaactgtttgaacggaaaaaactattggaaaaatatccggaacacagcgatgtgatcctgcgtctgacccgtgagtaagcacttacattcgcaaagtagcgcaataaagcgttgcattctgccattttgtgtgttatactagcttcgcgtgcagatgactgcatgcacaataagggttatgagagggagaaagaaaatgaaaaaatttgttggaattattgtagcaactgtactggcatttagtctggtaggatgtggtcctgtagacagcgcaattcagaatattgcaagttccggatccaataccagcagcaagagtggtgtggtaaccgcagatgatgacggctatgcagaaggacgtatgggagatgtaatgagaacttacttcttcgattacactgtaaacagcgcatatacctgcaatgactatgaaggatataccccttccgagggaaataagctgttagtagcagaagtaaccgttaagaacaccgatcgttctaccgttaccatgtatgacaccgatttccagatccagtggggcgatgatgataacgatgacgcatacgctgcacctatcacctactatggtaacactgtaagtgacgaacagctgccggaagagtatgatctgggtgttaacgaagagaaaaccggtctgctggtatatgaagtaccggaagattccaaggattattccatttcttatctggagcagttctccaatgacactgagggagatgtattcttcgtattctttactgcaaaggataagtaagagaaaacaaataagtaagactggcggttttgcctgtaaaaaagaaccggagtactgtggatcacagtgttctggttcttttttgcagtttatttttaatttataattatataatttttccttaattgacatacttatatatgcgtgttatagtacaaatagaacaagggagaggaagaaagatcaagagattgatcgaagatcctctgacaggttccgaaattctccggtggttgccggaggacaaaaggtaagaggtatcgaaagacaccgacatatgtttaatagaaaaggagagatgacttatgttattacctagcatttttggagagaacttatttgatgacttttttgatgatgtacctttctttgacaacagagcagagaatcagatagagaagaaactgtatggcagacatgcacataatgtaatgaagaccgatatcaaggagaccgatgacaactatgagttgatcgttgatctgcccggcttcaagaaagatgagatcaaggtttctctggaggatggttatctgaccattgaggctgccaaaggtctggatgaggatgagcaggagaagaagaccggtaaatacatccgcaaggagcgttatgccggagcttgccagcgtagcttctatgttggtgacaacctgactcaggaggatatcaagggcgagttcaaacatggtatcttgactttgaatgttcctaagaaggaagcaaagcctgcggtagagaccaataaatacatcgcaatcgaaggataatcctttaaataaaaaaaccgttgccccgtgagggacagcggttttttttcgtgtacgatgagccaagtacagatttgtgcctgcacaagaatctgtatgtggcggatattcaggacagctggcgtttccgcaggacagcccgttccttttttataatatactgttccagtcccggcaccggattgttcaggcggcaaccgtagaggaacagtccgttttccagttcctgtatccgtgccacgagaccatagagatgaaagttgaaattctcagcggtctcgtccatgtggtcattcagaaccgcatgaaccgtctggttgacctctaatttcaagtcttccctgctgaccacggaaaaaccgttatagctgatatccttaataatggcatcgtgggcggcacggttcagaccacattgtacggcagtctcaatgccaatatagcatcggtagctttgtcgtcggttataggtcttgcttccggcaatggaggagacagtatagcacagtgttccatcggaaagctttactacattggtagtaacgtttttgaacagctgcggtttatcctccggaagtgtgacaatgagatctacaatcaggccttttccacggaaagagataattttatcatcagtaaacacaccctgcgccagcaaagtgtgcctgtgaggatatacctccagaattttggattcaaattgaagctgctcggtattaagattgatcaaaaagctaagggataaccctgctgtcaagtcatcgatctgcataagtctggtggtctcccatctttacaaaattatttaattcaccatttttgcattgggatagatgcgttccatccgtgcatccgggtaatgggtgtctaaaaattgttccagtccgttaagctctgtagtttccacggaataggaagcgccgttgcgctccgtatatctggccagcgccagtgcggagatcagcatattgacaatcataaatactatcaaaatattgcagacaattgtgccggttcttttcggaatcttttcaatacagccggaaagcttcggatagatcagtttcagccataccacagcggcaattccccaaaagaagcagtacaagaggttgatacggccgcctaagttaaaggcaaatccgctgtagtcccagaaaatcgtgccaaagaccatttccgtgaagacgctgcagatatattcgtaagcaccgcccagcagggtacctgccagaaaaatagtactgtcgctcttgttgcggtaacggtagagcagcagggtaaggaaggcacagcccaaaccccagacaatactgaaaggcccgtagacgacactgctgcggctcatccagacacctgcggtgatgcggcagaagatcgtttccgtaatgtcacctaacaatgcaccgatgaagaagagggaaaacagtttgtaaaagcagcagccctcggcaaagacggtggattttttatgttcttctctggcttttaccagagcatccaggctgatagaaggatatgatttctgcagtcgcttctgtatatgtcttgtcagggcattttccagaaaacgggaagtctggcccagcccttctgtaatctgatccaggcgggcggtctgcttttccagagaggcctccacccggtgctttgcctgtacctgtaggcttaaagtagataaagcggaaccaacggtgtccaacaggagcagcccgcccagcaccaacagaagtacaacggaaagcaagtgcggaatgcggtcaaaaagtccgcataataacggatctgcaaacattaccgtcacaacacttaaagcaccccacagcagggaaaaaggcaggcagatgtagccacctacgttgtagcggaaacgggagtaatcccacagctttttcttatagaccttttcgaagaacatgccggtggaatattccaacagggaagccagtacaaagccacccaggaacaggaaaaacgggtcttccgttagttccggcaggaaaatctcgaacaatatggcaccaaaaccgtagatcgggcataggggacccgctacgaatccgcggttaacgaatttccgatgctgcaccgcagcagcacatacctcaatacaccatccaataaaggaatagaagaaaaacaaccagaacaggcataaccaggttattgtcataggggcacctctttcgtcgaagattgtcgaatattgtcttgttccatcatatcacaacggcatgatagaaaccatgactaaattacaatgttggaaaaatgtacaaaatggtgataaaaaccgttggaaaagtgtacgaagccatcgacatattcttcggtaggctcttaaggtctcggaaatctcggcgatatgatttatctcctcccattcattgtctgttagaccgtcctgctgcagactttcccaggcaatgtcacaattcttgtcctcgtgtaattccttcatattgttgtaataggtcttatctccggtgacggcataaggctgtacggcagcggtcagcgttttggaacccagacggtattggttcatatacatggtagcttccagctgttgagaattgatccggctcagatatagattggatcccacgaacaggatcatcatgacgatactgatgatcagtatccgataggtagaccttgttaaaaatataaaaaaagcgtaaaattattttgagaaccaccggtgatggcttgcaccctatacaggaagatggtactataaaacgtaagaggcatgattcggaaaagagaagataacggtaaaaataaagataaataaagataaataaagataaataaagataaataaagaaccaggggtggttacatgaaaaaaagaatagttgccgtgacttgtgtgctgatgttttgtctggggttgatcggatgtgggactgaacgagccaacaaaacgcagcaactgatccggggtgcggcaccggggtataatgacggtctcatccgggtgggaatgatccagacgggaaaagagtctgactggagagatgccaataccaatgattatctgaatacgttcaccaaagaaagaggctacgatctgatctatatcgacggcaattccagttcggagcgccaggtaaaagccatgtacgatctgatccagcagaaagtagattatattatcctgcagcccatcgtggagaccggatgggaggatgccatacatgccgcaaaggaagctgggataccggtcatcgtagcggatcgtaaaatcgctgtggatgaaacggaatacgtgtcctggatcggttcggattttgaagaggaaggccggaaagctgtaacgtggctggatcagtatttaacagagcagggacggaaaaacgagacaatccacattgtcctgctggaaggaactgaaggagctaccgctgccatcggaagaacgaacggtattttacatggagtggaggaacatccgaactggactatcgtagacaggggatgtgccaatttcactcagggagaaggccagacctatatggaaaatctgctcagcgaaggaacagtaaaggatattgatgttatcatatcggaaaatgataacatgatctttggtgccatgaaagcactggaccggaacggcaagagctatgggcctgagggagacatcattatgatctcctttgacgctttgcacgaaagctttgaaaatatgatggcgggaaaattacatgccaccgtggagtgtaatccgctgttggcatccacggtggagacggtcatagaagaactggaagccggcagagaggtggacaagatctataacactgaggaaaacatctatacctatgaaaatgcagccgactatatagatcagagaaagtattgatttccgaggatgacgaatgaaaaaatcattaaagtataaaatcgttctggctattgttatcatcgtatgcattatggacgtgagcttcatatttgtaaactacgtcaattatatgaatgtcaatcggaattacacagattctctggcgcagactgtggcgaatacctgcagactggtggtagatggagacagcgtaacgggctatctggacaacagacggagaaatacggcttattacgaggtatggaataaactcattgactatcgcaacaccagtgaaaatgtaatgcagatcagcgtggtcaatttcagggatggtggaggatgttatgtgtatgacacagatctgacagaaaacggagcatttttaggagatatccgcccctatgatgaggtacagaatgctataaaagacgagttgatcgcatgtgagaaaatagaaccgttagagtataacggaagaagcgattactacattccgctgaattcctcatacaatattccggtggcttatattatcgtaggaatttccacagaaaatgtcagaagggagcaattgacttatttagggtatattaccatcattgttacatcgattacggtgcttttcggagtctttatgatctggtttatgcagcacaatgtactgcgaccgttaaatgccatgtccaaggcggcttccagctattctattgccattttgcgggatggtaaggaatctcccatcagccggatgaacatcagaaccggagatgaactggaacgactgtgtgaatccatgaagaaaatggagcatgatatcattgcgtccagttcccagctggctattgctgattggaacagcaatcatgacagcatgacgcagctctacaacaagagacactacaaagaacagttaaaagaactgcagaatgacagtaccatcggtgtaatttatttcgacattgacaatttgaaacgcatgaatgataccttcggacatgaaaaaggcgatgctgtgatcctgaaagcagcggaatttatccggagatatctcacggagcaggcaagcggattccgtatcggtggagatgaatttgtaatgctgatcagagattgtacggaagaaaaagtacaggaactggtaagtaccatgcgtggagatgaaaaaggaaatttatcggatgtaacagcagagttttactgccgtcttgcaatcggcggagcttttcgcaagacgggggaaactctggaagaaaccataaaacgggcagatgatgaaatgtacaagaataaacattccgtgagaaaagcctgaaatttcaggctttattgaatagtcagccggaagccggcatcgctgcccttcagccggatccggtacagatcatgatcccatgccgttttcaggcgtgcgtccgtgatcggtaaagtttctatggcaagcagatcagccccttcgaaggaggcagatgcttctccgatggagagtttaccgtcagaaagaataaccggtttttcataagtaataaaattaagaataacatcttgcgcatttgtgtggtcttccaatacgacagtgttggaagacttttttaatgtcaccctgcggacataagtcagatccggcacaatagcctgtgcggcaggataggcggcagccagttccatggaaatagaaggttcggctccggtcagaactgtcatcacattttccgcacggtattccacaccgtccttctgatccgtaccgcagattgtaggcaggttgtgataccctgactgcatggtccagatctcgtaacgtctgggagagaaggtcttccgggtgtaggtctccacaccgatatccgccagaatgggcagtccatttttgtataaggtgatgctgccggtatcattgtggttgtgactgtcggcattgtctccggctttgactgccagatccagagtatcggaatgcacgaggaacagccctacgctgggataatagacatcccggtgggaaagtgttccggaagtattctgctgcatcagttcttcataatgaaatacggtctgcatgcgatagaacagattcccaccgttcacttcatctgtgacaagctgtccctgacccgcctggaaatcttttgcggcgaacaggcagagatcctcctgcccggtggccttgccaaagagatattcccgtactccggcacggccggctataggagagcagtcagcaaaattaaaatagtatttatcattcacatgcacgttcagaatataggatgcaatatttttcaccttatcccaccggaacagagtgtcgaaatgaccgtcggtaaccgtgttcagcacagtcatggcaccgtatagacatagtcccgcatggcgataatattgggcaccctcctcgcaacagccgtcattgccgtaatccttgagaaaataatcacagctttcagcagccttatgcagaatcgcctgcaatgtgacaactgtgtcagacgtattctccggcaggaataacggagcatttccgcagaatgtgcgcaccggagaggacaaccgagaggacatttccacactccagggcatcaggaacgtggtcagcagtacattctgtgtacaccatacggtccagttgcacataggctcatcgtcatgtcccatccaccagaaatgtgcggtcagatagggcagcaggatccgtcgcttcagattgtcctcgatgcaggtcaggataaaagggctgacagcgttgaattcttcttccagcagataagccgcacaggccagcagtgcaccggtctcgcaggcgaacagatccatgacgggcctggtcacatccggcaggatcaactgcggggtatcccggatataggagttatgcgcgggaagctgccaggcagtctcttcacagatggaatagataccattgagaatatcgtccagaaaacgtccctgatgttccacacattcggcctggatcagatcattcagggcattgcgtttggcaaaatagagggcttcaaaagcagcccggtcaccgtctcttttaaaacgcatataatccgtggcacgtatcaccgggaatttgtatccaagtttcgtctctccggcctgaatcagaagttccttcaatgctgccgggagtccttcataagcctttcggtccacagccttcggaaatgggtgaaaagggtggctgtttccgtggaatgcttttgctgtctctaaaaaacgcttttctatacttatcggttgtgaattcatttctctgatcctgccttttcatattcataattctcaataagagacaaaccgtaatagcagttaactgaacttattgttgacgtattccgtgggggagacaccctccacccgtttaaataccttgctgaaatagaaggcactctcgaagcccagagcctctgcggcctcgtagaccttcatattttcttcttccagcagccgtttggcttccgtgatcttgcagatgttgatatattcactgaagccggtatcgttgtatttgctgaacagctggcttaagtaattcgggctgatgccaaagactgcggccacctcattcagggacaaccgctcgctaacgtgttcattaatatatttccgaacattagttacgatgtggtttttataatcctttcgacgggattggaacaattcgcacagttgtccgcagaagaattgcagccactggatcacgtgatccacattggactgcttatagagggaacggtagccatccggatcttccgcaaaaaagccggacacaatagattccccgtcctgtaaaagcgaaatcgacagatagagaatattgctggcagcgtccagagcctgcacatagtgccccgggtgatcccggaacagatcgcagatcgactgaatcgtgttatgtaaaatatcaggatcatattcttcaaaagctctggtgagatcattcttaaacaggctgatattgaaggaattcttagccttttcctgtgaatgaccggtatcaaatgctactatcgcgtcatgggattccgtattttgaaaaatctgtctcgcgtactggtaggaatcacagatggtaccaggcgtctgaaccgggatgccgatgccgcagcgtagcgacacattatagtagttttgcagagttccactgatattgtgcagaatctccgtcagattttctacataatcatcggtacctacggcatccgcaaagcagaaaatcagtgcaaaatggcgcagatccagggataatgcatacagcggcagatatttaccgcccagttcccggatcatctgcagtgaactggtaaacagaggcatctgcttttcggcagacatctgatcggcctgagggctgatgatctctccgtaacagcacacataagcgccgtaatcgaaattcagattcagatctctgctctgcagacggaactgttcttcggactcgaacaggtcatgaaggagactgatcaggaacttgtcataaaagggatgaatatttacggcggacatctgctttttccgggaacgggagatctgtgtgagtacccggtctatggcatttttcaatacttccggtgtcagttccagctttaccagataatcggatacctgataagacaaggcatctcttgccatctggaaatcttcatagctggtgaggatgataaaataagggcagttatccccatagcgttctctgcatgttttcgcaagctccagaccgttcatgaccggcattttgatatccgtgatcacaatctcaggagatttttcctcgatgatcctgagagctgcctgaccgttcatggcagtgccgcagatctcgatatttaattcattccagttcagcatggagcggatacccgcctgaaccaaaggctcatcatctacgattaaaagctgatacatagtaactccgttctggacagatgtctgtccggattaagtgttttcagatgaaatagtttcggatgaaacagtttcattgttatgcagaggaatattcggtatgtgtatggacatcgtcgtatattccccttctttgctttctatggtaatgccatattctgcaccaaattggtattgtaagcgtttatgcacattgctgacaccgatttcccggaagaaatccgcggaactgtcgtcgttggagcgtaatacctgtgcagctttatccgctgtcatgcctacaccgtcatctgtgacatcaatacggatcttttcggtgttgtccgatgtctcatagccgacatgtatccggatgtgtccggcacagcccttcggttcgataccgtggaaaattgcgttttccaccagaggctgcaatgtaaacttgataatctcactgttgtacagagattcattatccacctgaatgtccatggtaatggtgccgccgtagcgatagctctgaatggtgaaatagttctccaacagagataattcttcccggatatcgatcaacaggctggtgcctttggaaatactttttaacagacgggacagggaggtggtcatctcggagataccggttgccccctgtatggttgccatccatttgatagagttcagtgtattatacaggaaatgaggattgatctggctttgtagcatcttgtattccagatcctgtttctgtttctcatcttccagtcgtttctccataagttccgatacattttccgacagatcattgattccccgtccgatatcccccagttcgtgatcccattccacgctgggatctctggagaagtctccgccggcgatgcgtaccatccgtgtctgcagcctggatacaggtaccgtgatcatacgattcatcaacagcatcagaacgacaccgatagacaaaatgccgatcaggatgcaggcaaggattcccatgaacaaaaccgcctgattggtccgctccgcatgtgaaatactctgacttaagtagcagtccggcatatttaacggagtggtgaccagaatctgttctcccatggtagcactgtggattttggaaatctgtgtggtgcccgtgagagaatatgtgctcaggtcatcaagaatactatattcgggcgtaaattcctgcaagcctccgttttcataaatataggtatgtcctgcaatggacagatagagaaagctgtctgacggacaactgtaatccttcaaaggtatggtgaacagatctgcggatatttcgatgaacagatatcctgcctgcctgttattgtattggtaggtaatgggacggatcacaggtaatactttacgtcccgcacggtgaaaaggatcggatacaataccgggcgaaaaatcataatcatcggcagtcagtaattcttcataataaggaagctccggaatcagcgttgcaagatctgcggtagaagagtacgttgcggttaccacctgcagataatgctcctgtgagacaatggcaattctgggcatataattataagaagaattccggctgcattcctcgtagaaggaatcataagtggatacggacaggacagagccgggattggggttatgttcaatataattggcaatattggaatctgtctggcaatatctgaccaaccggtagacttcatccatactgttgtccatagactccgacaacaggcgcaggctggtctccgtggactggatcagggtgttctgcagatagtgccggaatatgtaataactgaacaggctgatcaacagacacattcccaaaatggcgctcagagtgaagagcaatatgcgatttcgtatgctttttgagtgataaacagtctttttcatgctttcagtataacataacgaaagaaaaacggtagttgaaaaaacaagatgctaaaaaaagtgcatattaaaataaaatattacatcttccgaaagcacttttagaaaaaagataaaaaaattataaaagaatgtgaattatattataaatttttccatgttacggaaagatctttttcgttatactttagttacagtcaaggaaccgataacaacggattcgtaacagacgtaacatagtatcaaattaacaggagggtttacatgaaaaagaaagtattaagtttagtactgacagcagcaatgatgactaccatgcttgcaggctgcggcagctccgataacggcagcacagcagcttccaccggtgaggcacccgcagcagcaaccactgaggctgcagcagcttccaccgaagcagcacctgcagaagaagttaccttaaagtgggctatctgggatcaggagaccacacagtactggggtgacattaaggacgcgtatgaagcatctcatcccggtgtaactattgagatggtagatcttggttctaccgattacatgaccgttctggcaactgagctttccggcagcggatccgatttcgatgtagtaaccgtcaaggatgtacccggatatgcaacgctggtacagaagggatctattctttccctggatgattacatctccaaagatggcgtggatttaagcaaatacgcaggtgttaccgatcaggtaactgtagacggaagcctgtatgagctgcctttcagaaatgacttctgggtattgttctataacaaggatctgtttgatgccaagggtgttgcttatcctaccaacgatatgacctttgatgagtacgatgctctggcaagagagatgaccgataccaccttcggctctcaggtatacggtgctcattatcacacatggagaagtgcagttcagctgttcggtgttctggatggtaagcatactattttggatggaaactatgatttcttcaaaccttactatgagatggttctgaatcaggaagctgacggtgtatgcagaaagtacacggatctgaagaccgaaggtttacattattccgcagcattctccggtggagacgtagcaatgatgaacatgggctcctggttcatcgcaaccatgatgtccaacctgaagtccggcgaatatgattccagcctgtgcggtaactggggtatcgttaagtatccccatgcagaaggcgtagagcccggttctactctgggtaccatcaccggtctggctgtaaccactgcaagtgatactcccgatgcgtcctgggatttcgttaaatgggtaagcggtgaagaaggcgcagcagttatggcttccagtggtaacttccctgcaatgatgactgatgaagtagtagacatgatctccggtctggaaggattccccaccgatgaagccagcaaggaggctctgactgtatccaacctgtatctggaagttccttacgctcccaatgtatctgagatcaactccgctctggattcctatcatggaagtatcatgaccggtgagatgagcattgatgatggtattgctgcaatgaataaagcggtagctgaccttcaggctcagtaatgaagatcttctctataaaagtattgaatgtttgttgaatgttgaataagacttaaggggtcgtacctacggcccctttcttatcagaaaaagacgcaaaagatgacacaaaaagcgtttgaaaggagaattgttatgcggaaattaagccgtcaaaccaaaagagatctggtggcctactcctttattgcacctaactttatcggtttctgcgtatttactttgatccccattatttttgcctttgcccttgctttcatgaagtgggacgggagtaacccgatccagtgggcaggcatcagtaattttacaagactgtggaaagatactttctttatcgcagcatttaaaaacaccattatttattgtatcggtaccgtgcctctgaccatgatcgcatctctggcactggccatcgtgttaaatcagaaagtaataggaagaggtattttcagaaccctttcctttttcccatatgtagcttctctggtagcaatcaccgcagtatggaaaatgctgttccacccctcgaaaggacctgtgaacaacattctgctgaatgttttcaatgtaccgcaggaccagcttccccagtggttcaccggcggactggtactgttctccatgattctgttcagtgtatggaaatatatgggttattatatggtaatctacctggcaggcttacagggaatctcctctgaactgtatgaggcagccagtctggacggtgcaaatacctggcagaaattccgttatgtgacctggccgcagttgtcttccacgaccttcttcgtagtcgtcatgctgaccatcaactgctttaaggtatacgacattgctatcatgctggcaggaggcggaagcggcgagctgaccacttcagcaaccgttcttgtatactacatctatcagaaagcatttattgactgggatctgggctattccagctctgtagcaatggtactgttcctgatggtactgttcgtaacgatcattcagttccgcggtcaggcaaagagggagaaagcataatggcaatcttagctttgaaggttctcgataaggacagcaacaccatctgcgtcagcagcggtgaggattttgtggatctggtctgcacccatacctatgaagagggtgaccggatcgtgctggagaccgatgagaaaaatatacatgtacatttacaggtggatgatgctcttggggatgctttcgtatacataaccgacaatgtatcctattatgttcccttcggggagaaaaggatcagcatgtcccctaaggtattttccggaaataaacattatctctatgcggaagtcgcaagagaagatgagatcacagtctatagaaacctggcactgaatcctgcggatcagcatatggatgttccctgttatcctcatgcgacagccaatgtggagaccagaggcgagagtgtattcgcagcgaaaaacgccattgacggtgtccgggcgaaccgctcccacggagaatggccctacgaatcctggggaatcaacatgcaggatgatgcagctatgaagctggacttcggcagaccggtactggcagacaggatcgtgttgtacaccagatccgatttcccgcatgacaactggtggcagcaggtaacaatccggttttccgatggcagtgaacaggaatttcccttagagaagagcagcagggcacatgtactgccaatccccgagaaagagatcacctggctggagctttgcaacctgatcaaagcagaagatccatcccccttcccggcactgagtcagattgaagtgtacggcagggtaaaacgttaggaggcgcacagattatgaaatcagcacataaaaaagccgtttttggcaaagtgatcgtatatgcgatcctcattctgatcgcagtggtcatgatcattcctttcctgtggatgctttccgcatccatcaagagtgacagagaagtatttcagatgaatccttttgtatggatccctgcgaaccccaggtgggacaattacgtgaagatctggacgaagattccctttggcagattcgtgggaaatacggtatacttgacattgatcgttactttcttacagttactgaccagtagttttgcagcatactcttttgcaaaactggacttccgtcataagaacggactgttcctggcatacatcgcaaccatcgcaatgccctggcaggtatatatggtacctcagtttatcatgatgagaagaatgggattgaacgataagctgctggctatgatctgcctgcaggcattctccgctttcggtgtattcatgatgaagcagttctatgaaggcattcccgatgatctgtgtgaagccgccagaatcgatggcatgagcgagtatagaatctatgccagcattatgctgccgctgtcgaaaccggcattgtccacattgacgatcttcaccttcgtggcaacctggaatgactatctgggacccctgatctacttaaagagccaggagaagaagaccatccagctgggattaaaaatgttcatcagccagtattcttccgattacggtctgatcatggcaggatcggtattgtccctgatcccggtactgatcgtattcctggtattgcagaaatacttcgtagaaggtgttgcttctacgggactgaagggataacggataac

SEQ ID NO: 5594 - DNA, 17430 bp, Unknown
  gut microbiota DNA sequence
agatgcggagatcaaagacgctctgcagttttccacggagcaggtgatccgggatctgccggaatttacagagaagttccagaaagcatacagcgagaacggtttctatcagccgattccgaacaattactggacctgtgggttctggaccggagagatctggctggcttatgaatattcacaggacgaacgcctgaaaaaagcaggtgaggtgcaggtgaagagctttttggaccgtattgacaataagatcgaagtagatcatcacgatatgggatttctgtattctccttcctgcgtggcagcttataagctgatcggaagcaaggaaggcagggaagcagctatcaaagcagcagagcagctgatcaccagatatcatcccgtaggcgagttcattcaggcctggggccccatggatgctccggagaattaccgtctgatcattgactgcctgctgaatctgccactgctgtattgggcatccgacgagactggagatcccaagtatcgtgatattgctgagaagcacatccatacagcagtagcaaatgtgatccgtgaggattattctacctggcatacctttttcttcgatatgaagacaggtgcgccggatcatggtgccacctgtcagggataccgtgacggttccgcctgggcgagaggtcaggcctggggcgtctacggtatggcactggcttaccgttataccggaagaaaagaatatattgatctgttccggcatgtaacagagtattttctggcacatctgcccaaagatctggtaccttactgggatctggaattcaccgacggggatgaccagccgagagattcctcctctgcatccattgcagcctgcggtatgctggagatggcgaaatacctggagccggaggaagcagagcattacattacactggcaaaacagatcatgcggtctgtctatgtgggctatgccgtaaaggatccgaaggaatccaacggactggtgctgcacagcacttactcaaatcattctccttacaatacctgtaatcattacggcgtggatgagtgcaattcctggggagattacttctacatggaggcactgacccggttgctgaaagactggagagaatattggtagtattttaaattggaatatcggtgaaagctcagacaaaaatgccatgccgaagatgtttgtcgtagagtgtgagattttcttgaaaagtggtctggcaacagggcgaaagcgaacacgatgttcgcgtcagccgatcgtcgacatggatgtcgactgtaggcgggcccgtcatgatgagaaaaagtgagccacttttctttagaaaatccacattcggagaccttacatcaaggcatgtgtattttgactgagcttttgtagaatggagaatttggagggactaactgcatgaacttacatagcaaaaaagattttcaggactgtatgttatctatcctggagccgttaaaactttattacagtgaagaaaaggcgagattgacgttgggcgttaccatggcacattatgacatcggtgccacatggatggaggcattttcccgccccttatggggactggtgcctttctgggcaggcggcggaaaagagccggaattcgaagaaatctatcgcaagggcctgacggccggaaccgatgagaagaacccggaatactggggagagtgcacctcttttgaccagagattcgtggaaatggcggccatttcctacggcattatgtttgcccccgaagtggtatgggatcctctcacggaagcacagaaggagaatctctgcaactatttaaataagatcaatgagcatcctctgccggtgtgcaactggatcctgttcgccgtactggtgaacattgcaatgaaaaaggtgggacgccggtatagccccgagatgttggaagaatatctggaagggctggagacattctatctgggtgaaggctggtatcaggacggagattccggtcagaaggattactatatttcctttgccatccatttttacagcctgatctatgccgtgattatggagaaagatgacccggagcgggcaaaaaaatacaaggcgagagccatggaatttgcaaaacagtttatctactggttcgatgaagagggtgaggccattcctttcggcagatccctgacctatcgtttctctcaggtcagctttttcagtgtctgcctgctggcaggactggagccgttcccggttcccgtgatgaaaggtctgatcgcaaggcatctgcgcacctggctgaagcgtccgatcttcgacagagatcatgtgctgaccatcggctatggatatccgaatctgaccatggcggagcggtacaatgcccccggttctccttactggggcatgaagatgtttgcctttttgttgcttcccgatgatcatcccttctggagtgtggaagaggcaccattaccgaagctggcaccggcctgtccccagaagtatgccgatctgtttgtctaccattacggcaatcacaccacagcatttgcaccaggcgtctacagccctaacggacacggccagatcgtggcaaaatacggaaagtttgcttatgatacccggttcagtatcagcgtggcaaagtcctgctacgagctgcatgagaatgccccggacaatatgctggcgttctggatcgatggttatgtctatgtgcgccggatctgcgaggagtcaaagatcacggagaacggagtatggtcgaagtggagtccctatcccggcattacggtagagaccacgatcaccccggatgccggtggacataccagagtacataagatcactagcgagattgactgcgtggcctacgactgtggatttgcagtcagcagaggtgattttgaagaggtcggctttgcggaaaaggtggacggtatgtccgcccaggccagcaacgaattctgcagttgtactgtcagtgcggtacttgacgatcataccaaagccaacgaagtggcagaaaagccgcccgtaggctacatgatcaccgtagatcccaacaccaacctgctctacaccaagaccaagatcccggcagtgaaataccatatcagcaaaggggaacaggaaatcgtgaccagagtggatgcggaagttatctgaatatatagaaattgcagtggagttttgctatttgcaggctccattgtttttatatgaaataaaagtattatgtatactgtaaattgttgaaatataaatattaaaaaagtatatagttgcataattttttacattatatgtaaacacttacaaaaataatcataaaaatcatagagaaaaaaggaagtaaaaagtaatttattgcattttgtacaatctgtcttattttttataataaagatgtattgttgtaaataattatgggaggattgtatgaagcaaaaaacatgtaaagtagcgaaaacagtattgactctgttgctttgtgcaggtctgacggcaggttcggtgccgatagatgcattggcagcggatgtacagtcagaacagcctgttgggggcacagagactgatacagaagccggaacagaaggcaatacgcaatccacaggttctgtatctgatggaaacgtagttataaaggagagagaagaaacaggaacggagtgtggtgccccacaggcggattccgtatcagaaggagacggaatcgcattaataagcctggaagcttccaatacacatattgcaacttatacaggaaaaattccggaaggaatcacatgggatgcagatgtgacggtagatactttcagcgagtcgtacagcgcggttacggcaaaggcggcggatggaaccagctatacggttgaggttgtaccggaaggaattgtatattttatcgataatgtaacaaaagatttttcggaaactacaacagagccttatgaagcagtaaagacattagcaggtgaccagctgatcaataccgtctatgatcagcaaaagacggcggatactgcatggggtctggtagatacggatgcgcaaaccaaaggatataagaatacgactactgataaaacagccaccggtatttatggaaaaaataatgccattggagaaacgttgtcttatgatctgtatctggaggcaggcacctataccattacttcaggacatagagaatggtggagcaatacccgtcctatggaggtgctgttaaaaacagacgcaggagaaacaaccattggaagtgtatctgttagcaaaagtgcaaaaacagcacaattttcttatacttttacgctggatactgcccagacggttacttatactttaaagagtacggcaaagcaggctcctgttttaagctggcttggagtatcaaaatatatcacaaaggaatcggaatattttggacaggctctggaagacaataatcagctcactgttctttctgatgcttccttagaagcagacagcggcacaggaaagcagctttctgtgacaggtggctggactaaagatggtatctctaaggcaggcgcaaccataaaaaatgcacctgattttttccagagaaagcaatttacatataatctcaatttaaaatacaattacatacaagaagaaacggggagccgtgctgctgtttttcttggtaattccgattccactgctttccgtgtaattccggcaaagtcccagaatcagtctgtgctgagagtgggtaccaatgcaggagcaaaggattatcctttgacaacggctcttactgcaggggactggcatgcgctttctattgtgtataccgaggatgaacagcaaggctatgtggcattatactgtgacggagcaaaggtactgaatgccactggaatagggtttagattaagtaatactaacaatctggctgccggaatcggtgcagcttatggaaccagctatttgtgcaacggtacttatgacaatattgttgtcatggcagcagctgcaacagaggaagaagccattacggaaacacaggcaagactggatgccatcaaaggcgctgtccagacagacggaaacatagtgatatcaggtgcagatgttgacaaggcagcagctaatatcaatggtctgacttataagggctttggtatgttaaatggtaacagcaccagtaacctgctgctggattacaaggcagagcattcagatcaatactgggaaatgatgcggtatcttttcggtggagaatatcctttgtttacccatatcaagatggaaatgggaaatgacggaaataattctaccggagcagaagcctgtaccatgcgttatgagaacgaagaggcagatgcttcccgctctcccggatttgttatggcagcagatgcgaagaagatcaacccgaatgtcaagatcagtattttgcgttgggagatgccggcatgggttgcttccaaatggagcagtgaccgtaccggtgcaggatatgaagcagtttataaatggtacaaggagaccatttttgatgcctatgaaaaatatggttatgtcgtagatttcgtagatcctgataagaacgagacaacagaccctaatgaggactttatcaaatggttttccaaccgggtaaaaaaagaaacagatttcccggactatatggatcaggcagcgattgacgcttatcacaatatcagaattattgcttctgacgagaataagaccctgcaaatcgtaccttccatgagaagcgacaatgatctctacaatgcagtagatatcattggtttccattatcgtaccagtgccacggaggattacatcaaaatggcggatgtggacgacaaggaggtatggtacagcgagggttgtgcaacctttggttatacagagttacaggaaaacaagacgagtgaatacggtggtggaacgatcggaggatatcagagtccgttggctctggcagacagctttatcaatgcgtttaccggatctcgcagaacccactatattttccagccggctatcggttccttctatgaaggcatccagtatggccataaagagctgttaagtgccagagatccctggagcggttatatccattatgatccggcattgtacatgattgcacatttctctcagtttgcagtcaccggatgggaggataccgacccttcccagaatgaaatctggcgtgttatcaccggtgcaacctccggatccttcggctccagtgacaatgagcatcagacagcagggatggatgggaaagccagctatatgacactggtatctccggataaaaaagacttttctgtaatttttgtaaataacacaagaaatcaaaaaacctttaagattactgcaaaggatatgacagtagcctccgatgcaaccttaaaaatatggacaaccacaacagatagctatttacaaaagagtgatacagatgcagaacagcagaacggttgctggtatgtaacagttccggcttatgggatggtaacagcaactacactgaatacgacacctgcaagaacaccggaacaagaaatccataacgaggacagaacggttttggatactgacagtaccggacgcaatcagaatacaacggataatgtactttatgcggatgatttcgagtatacagaagaaccggaaatggaacagtataatgccaaaacccaggaaaccaccagtgtagattatctgacggcaagaggcaatgagccacgttatatgttggatacgcatggcgcttacattgtagagaacggcagattaaaatcggaactgacgaccagtgtgggacagtggaacggtggagagccttcgacgatcgtcggtgatttccgatggatggattatgtgacaaaaattgatgtccagattccggagacatctgcatcgacctatgcgagactgggtatccgcacccagacaggcatgaactggaaccagagcggctatacgctggagattaacggtgccggatcttggaaactgtaccgcgtaggcagtgctgtagcaaatggaacggtaacagccacaacagatggcaaatatgaattaaagctggcagcccttggcgacatgattaccgcgtttatcaacggagaacaggtcacaagctatcaggacgcatctccgatgctgtccggtcgcgtcaagatcagcaacaactggcatcaggtatattatgataaccttctcattgagaagattgcaggaggatgtgcttatgcgttgtctatggtggatggacaggatgacagcgtaagctatgagggaagttggacaatcgacaatcccggaagcggcagtgcggacaactggtatcgtaccttgtctgtatcaggcggaagcggtgcaacagtaagcttccctatccatggtgcgggatttgcaattattggacctaacaacgccgggacgaagctggatgtctatgtagataacaaccttgtagcggagaatgtttcgaccacagcagctgcaagtcgttatgagtcttacagctatagtggtctgagccttgcagatcataatatcaaagtagtagtaaagagtggtaccctgaaaatagatgcactgtatgcgttgggtgagacaacccagatcggtgatgatgtgcttgtcagcgtagaaacaaaatttcctgcagcttatgcagttgagcagaatcagaccctcaagaatttgccggctacggtagaggtaaaaacaggaaatggaactgtagtgacaaagcctatcgtatggagcaataatacggcggaacatttctcggaagcttatgcgacgaccagtgtcaccggtgtggtgcaggatggtgtcaacagcttcggagcaagtctcggagtgacgattccggtagaagtggtgccggagaatacggtatattttattgatatggtaaagggaactccggatgcagatgcaaaaacggaagcctttgcagcagtgaaggaactcagaggaagtgcgctgttgaaccagactgcggatcagttaaagacctccggcaatagctgggggctggtagatactgacgcgggaaccaagagttacaccgatactacagataagacagcaaccggtatttacgggaacaataacaaatcaggcgaaactctgacctacgcgctgactttagatcccggtaaatacaccattacctctgcacacagagagtggtggggaatgaccagaccgatgaacctgacagtaacagtggataatattacactggatgccggaacgattcaggtagacggcagcaatccgaatgctgtaaatacttattcttttgacgtaagaaccaaacagaccgtaacctatacgatcactgcaaccggaacacaggctcctgtcatcagctggctcgttgtcagccggaccggagatgccgaggaaattcagccgaatgacagtattcccggtacatcaggcagtgtcatccgtgatacgaacggaaaggcgatgcaggcacacggcggttccgcagcagccatgaaagaaggaaccggagagggatgcgtcaatattgacctcgatggtgacggacagatcacagagggtaagaccgtatatctgtggtatggagaagataagaccaacaacaccagaccggtagatggtgtaaaatgttatgtttctaccgatctttacaactggaccgacaagggaacagtactgtatcttcagagcagcatcctgccgattgaagaatccgcagagaaagcaatcacttcctccgcaggagcaaatggaacaggaacgacccagagttatcctgcaatgcagctcagtaataccaatttcgagactctgaaggcatggggaaagctgtccgcagcaccagagggtgtcaccgaagcggaattccgtgatgtcaagctgttcttaagagcctatgtcacagagtttgagaaagagccaacgagcgctgaggatatatcctggattgcaaagagttatgatgagacaaaggtagaggcaggtagcttcctgtaccctgacagcaagaccaatggaacccagaccgtatccagattacagcttgctttcgagggaatgtatggtaattattgcattactgagcgacctaagatggtctataatgaaaagacaaagaaatttgtcattattttccatgcagatggacctttgtacaacaatgaaaagctgtacaactgggtgaagaacggtatgcagggcaactgtgaagccagcagatacagccgcgctatggttggttttgcaacaagtgatacaccattcggacctttcgaagtggtaaatatgacccgtatgaattatgatgagagcctgaatgcacagcggttgggcgaagccagagacatgactgtgtttgtcgatgatgtggatgcaaatgcagacggagcaaaggatgcttatgtaatctactccagtgagatgaatgcaaagctgtatgcatctctattgaacagtgattataccgggctcgctgccaagggtaatacagcggacaatcaacagatggcagcccgtctggtatctgacaatagcagagaagcacccgctgtcatgaaatacgatggttggtattacatgattacgagcggaacggatggctggaacagcaccgcacatacctactatcgcagtcagaacattctaagcggctgggaaaaagtaggaaacccggcaaagaatgataccggaaaatgttttgatacacaggtgacatatattattccgattgatgcagctgcaggaaagttcatttatatgggagaccgttggaatggcaacaaattgtccgacagccgtactgtctggctgcccttacaggtagatgccacttcccatactattgcgattctgaatcgcaccaactggaagacagaagaactggaagatctgatcccggttggcatacagactgcacttcccaagatcacatggacggacggcagtaatttgccggagaaagtcacggtaagctataagggacagactgtggagagtaaggttgcctgggacaagagttcttatcaggtcatcggcagaaccactgtcaccggtaaactcatcgattgccggaacgcagagatctcaacagaaatgctggtatgtccgaaaaatgcagtttattttgcaaatgcatcgaaagcaccggtaagtgcagattatacttccatcatgaaacagctcggcaatacattgttacatacagtggatgtatatgatggcgcctacagtacagaaacaggatttggatatgtaggagcagaaggaaagctgcgtaacagcacagatgacatttatcaaagtatgcgttatgcaacagacaagacccagagcatcagttatcggtttgatttggaagccggaaaatataatgtttatgtgggtatgtttgacccctccagctggtgggatggaaaacgctatgcggatatcagtctgaatgataaggtagtaacagagaaatacaattaccagaataatgtaaacgatactcttacgtatgaaaatgtagaggtaggcgaagaaggaactctgacgataactatttcgccgaatgcagctacatccagtgccgttcaagtcagctttattgtagtggcaaaagcgcagaaggatgcagaagttaccccgactccggagcctacggcaagtccaaagcctacggcagcacctacggcaacgccctcaaacgattccaatcatgaggatgacaaggacaacaacacctcgaattctcctgtggcagcaaccgcaactccggttccggtagcaacagcaagacctgttcatcctacagtgggtgcaacaccaagtgatatggtaaatgcgacaccgaccgttccggcaacaacacagaagacagaaaaaacaggagcaaccataatcaatgcagccggtgaggctgaggcaatcggatggaaggatatccttgaaaatattcgtcagaatgtaagtgatagcagcaataaagatatctatattgtggcaggcagcgacaccgttgttcctgcagaagtattgcaaagcgtaatgggaagcaacctgtctctgagaatcgaaatcgaggaggaactggcatggatcattgaaggacaggagatcacagaaaatgtaggagatattgatttcggaatccttaggtcagcggatcggattcctgctgaactgataacacagacgacacagggacatgattatattcctttgtcactggtacacgacggaagcttcggcatgaccgcaaaactgtcagtccgtcttggtacagagaatatcggtaaatatgcaaatctcttctactataaccctgacaatgcagcaatggagttagttgcgttcggtcaggtggcagacagcggatgggttgaactcaactatgagcatgccagcgaatatctgctggttatggctgacgagcctatggatgtagagaatctgtccaaggatgcttcgtcggaagcagtttccgcagaaaatgacaacacagagagccagaaccgtaatcacagcaaagcaggaaaaatttggattcctattgtgattgtaatagtattgacaggatgtgctgcaggatatttctatctgcgtaagaaaaagtaaaagagtatatatattctgtatgatctaacattaaaaaccggcgaaatcttatttgacatggctgtcattaagatttcgtcggttttttgtatacggtaggttatgcaggattttaaaatcacgagacatcattgttcagtaggatacagaaagttgtattactttgcggagtaaaacaagaaaagacagaaagaagtatctgcaaataagaagtatataaaatgtttagatttggacagtagaaataaaaacgtttttatgctatcatgcatataacagtaagaggtgatagctatgaaaatagaacgaattgatgacaagacagtaaagtgcttcctgtccaatgaagaattggaagagtacgagattgattataaagattttgtgacccgcagtgataaggccaaagaggtggtacaggagattattgagcaggcagaggaagaggtaggctacaagccgccgaagtacgcatttgacctgcagatcatgatgctgccggatgagggactggtactggtattttccgagaaagaaccgttggagaataaaaacggtgcacagctgttgcaggctttgcaggaaatgaaacgggtcttcgaggagaagaaggcagagatcggcgctacgctgggaaaacaggcgaaggaagaaacggagaacaatgccgggaaaaataagaaagcaaagggaaaagcagaggaagcggcaaagccccagtttgcaatttttgccttccgcaatatcggcagagtgatcgaatatgccgccgtattaccggcgaacctgcggatcaacagcacgttgtaccggatggaagacggcacctgctatgtctatgtgcagaagggcggtgcgtcctacgagcgctacagtagagcctgcatccaggctatggaattcgcagcgttgtatgccgcagacgagcagaagataagatatctggaagaacacggtgaatgcctgatccgggagaaagcactgaagaaactgcgtgcataatactgcaccataggaatctgcatgactgcttgtagattaagcagattcaggatatgttccatggggtatctcccgctaccttcgccatatcctccggcagaggtgctgtgaactgcattttctcgccggtgatgggatggacaaaggacagcttccaggcatgcagcgcctgtcgctgtatctgctccatatccgggttgtacaaataatctccgatcaggggatagcccaggtatttcatatgaatccgtatctgatgggtgcggccggtctctaagatgagagagaccaggctgtgtccatttttttcgtccaaaacccggtaatgggtaacagcggattcccctttttcaaaatccacacagcgttcaatgatagaaccttctttacgtcccaaaggagcggtgatcgtaccctcagaaggcagcacagagccttttacaatggcaaggtattcccttgtgatactggaactggtcttgttggcgatcatggtggacaacattccggcactgacataatgcttggctataatcgtaagtccggaggtatcccggtccagacgattaatacaacggaacacaaagggacagttctgctgtgcaaaataataggcaaggccgtttgccagggaattgtaataattgttcatggaagggtggatcggcatgcctgccggcttattgatcaccatgagatcctcgtcctcgtagatgatatccagcggcagctccaccggtgggattttttccgaggagtgttcctcgtggatatgcagcgtcaaggtatctcccggctgcaatatatgattcatgaagcagggaatcccgtttgcctgcacggcggtggggtctttttttaactgcaccagattctgggaagaaaaccctttctgcttcagaaaatggttgaccggcaggggtgatatgaaatgatctgttgtataggttaatgtacgttccataaaaattgtgctttctaaattattatttatgatacataacgatggtatttttcatactctctttgcttgggcggctatcgtgatcaaatttgcggtacaatttatccacggcggctgctttatacgggtgaacttattgtatcataacacaattcccacgttgtaataaacagctattctcaggatcgggcaaaatcggacagtccagggagcaaataatgtcatttcagaagcagattatgttttctataatatcgttaaaagcacaagtttgtgcttctgcaagcacagattatgaaaaagctgatgcccgaagcagaggaatattgcgacagagattgggtaacagagcagatttgcaacgaaaataatgagtgagaaaggtatggtggtttgtatggaaaaatacgcatggcgcggaaaaattgtaccgggaatgcaggaggaatataagaagagacatgacaacatctggccggagatgaaggaagttctggcaaatgccggaattgtaaattactctatctggatgcagggcgaggaactgttcggttattacgaatgtgaaaagggcgtcgactatgcggcaaaagtgcaggcagagagcgatgtagtgaaaaaatgggatgaatatatgaaagatattctaatcatggagaaggatcctgttacaggagcacagccgcttcttacacaggtattcagtttcagataaaggaggctgtggatatcttatggagaaatattacctggccgtggatatcggtgcttccagcggacgacatattctgggacatttggagaacggcaaaatcgaattagaagaaatctaccgtttcgaaaacggaatggatcataaggacggcaagcttctgtggaatgtggagcggctgttcggtgagattctgaacggaatgaaaaaatgcaaagaactgggcaagcttccggtcagcatggcaatcgacacctgggctgtggattatgtattgctggatgaaaaagatcagattctgggagatacttacggctaccgagatcaccgtactgacggaatggatgcggaagtggcgaaaatactgccggagacggaactgtatgccagaaccggtattcagaagcagatttttaatacgatttatcagcttatggcagtggaaaagaagaccccggagattatgaaacaggcgaagacacttctgatgctgccggattattttggattccgcctgacaggcaataagctgtcggagtataccaacggctcaacgacacagctggtagatccgcatacttatcagtgggataaggagctgatccgcaagctgggttacccggaggatattttcctgccgctgcagatgcccggaacgaaagtgggccagctgcttccggagattcagaaggaagtaggattcgatctggaagtggtactgtgcggaagccatgacaccgcatcggccgtaatggcagttcctcagacagaaggagacggcatttatatcagctcgggaacctggtctctcatgggaatcgaatccctgaaaccggtcattacagaggatgccgcagcggccaactttaccaacgagggcggttacgatcaccggttccgtttcctgaaaaatattatgggactgtggatgatccagtcggtgagacacgaatatcaggatgcctactcttttgcacagctgtgtgatatggcggaggaaagcaaggagttcccttccagagtggatgtgaatgaccagagttttctctctccggacagcatggtggaagccatcagacagtactgtcataagacaggacaaccggtaccggagtccgtgggagagctgacttccgtagtataccgcagtctcgcacagtcctacggagagaccgtaagaggtctggagaagatcgccgggaagacctatgacagcatccatatcatcgggggcggttccaatgcagcatatctgaaccagttgacagcggatgctacgggcaagaccgtatatgcgggtcccggtgaggcaaccgctatcggcaacctattggcgcagatgatccatgcaggagatcttgcagatctgaagagtgccagaaaatgtgtccgggagtcttttgaaattaaggcatttgctccggcaaagtaataaaaatgatgccagggtcaaaaggtctaagcccacatgagcttgctcataagtgggcgaaagaccttaggacccgccccgatatgagcataaaagtgggatgataatcccacgatatgcgaatattgggtagggtgctatgtgccagtggcacatgtctagcacggaccgaagcggagcggagacgtgggagtgcgtagcacggagcaatccgtaggcatcaaagtcgggggcttttgcccccgacatcataaaaataaccttataaaaggaggaaattataaatgttagtaaacacaaaggcaaagatcggtgtattttccatcgctctgggagcatatctgccccaattcccccagctggtgcctaatttcgaggcacagtatgaggatttcaagaagacgattcccgatactgtagatatcgttgatggtggcatggtgaccaccaaggaacaggctatggcagccggtgataaatttcgtgcggcggatgtggatctggtatttttacagctgcttacttatgcgacatcttacaatgtacttcccgcaatccgcgatctggacgtgcctgtagtatgtatcaatgtgcagaagaagctggcaccggactatgccaataccgatattcccatctggttgggtgacctgtatgcctgtggtgccgtaggtgaggctgtggcagacctggagcgtgcaggcaagagacatgctgtaatcaccggcgtggtagaaggcggcgaccccgaggtggcagctcagatcgaagattggtgtaaggcagctcaggtccgcagacgtttccgtcagaccaatattgcccagatcggccgcccttatcccggaatgatggatctctatatcgatgagaccaacctttacaacagaatgggcctgtataccaagcagtttgactgggaagatatgtgggctattgcagacgatattaccgataccgaagctattaaggcgaaggcacaggacatcatcgataccttcgaagtagagggtggcgctaccgcagatgacgaagatattctggatatggcaaagcatgtgcttgctttcgagcagtgggcgaaggatgaagacttaagcatgatcgcctcccattatgccggtaaggcacagggagtagccggtaaactggattccatgctgatccctgcattttccatgctgatcaagcaaggtaccgcatgtgccgtagaaggtgatatgaaagttgccatggcaatgtccattctgaagacgatctccggtatgggacagttgtccgagatgtactctattgatttcaacgaggatatctgcatcatcggtcattccggatccggcgatgcggatatctctctggcacataagcccaccatgaagatcgttaaggtattccacggcaaggtaggcggcggatatctgactcagttctatcctcccgtaggccctgtgacctatctggctatcacgcaggataaggacggcaacttcaagttcgttgtggcagaaggcgagaatcagcccggcccgatcttcactttcggtgacaccaatatgcgtaccaaattctcaatcccctgcagagagttcgtgaaccgttggagcgaggcaggccctacccatcatatggcagcagctgccggcagacatattgacaccattttaaaggttgctaaaatactgaacgtaccggtagatgtg

SEQ ID NO: 5595 - DNA, 5100 bp, Unknown
  gut microbiota DNA sequence
gggcacttgtgtaaatatggcgcagtaaccacaggagcaaaaagcaagctctgaaagagcaattttgcgaatgaaattcgcaatagttacgaatgtttatgatttaaaaacaatatgcctgtgggcggagttcacaggcaatggaaaggctaggtattatcatgaaatttttagatgcagaatttgtacagggatttatcagaatggcagatgacggctggcagcaaggctggcatgaacgtaacggcggcaacctgtcttaccgtgtgaagccggaagaggtagaacaggtaaaggagaactttgagccgaaggagttccagcccatcggcaccacagttcccgcactggcaggagagtatttcctggtgaccggcagtggcaaatattttcgtaatgtcagcattaagccggaagattctatctgcatgatcgaacttgacgacaagggtgagaattaccgtatcgtatgggggttggtaaacgggggcagacctacctccgagctccccagccacctgatgaatctggaagtgaagaagctgcaggatcccgactaccgtgtggtatatcatgcacataccaccaatatcattgcgctgaccttcgtgcttcctctggaggataaggtattcaccagagaactgtgggagatggcaaccgagtgccccgtagtattcccggatggtgtgggcgtagtgccctggatggtaccgggcggcagagagatcgcagtagctacctccgaactgatgaagaaatacgatctggccatctgggcacatcatggaacctttgccgcaggcaaggatttcgacctgaccttcggactgatgcataccgtagagaagtccgctgagatcctggtgaagatgttgtccatgcagccgaataagagacagaccattacccccgatgattttcgccatctggcaaaggacttcggtgtgacccttccggaagaattcttatatgaaaaataacgatccgagggacacacgaaggagcctcgaaccgttatatcttgaatgcctgacgttatcggcgcgattttaaacgcgcctcgttaggtgtcatatcatacatttttttgaactgtttgtagaagaagttctgattctcatagcctacagacagggcaatctcagacaccggcagcgcggtgtgggacagctgattcatagcgactcgcatacgctgccgtgtttgtatttccttaaaggtagtgccggaatattttttgatcatacggctcagggaagagggggtgtacccgatctgtgcagccagttcgtgaagagttccggtatcataatgctccgccaggtatctgcgtaccaccaccatcaggacattgctctgctcatctttctggtctaataaaatattttccgcattgcttaagatatgcatgaacagcagggcaaaggtgtgttccgagagcttatgccagttctgaggctgctgtaacagaaggaagaccgcattgtggatgaggttctggatgcagggattatcggagacggtaaagtacagatactgaccgacacaactgtcaccttccagcgcattgatgataaaatccgccagaatattatccttgttgatcaaagtcaggatattctggaaataggcggggcggatgatgatgttaatgcccagatcttcctggccacaggctattaccgcatgttcgatatgttggttcataaatagaagttccccggggcggagacagatctcttcttcatttatgacatgtgtgacagaaccagagagacaataaaagatctccacgtaatcatgtttatgctttggaaaatccacaaagcgggtgtggcgacgcagagtaatatcatcttcggagtgttccaaaaatttatcactctctactacaaaatcctgtttgctggtgtagagattcttctgaacggcaatattaccgtctaaaatctgttgttcctccggtgtgatataggccggatccagaaaaccgttctcatacatatcgatcgtcattcctttcagcaacccgcaattttgaactgcgggcaggtttttcgactgagtttattttacaggaaagagacaaaaacctcaagatgtgtgcaaaaagtgattctgcattgcacgtgtcatttttgtgttgtatattaataatgattatgaacaataagcagctttgcgccggcagtccaaagtgtgcaggttgtggaaagatatgaggatttgtatggcagataccacagttaaaaagatcatctgcagttcctgtggggcagaatttgaggatacccttccgaagtgtccctattgcggaagcctgaattacaagggcgccgaagcggaatatctggggaagctggaaagcatgcggcaggatatgcagcagttggagcaggtaccggagaaggaactgaagaaaaaactgaaaaagaaacagaaatttgtgattaagcttctgatcttattggcggcattggcagcgatacttgcggtaattgtgttccgggtgcggtatatagaacccagggatgccagagcggattatctgtgggaaaaagagaactttccgatactggaccgtctctatcaggagaaggatctggaagcactgatggatttttatgagcaggctgtcgaagagaacagaaccatagaccgatgggaacacagtggtattttccgctggctcatgagctgccgggatgcgagagaatatctggcgatggaacagagtggagagacacttcgcgactatcaggagacacagcttttagatgattattggatgatgcggggactggactacagcgaggtcattctgacggagaaagacagggagtatatccgtccttatgtggaagcaaccctgaacagtctggcagaccgttatacgtttaccgcagaagaagagaaaaaattcgaggatagtctgcgaaataattacggttatcccagatatgaggattgcgaggaatacattaagaagcataacgaataggaaaggatcataaaagcaatgatgaaatgtaaatattgcgggggcaatctgacattggagcaggcatattgtccgcattgcggaagaccgaatgaagaagccgcacagcatgtcaaagacatggagcattacaagagcaactttgaggataccaaaagtgatgtctataaagtggcggagaaaaatacggagatcatgtcacatatgataatcatcacagtgctggtgatcctgtgtgtggtggtgtttgtagtatctgcacgtagctggagcatccacagaggcttgctacagtttgatgcagggatccggcagagcagctatatgaaacagatggaacaatatctggaagatgaggattacataggtttatcagctttttgcgacaggcattacatccggccttatagcagtaataataattatgaaaaatatcagctgctcatggaagccagcggagcgtatcgttacttttatgaaagtctgatgaaggcagttacgatcaactccggcaatgtatccatacttcccggtctgtatgaaaatatttcggattattacgagcagctggaaaggattctgcatcctgtggataatgattatagggcaaaacaatatcgggaactgccggaggagcagaaggaagccattctccggatggaagagaatgagaaggcactgctgcagacctattttggcatgaccccggaagaggcagagaatttcggtacgatgtcaaatgcacaaaaaatcttattcctggaagaaaaaggcgaggtgatgggttatggtaaatctgaagagtaagctgaaacaggcacagaagcagagaggcgcgctgcttgtgatgaatctggtgatcatagctctgtgcttggtattgtttgggggaaccgtccatatgttccgggaattaaactacgccttttcccgtcctgcgaagaccaactggatggagaataatgtgcagagtgaaaattatgcctacctgttagtaaattatcacgaggacatggcgtacggcggcttgctgtccggaacaaaaaaggaatgctatggtgtggcgagatattttgaggcggcgtccatgtataaggcatttcttcagaccggagatacggagcgagctgccagagaaaaggagaagatggatgccgcatatgaagaaatgggtgactggaatattgcagcggacagcatcagggagagacttggattggactgacagatttgctgtaggaataccggcgatattactggcagcctgtcagacagtgggatgccggatcagtatagaataccatacttccgtacatagaacgatgcagtcgtggctggaacaggtccctatggcaggctggattttgtggtggatagcagagacattactttttggacagatgctgcgatggctgtttgtgcatgcagggagagacaaggcagttcaggaggacggtatcgggaaaggtatcggaaagagaatatttttgatttttgcaggattgttgatagcctggctgccggtgctcctttccaatgatcccggattttataattatgatatttatgggcaggtgcctcaggtgatgtatccggaggtgccgtataatacacaccattcgttactcagcacgttggtcatgggaggcgttatcacattaggataccggatattcgggacgatggagaaggcagtatttctgcactcctgcttccagatgatactttgtgcggcggccttttcctacagtctggatttctggtatcggcgattgaatagaaaatggctgttgggagtcggattttgtttttatgcttttctgccgacgattgccttgttttccgtcagtacgaccaaggatgtggtatgctctctggcactttttattgcatttcacctgttgtatgaattgtatgagaatacggagggattttttcggaagaaagagaaaatcgcagcattatcgtgcagcctgatcgtgggagcgctgtatcggaaaaatgtaatttatgcggtttttctttatctggtgttgtgtgcggttttctgtaaaaagcagaaaagaaagatcatttcactgtttgcgggaacgatt

SEQ ID NO: 5596 - DNA, 3851 bp, Unknown
  gut microbiota DNA sequence
gtatggcagaggttattgcgaagagcggtctgccctgctgtctgatgcataaccgtaaggaagccgattatcgggatttcatgcaggatgtggcagcggatctggcggacacgatccatttggcggaagcggcaggcatcgcggatgagaagatcatcttagaccccggtgtgggcttcggtaagacctatgagaacaatctggagatcatcaactgtctggaagaactgaataggttcggttatccgttgcttttaggatgcagccgtaaatccgtgatcggactgacactggatctgccggtgacagagagagtagaggggacgcttgtgaccaccatgttcggtgtgcagaagggatgcatgttcgtccgcgtgcatgatgtgaaggaaaatgtccgcaccattaaaatgtgtgaagccattttaaacagcagcaactgatattttgcgaagaagcgttgggaaaggcggagtcggcaaatgaaaaaaggcacttatgaggaccagatccgtatcgaagaattggaagtatacgcgcatcacggcgtatatccggaagaaaatgaaaaaggacagcatttttatgtgaatgccacgttgtatacaaatacccgtccggcaggactggcggatgacttaagtctctccaccaattacggagaggtctgtcagtttatcacggagttcatgcagcagcatacttttcaactgatcgaaacggtggcggagcggactgcttacgaagtattacagcattttccgctggtacagggactggatctggagatccgcaaacccgaggctccgatcccgttaccctttggcagtgtgtctgtggcgattcacagggaatggcacgaagcctatattgccgtgggttccaatatgggagacagcagggagcatatcgcacgggcactgggacagcttaagaatagtaaagatatcagagtagaaaaggtatcggagcttttggagacactgccttatggcgtcgtagagcaggataatttcgtaaatggaatatttgagatccggacgctgcttgcaccggaagaattattacaggagctgcaccgtattgagcagatggaaggaagagaacgtaagcttcactggggaccccggacactggatctggatattatcttctatgatgatctggtgtatgattccgaggatctgatgattccgcatatagatatggagaatcgttattttgtactgaagcccttaagtgagctggcaccgaatttccgtcatcccattacgcataagaccgtagcacagatgctggcggagcttcccgtggatctcacggaaggaagcgaagcgtaaagcgggcacagagaccgatgaacaaaccggtcaccagaccgcttaacagtaaaaacggcagatagacaagcacggcgggaacggaagtcagcagaaacgccactccaatctgccccagattgtgaaaaacagcacctgtcatgcttgcgaggaacaggtaattcccatgcaacagccgcttcacaagcagcatggcaaacaggcagagtataccaccagacaggctgtacaggaggctcatggcctgcccgaagaacatggtcgctaaaaggatccgcaccagaagcacgaaaaaggcgtcttttgcggaatatttccatagaacaacaagcgttattatattggaaagccccagcttgatgcccgggatcgggacaatggggggcagagcactttccacggcatacagcgccagtgcaatggccgccagcagagaaagcgtcgtcagttttcgggtagttacaggtggtttcattaaaatctccgtgttttcgtaattcgtaagatctgcggtgttttagggccgtgggctttaataccgtggaggtttggcatcaggtggttagcaccggatgatttcgagttgtggattagggcatcgtgtggttagaatcatgcaggcaaaaacgatatcccgtcagtaggtcacgccgtccggaaccggtgcagtgtcatccggaacggaaacctcttctctgacccggatcaccagccgattgggcagacaggtgatggggagcagggaggtgctgataaatccctgatgcacgcagatctgatccggacaggacgcagagacgatggcaatgctgcccggacggacacagacggtattcgtggcaccggcattcccggagacctcaaaggtatattcggcggtcaccgtatccagacggatggtctgcaataattcgccgttctgatagagatcggcatagagagcctgaccgttttctacggaactgtgcgagactacatagatccgcactacgcaaaggacagctattacaagcagagcggtggtaaggagaactgctttttttcgatcattcatggaaagattcataggaataaggaactcctttctgatgagaacagtatagcaaaaggaatgaaaaaaatgaagaagtatttgaaaacgccccaggtgttgcgacgggcgacgttgctggcaatgctcccggtgttttttctggcgggatgcgggcagaaaacggaatgcgaaaaaagcatagataccgccatgggaaccgtgatctcccagaccgtttatgttaccggaaattccgtaaccacaacaaatagtaaaataaatgagaaaataacagatgttcttttacaaaaactaaacgatctggaacaaaaagaactttcctggagactggaaagtgcggaagtggcgcggatcaatgcagccgctggagaagggcagacctccgtatctcctgtgatggctgagtggctgggaagatgccggcagatctcagaggagagtgccggggcctttgatgtcagtatcggccggctcagccgtctgtgggacattgatacctgggcggctgccggagattccggggattatgaactgccgaggcaggaagagatcgcggaggctcttgccaccacaggctggcagaaaattcagttggaacaacaggcggacggggattcggtgagcattcccgcagaaatgcagttggatctgggagctatgggaaaaggtgtggcgctggatgagatccttaagatactggaagcgcatccggaggtaagtggtgccgtgatttccgtgggcggcagcatcctgacttacggaagcaagccggagggcggagcctggcagatcgcagtgacagatccgctggatccttcggaaagtgtgggcgtgctgacactggacggagggcactgtgtatccacatcgggagattatgaacgctatgtggaagtggatggtgtcagatatcatcacatactggatccacggaccggatcaccggcccacagtgatgtggcgggggtcaccatcgtgacgaaggacggattcttaagtgatgccctgtctacggcctgctttgtactgggacaggaggaaggccagaaacttctggaaaagtatgatgcggaagggttgttcatcaaccatgagggaacgatcaccatgacagagggcatgcggcaatattttcatttgtcgaattcgcagaaatagtgtatagtaaatatggttaaccgtagataacagtcagtgcagaaaacctctgttgagagagggatcacagagtaaataatggagaaataaaatggaagagaagaacagttatctttccgcagatccggaaaccatccggcagatcgatgagaagatgccgccggaggaggagttacaggatctggcagaattttttaaagtatttggagatgctacaagactgaagatcttgtcggtgctgctgtgctccgaaatgtgtgtgtatgacatagccactctgcttggtatgtcacagtctg

SEQ ID NO: 5597 - DNA, 1465 bp, Unknown
  gut microbiota DNA sequence
tcttttatgcactggcggatgaccatatcatcacgattctgaatcagggcctgaaccatatcgaggaaggttaaaatcaatttgcaacgggaacgaaaaaataagagccgcaggcggaatgtctgcggctcttgctatgttattattctgtaactattcagagcagtatcgcaaaatcgcatcttcgatgctttctttttgctcatacaagctgcttcgccaaagaaatattagcggatgctcttacaaatgcaagcattcgacgaacatccgctaatatttcatggccctgaatcgttacattattttttcaaagcatccagcgcggcctgtctggctgcgtcaaatacgctgtagctctgactgcctaatggagagtgataccaggaagagtcatctccgaacatctggaaatagacatactgggatgtcatattgatggcggtataattgccttcggcaatgacccaggagtcgcttccgtcatcccgcatgcatttcaggcaggcttcttcgccgttcacctgatagtacacataaccgtaacccacattgaagcagtcgatccgttcgttggtcaggacttcgatctcattccgggacagggagtaacgacacaggcggtaatcattttccacatccatatagtagacataatctccctgtacgatgggataccacagattgccgtcccatacggtggaaactccgtccgttgcggtattcatggcatagagatagtggttgtcctgtgtaccgttgtaataaatggtgccgtttacggcgctggcgggattgatctcgaagttggaaagttccgtcttgtcagacttgtcgatcttcatacggtaaaataaaggcccgttatcatccacggtcataatatagaggttgcttcccaccagctgggcggtggaaatgggatctctggtaagtcctgtgacgtcgctgccgtttagcttacagcggttgaaggaacgcacagttcgcagcgcaccgatcccggcatccccggaagctccagtctgataatagtagaggaatttaccgccagccaggatattttgtacggaggcattccccagttttttgatgtcctgttcggaagggtccatggagtacagggtgtcgctgtcatagacattggcaaaatacacttttccatcatactcgcagaagtagccggaattgttcagatttccggcggtgttccccacggtctccgggggattgtcagggatccggtctcccacgatggcaaatgcaccgatgatgatcacgaacagaagaaaaggaatcagaatcaataaggcttttttatctttcataagcaatccttctttatgtaaaatgaaatgtaaagtttttgtaatatctaatattataccttggttcttgcttgctaacaagggaaaagtgagataaaatgtaactattcagagccaaagggcgaagtaaccactat

SEQ ID NO: 5598 - DNA, 11672 bp, Unknown
  gut microbiota DNA sequence
atatttgaaacatttgaaagggcaggaaccataaggaatgaagcagatatagtgagacaagcatatagaaatgttgtttataattgttttattcagaaaagtttattagaacagatggagcgtagaggggatcactattatgaaatcagagatgtacttgcatataaatatattaagaaatatgacagggctaatttattaaaaagcataaaaatagtaggcaaggataagcatataagaaatatagaagattttaaggaaagacaattattattttatagtcaacttgaatattttaaggaaaaattgtggaatgaaatagaagggaggaaaacagacgtagatttttcaagtgtcttgatagacattaaaatcccagtgtgtatttgtggttgtacagaaattgtttttcaaagagagaattatatctgttcagtagatgtaattccttttgcaaataatacacttattactttggggtttgataaagttatacctaaagaacttaaagaagagattgaccttaagttagataatccattagctgttttaaactttattgaagcaacaatgatatatggaacagataactggtatttaaagcctagtgtttgggagaaattaggaagtaaacgacaagaggaaatattattggaaatgcagaagatagaaaaaagtttgtttaatgatgcaccatattctgtttttgacgatattagagttgggatattaaatcttatgtttgcagattctgatttatcaaaaaaagaatgggataagatgctttcttgctaatattcaaaaaaatgatataattaagaaagcaatgatgtatggccgcgtagacggcggattgagaggacgaaatggacaagattattttgacaggtgacagacccaccggaagattacatgtgggacattatgcaggctccctgagaagacgtgtagagctgcaaaattccggcgaatataagaagacttttatcatgatcgcagacgcacaggcgctgacggataatatcgagaatcccgagaaggtgcgtcagaatattattgaagtggcgctggactacatgtcctgcggactggatcccagcaaggcaacgatcttcattcagtctcagatctccgaattgtgcgagctgaccttctattacatggatttggtaaccgtagccagattacagagaaacccgaccgtaaagagtgagattcagatgcgtaacttcgaagccagcatccctgtgggattttttacctatcccatcagccaggcttccgatattaccgctttcaaggcgaccaccgttcccgtaggtggtgaccagctgcccatgatcgaacagaccagagagatcgtacacaaattcaacaccgtatatgcaccggtactggtagagcccaaggcactgctgcccgaaaatgaggcatgtcagcgactgcccggcatcgatggcaaggcgaaaatgagtaaatccctgggcaactgcatctatctgtcagacagtgcagacgatgtacgcaccaagatcatgagcatgtacaccgatcccgagcatctgttggtcagcgatcccggacatctggagggcaacacggtattcacttacctggatgctttctgccagccggagcacttcgagagatacctgccggattacgcaaatctggacgaactgaaggctcattataccagaggcggtctgggtgacgtgaaggtgaagaagttcctgaacaacgtaatgcaggagaccttggagcccatccgtaaccgtagaaaagaactggagaaggatattcccgcagtatatgagatccttaagaagggcagtgacgaggcccgtgaagtggcagcacagaccctgtctgaggtaaagagcgctatgcgtatcaattacttcgacgatgcagaactgatccgtatgcagagtgagaagtacgaaggacaataagaatagtaaaagataacaaaaggacgtttccggaaaaaccggaagcgtcctttttgtaatgcgccgtgggttgttgatcgccttttattcgatggtggtgtgctcatcagctggtcactgtaattaattgctgtaatctacgtatatggaattttttccaaagtattgtgcggtctttttactggtgggatcctccgggtctccggggagatcaccggtatagatcatggcaggctgatgggtaaagggggtcagcaccacatccgtaatctcagggtcattcaggagaagaagacgttcttcgtattctgcagcataggcagcggcttcaccgtttgtcagcatccggatcgcttttgcggcggaggtctcctgccatactccggtgaaaaggatgacggccaacaggaccgtcatggcgacataacgggcaattttcaacttgccgaggaccgccattttctccggagtattctgacgcatttgcagcttccggactataaatccgagccagtagaagaacacagcaaaactgatcagcagaaacgcatagtagacaatggctacggcccggcccggtcctgtggagttcatggtatagaacagaggacaggacatggagcagaacaatccgtaggaatatccggtaaaaaggaggggatgggagaaaaatccccagtttttcttctgtaaaatgcgcaggaagaccggcagcagaagcagggcggcaagcagccaccacagtccggtccaggcgaaggtatagcggacaccctgcaacaggcactttgcaatggctttccacgcgggaattttccacatgccgtcttgccgcacctgattgccgggggccatggcactgacggcaaaagatagcaggagaacagcggaggtaattccgcagacataagtctttttatttctctgcaacagcagtagaaaggttacggttaccacaaacagcatgcaggggagaagggacacgtaattgccaccgcctaagaaaattgcgaacaggagaagcggaaggatcagtatcttttttccattgtacaggtagcgaagcaatgtgcccaggaaaaacagggtcacggcaaagaaaccggtgtaatacatggagccgttgtaccagtaaaagctgtcgctctgaaaggccactgtctggatgcacaggaaactaaatactgaggaaatcgtgatccattccccacatgttcccggcagaaaatggcagaccagagaccgtagcagatagaaaatgctgccgcacagcaaaagaaggatcacaaaagtcaccagatgataggcggtattggagaaggcattgggcgcaagatacatcagaaacagcgctgaataggttccctgccagatctgatagcttttggcgacaccggcacaggcggcggaaatggcctgtggtatgcttccggtctgctgccagaccagatgggcttccgtaccgtaataataatcatccccggtgggataattgtaacgccccagccataccagaggaaccaggctggcgagcaggaccgcaaggaaaatataaggtttccatttggcaaatttatttttcatagagaatataactcctgagaggtttttataatgctacagtcagtataacatacctgcaaagacaggaaaaggtacttgttttgcaaaagagggaagtatataatcagcttaaagatggcggaaggagggcatgccatggaagaaaagggtgtcagagaccggaaaagggaaccggaagaatataattttgactatgaagaacttgcggatgcagaggtggattctgaacaggcgggacgacgtgatgatgctgtatgggaaacaacctgtgatacagaggatccgtatactgtggaatcggaggactttacggaggatgaggactatggggagtacccggaaggggatgacctggatgacttcgacgagggggacgggatcggcttccggttccggccatggatgattccggtttttgcgggcatgatggttctggcggtcctgatctgtattccgctgtggaaactgagccatcatgacagaactacggaaaataatgaattcgcggcggtggcaacagaagcgcagagctcagaacaggcttctgcagagaccccggagaccgggatcgcatcggaaaaggtggcaacggcggaaccggagactacacaaatccccgagacggttactccggagcctgcggcagcagtgacagaagcaccgcaaccgacacctacacaggctccggaagcacagccgcagccgacagaggcaccggtggcaaccgaagtccccactaccaataatacgggagatgctcttgcggagggaaattccatgacgttcggtgatgtgaacgagactgtcactgccaaggatgtgagtaatcttcgcagtacaccctataccggagatgagggcaatgtggtagggcagctgaagaacggagagactctggcacgcaccggaaggaacgattccaccggatggtccagactggaatacaacggccagacggtttatgcagtatcagcatatctgaccacggatcttacctataagaccccggagaagccgacatatccaaaccgcgtcagcacccaggacggcagagtgatcgtctttacggattgtgatgattatattacccccaaagatctgatcaatctgcggacggaaccaagcaccagcgagggagagagcactgtacgcacccaagtgcggaacggaaccaatctgcatcgtaccggctacagtgaaggatctggctggtccagagtggagtacaacggtgagatcctgtatgccgtgaccagctatgtgatctctggcagtgctccggaatgaccgacgtattcggaagatagaatgtaaaagaagctgtaccgtagggtgcagcttcttttacattaagattctatattgagaaaagtataaggggatggcaaaaattatttcggtcttacggtaagtctctggatcagaccgttttcatcggtcttacgaaccgtggcgatggccatgatgttgtagcctccgaagttggcaatgaactcggcctgctcatcatttacgacctcagcatccagaatggagtagcggcggaagccgaatttgttacggaagaacatattgatggcctcttttccgtagatatgatattcctgctgggaagcggaggtggtacaatagtcacacagaatgccatcaggggtgaacaactctgcaagtccggcaaaatctttattttccatagcttctacatatttttcaatgggtctcatagcgtgttcctccttaatataccttttcagaatttaacagtgcgtcagtaccgccgtctacgaacatgatgttgccgttgacacctctggcggaatcggatgccaggaataccatcacctcagcgatctcttcgggagccatcagacattcctgaccgtacttggtgggaatggggagggcattcagtgccattttcgctgtggtgctcatggtagcggtcatggcagtatgtacgttgccgggagctaccgcattgatgcggacaccgttggcagcccaggtagcggagactctgcggacccatctggccagagcatatttggtggatacatagagactgttgcccacggagaggttggtggaatccatggaggataccaggcttaatactctcttttcatcaccgatattgttcagcagatctacgatatctttacgtcccgcaccctgggaaatggtgttggatacggtgactacgcagctgccgtgttttttcttaaggaggtcatagacgccctttgcaatggctacggttccgaaatagttcagggaaatgatcagttccagattgccgcaggcaccggagacaccggcattgcagatcatgccgtccagaccttcgggatgcagctcatgcagcttgtctacagcggcctgtcttccttccggggttgccaggttcacgcagatatcgccgtccttcagatcgatattgatgacttcgtgtcctttttgaagtaacagttcttttgtcttggcgccgattccactggatgcgccggtgattgcatatacgcccatgttaaagcctcccttgttttccgaaggaaaatcctgctcttcttgaggagctgccctcttgaggagtcacccccttggcggggggagaatctgtccttcctgcttgcttttactttatgagttcattataataaaatctgatatcttttaaataaccaaaataagaaaaaaggaggataccagatgctgacctatgatctgactgcccgtggcagaaaaaccatgtatgaatacttatatgaagcgatgaaagctgacatcttgagcggccggctgactgccggtgagaagcttccttcgaagcgggcgtttgccgagcacttacaggtcagtgtcaagaccgtggagaatacctatgaacagctgctgctggagggctatatccggtcggaggaaaagagagggtattttgtcaaccgtctggaagtgaagaacgtctccgccccagcctatgcatcctttgtgacccgtttccgggaggaagaatatctggcggatctgacggccaacaatattcaatatgataagttcccctttgccacctgggcgaagatcatgcggcagaccctgacggattatgatacgtctctgcttaagacggttccttttaacggagtggaaaaactaagggtggccattgcagagcatttgtatcggtaccgtggcatgcatgtgtcaccggatcatattattgtgggagcgggaacagaatatctctacagtcgtctgctacagttattgggcaaaaatgcaaaattcggtgtggaaaatcctgggtatcgcaagattacgaaactgtatgatgtgggcggtgtgacctgggattatgtggacattgacggtcagggaatgaaagtggaacagctggatcaaaagggtattaccgtggcgcatgtatcgccggaacatcattttcccatcggactggtcatgcctgtgggaagacggcaggaactgcttcgctgggcggcggaggaaccggagcgctatatcgtggaggacgatttcgattgtgaattccgcatggtgggaaagccggttccctccatgcagtccatggaccgcaaccacagagttatttacatcaacactttttccaagaccatggtgccatccctgcgtatcggctatatggtgctgccggagaaattgatggaacgctatatttccactatgaatttttattcctgcacggtatccggttttgaacagtatgccatggcagcgtttctggaaaaagggtattttgaacgccatatccggagacttctcaacgattacagagggcagcgggagcggatctgccggatgtttcgggagtcacctttaagtcagatcagccagatctatcaggatgatgccgggactcattttctgctgcatgtgcggacggaacttagtgatgtggagatcaagtgggcggccagacagcggggaattctcgtgaactgtctgtcggaatattgctttgcggatgcgcagaaatatcgggggattctggtcattcactattcggatatggcggatgagatattacagaaggtgatcggggcgctggaggagatattttgtaactattcagagccatgaaaaactgcgttctgcgaatgcttgcattcaggcagataagcagttttatatggcgaagtaaccacatgagcaaaaggaaagctacgaagtagcggttttgcgaatggggttctgaatagttacaattttttgtaattcataatttttccaaaatgcgggaacactgacaaaaaagaatgcagtgttatcgcatgaaaggagaaattatgaatcagagagtgggaagaagcagtatccgtctggcacagccggtgtgtgtgatcgccggtgccagcatcgtgggaaaaaaagaaggcgaaggaccgttaggcaccctgttcgacatggtgggagaggatgatctcttcggctgtaagacctgggaagaggcggaaagtaatctccagaaggacgcagtctacatggtcatggaaaaggccggatggaaagcggaggatgtgtcgtatctcttcgccggtgatctgttggggcagtgcattgccacttccttcggtatctccgcttacaatattcctctgtttggagtctacggcgcctgctctacctgcggggaagcgctgacactgggagctgtgatgacagcgggaggctatgcggagcatgtggtctgtgtgacctccagtcattttgccagtgcggagaaggagttccgttttccgttagattatgggagccagagacctctgtctgccagctggacggtgacgggaagcggagcctttgcattgggactaaatcagaagtgcagagcccacatcaccggcatgactcccggaaggatcgtggattacggcctgaaagactccatgaacatgggagcatgcatggccccggccgctgcagacaccgttgcccgtcacatggaagattttcatgtgaccccggaagaatatgaccggatcatcaccggggatctgggaagcgtgggacagacggtattgatcgatcttttgcgggaaaagggaattgacattgccgaccggcacatggactgcggtatcgagatttttgacgcagaagcccaggacacccacgccggaggcagcggctgtggatgcagcgctgtgaccctggcggcatacgtcctgccgaagctggaatccggcgagtggaaaaaagtcctctttctacccaccggcgccctgctcagtaagaccagtttcaacgaaggtaaaagcgtgccggggatcgcacatgcggtagtattggagagtccggcggtgaaatagggaaaagcagcaggtcagaaatgaaacacactcttgcaagcgctgtaagttactggtaaaataaacctcaaacggcgaaaacacattatgccgggaatggctggtgagtcaaaatgcgcaggatagaatttaagatggagcggccgggactgttggaggtcggacagaagatcacagtgaccgagggacttctgccaagtaactattattatacgatagacccgtctctggccatgtcccccaatattccttttcgttatcggttgaagaatcgcgaaggagttgtggcggatatcgtggagaattccagaggattctacgtgacggcggaatttgatgagccggaggtagatatgacaaagtaaacgctatgtgcatgctgcatcggattttggatgtgccgggatccggaggcatcctcagggcgtaattataggaagaagaggagaatattatgttacagaagatttcaacagacaaagcacccgcagcaatcggaccttactcccagggcattgtactgggcaatatctttttcgcatccggacagatccctattgatcccgctaccggagagattcacggaactaccatcgaggaacaggcagagcaggtaatgaagaatatcggcgagctgttaaaggcagcaggcaccgattacaccagagtggccaagacttcctgtttcctggcagacatgggcgatttcgcagctttcaatcaggtctatgcaaagtactttactgagaatcctgccagaagctgcgttgcagtcaagacccttcccaagaacgtattatgtgaagtggaagtcattgcggaagtataaagtgtaagtgaccaccatgagcaaatagcatgatgtcggggtcaaaatccccacagaggcagttctgcaaatggggcgctacgaaggttataaagaagaacaagacggaagatcgtcgcttacaggcggcgattttcttatgtagagacaggagaaacttatgaaaaataatattactctgatcggcatgccgggttcgggaaaaagtacggtaggcgtggttctggcaaagcgcctgggcagacgttttgtggattcggatctggtgatccaggaaagacacggtaaattattgcatgaactcatcacggaacacggcgtggagggcttctggcagatcgagagcaacgtaaatgcctctctgaatctggaaaacagcatcattgccaccggcggaagcgcctgctacgagccggagggcatgcagcatctgcgggatatcagcaccgtggtatatttgaagcttccttatgaggaagtggaacagcggctgggagatctgaatgccagaggtgtgaccctgcagcccggtcagacattgagggacctgtacgaggagagaacccctttgtatgaaaaatatgcggatctgatcatagactgtagcagaaaaatgctgcgggatgtagtggcggagattgctgagagatataagaaacagccctgacaagatcacataaccgtaaagcagcaaggaacgaaaaatatagggaatggaaaatacaactatggaaaatacgagaacaaaaactacgagaaacagcctgatcctgctgttaacggctgccatctggggtatggcgttcgtctcccagagcaagggcatggactatatgcatccgttcacctttaacggtgtccgttccctgatcggtgccgccagcattctggtgtatattctgatcagcagaaagattgcaggggacaaagctgcgccccttgactggaaactgaatgtgaaagcaggacttttgtgtggcattttcctaacgatcgccagtaccttgcagcagttcggtattaaatacaccagtgtcggtaaggcgggatttatcacaacgctatatatcatttttgtccccatgttcggtatctttttgaagaaaaaagtggcgccggtggtctgggtggcagcagtcatggcagccgtgggcatgtatctgctctgcatgaccgagtccctgcgtctcggagccggagatatcatggtatttttgtgtgccattgcatttgccatacagatcatgaccgttgaccattatgcagcaagaattgacggagctgtggtatcctgtatccagttcacggtctgtggagtggtctgctgcatcggagcactcatctggggacagcccaccttcggtcagctgcaggaaggcctgggagccctgttatatgccggtgttttaagctgtggtgtgggttataccttacagatcgtaggccagaaaggactgaatcctacggtggcggcactgatcatgagcctggaatccgtcattgccacgatctccggatggatcgcctataagatcggatttctgacgactgatcagacactgacagccaggcagatcgcaggctgcgttatcgtatttgcggcggtgatcctggtacagcttccgccggaatggtttcgttttggcaaaaagaatgcatcaataaagaatgcataattttaagaaaaagtgcagagactgtccttaaacagatagtaagggggaaatgcagagaatggattatatcaatgctttctgggtgggcggtctgatctgtgctgtggtgcagatattaatggaaaagacgaagatgatgccgggacgcatcatggtgcttctggtggtcaccggtgcggtgatcagtgcacttggctggtatgaaccgtttcaggattatgcaggagccggcgccagtgtaccgttgcttggatttggaaatgtattaatgaagggcgtgaaa

SEQ ID NO: 5599 - DNA, 283 bp, Unknown
  gut microbiota DNA sequence
aaaaaaagtcattttttacatatgtctgctgggattgattattcttttggtcatgcccatactgtgggctatgttgctttcattaaagacaaataatgagattgtcaacagtccgctttctttgccgcagacaataagctttgaaaattatcagcgtgcgatcgatactattgatttttccagaatgtattttaacacgattttactggtagtaatatctacttttttcagtattttatttacttttatgagttcgttcgcaattgccagaatggtttttcga

SEQ ID NO: 5600 - DNA, 5122 bp, Unknown
  gut microbiota DNA sequence
tggatagaatgtttcacgtgaaacattctatccataaatatctatatatagtgatcaaacaaaagatatttgtgtatcttgttttgttacaattcctatgataggataactaaaaagaatgtgaggtacgcaagctatggctattgataaagtaaaagaatattttaaaccccttcatatggaagatcacattttagaatttgatgtatccagcgctactgtagaactggctgcagaagctctccactgtgaagaaaaaaggattgcaaagacaatgtctttcttggttggagaacaacctattctaattgtaacagccggtgatactaaaattgataatgcaaaatacagacacttctttggtgcaaaagctaaaatgataccgggagaggaagtagaagcaatcatcggacatgccatcggtggtgtatgtccttttgctataaatgaaaatgtgaaagtatatttagacgaatcattaaaaagatttcaaactgtatttccggctgcaggaagttctaatagtgcgattgaattaacaatccctgaattggagaaatattcaaacttcctgcagtgggtagatgtgtgtaaggattggcaggaatctgctaactaatacaatttaataagattatttttaatagcaaatacagctgcctgtgttcgatcagatacatcaatttttttaaagatattagaaatatgattttttaccgttctctcactgatattcagagatgttgcaatttccttattgaacattccattagcaacctcaataagcacttccaactctcttttcgtcagactgttgattttttctttgtcaatatctctggataccagtcggttgtttaatgccggtaccagactgggttgaatataagtttctccctgcataatacaattaatggcatttttcagttctgcggattctgcatctttcatgatataaccatctacgccaatgtccacagctttcaaaagatattcaacttcattgtgtaccgttaataccaatactttaacagagatatttttcttcttaatttcctgtagcacttctattccattcataacaggcatattaatatccagaagcagtatatcaggatgaacagaaagtaactgctccatacattctacaccattattagcttcggcaaccacagaaattgtaccgtcaaattccagtaattgacggattccttctctcataagaacatgatcatctgctaacataacttttatactcatatatatcctcacttgcttgtgtatgcttatactttgtcctagctgttcttttttaaagctgaatgtaaatctaagggaattttaatatctatcatagttccccgaccaatcgcagaactgacatgaattgtaccgttcagcagattgacaccctcatggatcaatgctaatccaaaatgactgtttgctttatcttccacttcttccatggtaaatcccttaccattatcttgtattaaaatttcatatttctgctctgtttttttacaatgaaataataccctggtagcctgtgaatgcttttttatatttaacagacattcctgaaccacacggtataaggtaatgcaaaaataatcatctgtttcacatgaaacagcatcgatttctacgtccattatataatctctgtcagcattcaaaaagtccaataatctttcaaaagaagccttcaatcccagatcatcaaatgtcataggacgcagattgaagatagtacttctgatatcttcaatgacattatgcaatcctttactcacagaattcaattccatcttcgctctggcaggatccttatcaatatataaggaagccagttcaatcatatgaacaaaatgggcaatattctgcaatgaagtatcatgaagttcggaaacaattctttttctctccgtctccaatatctccatcattttcttaccattttctgtattgcaactacactcattcttttgtacattttcatcaatgttcatatatcaccttatagaacatatgttcttattttgaatattccattatatttatcatataggaataataatattgtgtaaaactctttttattaataaaaataaatcttaacaaaatttttacatcggattctcttcgttttatgacaaaggttctttggatggcaatcctgcttttctgggatattttgcaggtgtggacttttccttagtaataataaacagattccgataaatatccgaatcgggaagtgtaaattcaacctgtccatccatttttccaccaagtatctttacagcatgctgtgcggcattcatctcttctgctattttttcagatttataagagataaatttgccaccgacctttacaaaaggaaggcaatattctgacaatgtggaaagatttgctactgccctggatacacaaagatcatatttttctctgcattttccaggctttgcaaaatcttccgcacgtccgtgaattgtctccactccggtaagtcccaatgcagcaatcacttcatttaaaaagttaattctcttattcagagaatccagcagtgtcacctgcagatccggaaatgcaattttcaaagcaagtcccggaaatccagcaccggttcccacatcaatgactgttttattctgcgtaacatcataggctttgcagagggatatgctgtccacaaaatgttttttcataacttcgtcgtattccgtaattgctgtaagattcatgacctcattccattccaccaacatttcataatatttcaaaaactgttggatctgttcatcacttaaagtcacacccagcgctttacagtctttttcaaattgttctgtattataatctgccatgtattcctccgcagtattctactttgttgctttataatgttccagatataccagtaaaacagagatatctgcaggagatactcctgagatacgggaagcctgtcctaccgaaacaggacggaattccttcagcttctgtctcgcttccagacgaagggacggaacttcatcatagtccaatgtctctgggatcatttttttctccatcttgcgatactgttctacctgtcgcttctgtctgataatatacccttcatatttaatttcaatttccacctgttccacaacagcagaaggcaaaggatgtctctccttatcaatcggagccaatgctgcatatcccagctccggtctgcagatcagttctgccagagttgccgccgttttcagaatcgaacttccgctctcttccagaaaatgctgaatttccttattggccccaacagaagtatttttcaaacgctgaatttcacgatcgatcagctcctctttttccaccaatgcatcatattcctgctgagagatcaatccaatctcgtatcctttcttacgcagacgcagatccgcattatcctgacgaagtaacagacgatactctgctctggaagtcatcatacgataaggttctctgttatccttggtcaccagatcatcaatcaaaactccgatataactttcggaacgatccaaaatcaaaggatctctatgcaaaacagacatagctgcattaataccggcgatcaatccctgggatgcagcctcttcatatccactgcttccgttgaactgtccgccactgaacagaccattgatattcttaaactccagagaagaattcaactgttttgcattgatacaatcatattcgatggcataggcatttcttacaatttcacaatgttccaatcccggaaccgtacgatacatagctaactgtacatcttccggaagagaagaagacatgccgccaacgtacatttcattcgtgtgcagaccttctggctcgataaatacctgatgtctctctttttcggcaaatttaacgaccttgtcctcaatggaaggacaatatctgggaccggtaccttcaataataccggcatagataggagagcgatccagattattccgaatgatctcatgggtattctcattagtataagtcagccagcaggaagcctgttccttctgtaccgattccggatccgtagagaaagaaaagggtacaatcctctcatcaccgagctgctcttccatcttggaaaaatcaagagaacgcttgtccattctggcgggagttcctgtcttaaaacgacgcatttcgattcccatagctttcaaagaatccgtcagatgattggctgcctgtagtccgttcggcccagtgtaagtaatggattctccgcacaggcatctggcccgcagataagttccagtgcagagaacaacagccttacattcatagatagcaccggtaaaagtctttaaaccggtaatctttttcttgtgatcttcggtttcttcccagagaagttcacagacctccgcctgcttgatcagaagattttcctgattttccagcactttacgcatggctctggaatattctgccttgtccgcctgtgcccgcagggaatgtactgccggtcccttggacacattcagcattttcgactgaataaaagtcttatcaatatttttacccatctctccacccagagcatccaattctctgaccagatgtcccttggaagatcctcctacattagggttacagggcatcaatgcaatactgtctacacttactgtaaaaattactgtcttcagacccagtctggcgcaggccagagcagcttcacatccggcatgaccggcacctactacacacacatctacttgtttctttagttccatagtatttttccttctggttgttacttacccatacaaaatttagagaaaatctcattcaccacatcttcatccacttcttctcctatgatcttacccagagaagcataggcactggtcaggtcaatggaataaaaatcttccggcattccatcctcaatactttgttctaccagctgcaaactgttcaaagcatcctgcagggcctctttatgtctgagatttgttacaaccaactcattgttatgccttaattttccttcaaagaacatattgcggattgtttcttccaattcttccattccggaattttccgaagaaggatcaatagt

SEQ ID NO: 5601 - DNA, 983 bp, Unknown
  gut microbiota DNA sequence
tggtaatggtgtgaggcgttcccttcatttcccccgcagacgatggcggcacggcttctgcggacagcgagagaagagagataccgtgacagggaggaattgcccgcatgatctccctggttggttcccagacccagacagatgactaccggacgctcgaagagccgcacgaaggattccgcgtatttgatgcccagcataatatcattttcctgataggcgggaacaccctcgggcaccagataaaagctgcgcagatattgcttacattccttgagcttcaccacgacgatgtcggcacccggtgcagcaccgatataaggactgccttgtctgacgatactgccggctgcgactccggcgaggatactgccgtgtccgttttcgtccctggagggaacgatggaataaggatcctcggaacgcaacgccaggttaatatcctctctgcggtattcagaaccatattttaacccatcagggggcgctccggtctgaaccgtctgatcccagatcgccaggacacggctgttgccgttctcgtccagaaacacaggattttggtaatcaataccggtatcgataaaacacaggatcacgccctgccccgtgagacttaggggtggacgctgcacctgggtgatcccactggcaatcagacttgccggatcaaagggagcggcaccgggtggcgtctcaccggagggagatagctgcatgagcccgtaaagcttcggcatattgtgataggggaaaaaatcaatctttggattgcggattcccagattggccaaatacaaaatcaaaaaatcttctccgatgcgttcataacaattattgtcatctcccagaaattccgatgcggaaaagtctgtgataatgtcataggtgtcctctgacaggatcatttccttgcagtccatggcgttactccgaagaatccatttttataatatatacaacgggatgaattttggtgtgta

SEQ ID NO: 5602 - DNA, 1598 bp, Unknown
  gut microbiota DNA sequence
atccagctttccggcaagctccgcgatatattccggtgtcgtaccgcagcagccgcctgccatatccactccaagggcagtcatctgctgcattctgtccacaaaatagtctttgttatccccggtgaagatcatacggccggtgaccatctgaggataccccgcattgggaagggctgtgagaagttttccttccggtttttccagtatctgcaggatccggtgcatatgggacggacccacaccgcagttaaagcccacggcatcgatctcctttgcctcacccgctctctgtaaaagctttcttgcacttaatcctgcattgctgtagccgaactggtttacagagaattgtaccgtaataaatgcctgttccccgatcattttgatcgcaggcaggagctcttccatctcggaaaaagtttcaaagacaaaaaagtccgctccctcttccagaaaaatacggcagatctctttgtattcgcggcataaagtatccttctgtgccagcgcatccccgggaatctgtccgatatctccggcaatatagacttcttttgtctcaccggtgcgttctctccacgcagccaccgcttccctcgccaggcgtacgccgcttcgcagagtctcctcgatctgttctttggacctatccatgcagaagctgttggctgcgaaggtgttggtacgcagaatctgtgctcctgcctcgaggtactccgtatgaatctccctcacccgttccggggcttccagattcgccagctccggcagctgtttcgtgtcatattttcctccgtaataggtcccgaaggctccgtcaaagaggatctttttctgttggatcctttcacggatctgctctttggtatgttttgtattgcccattattgtttcctttgtcctgttgatttcatccatttttcttttaaaaacgagcaggtctgctctcgcaagcctgctcgtttcttagcataccatattatttttcggaaaaacagtagcaaatttaatgattacatcaactttctaaacagctcggtcagatcctcgatgcttgcatccttagggttgccgggtgcgcaggcatctgcatgagcggattctgccaggaaaggaagatcctcttccttcagtgcttccagcttggaaggaattcctacatcctcggacagcttgcgaacggcatctacagcagccttacgataggttgcctgatccatctggtctacaccttccactcccatagcacgggcgatctcacgatacttttcaccggtgcagtcagcattgtactccataacgatggggagcatcattgcgcaggctacaccatgaggggtatcatagacagcacccagagtatgtgccatggaatgggcaataccaagacctacgttggagaagcccatacctgcaatgtactggcccagagccatgccttcacggccttccttggtattggctacagcgccgcgcagggacttggaaatgatctcgattgccttcaggtggaacatatcggtcatctcccatgccgccttggtggtataaccttcgatagcgtgggtcagagcatccataccggtagaagcggt

SEQ ID NO: 5603 - DNA, 1002 bp, Unknown
  gut microbiota DNA sequence
cctgaatggagagctcatgtcggaccagcggatcaccctgtcggaaggcttttattatgaaccgttatccgaaaaattgcagagatacataacgggtgtttcttatccagttactgtggataactctgatagttcttcggaaacactgttgaaatctgtcgaaatcggctatgacgatctgcgctatgtacatataaggcattatgattttgaaggaaatcctgcagaaggggaattgatctgtaacaaggcgatcgcgcaggacctgacggagatcttttatgaactgtattgtaatgaatatcaactggaaaaagtcttattgatcgatgagtacaacggagacgacaccgcctccatggaggataataatacctcctgtttcaattatcgtccggtagaagggacctcatccctgtcaaagcatgccctgggattagcgatagacatcaatcccttttacaatccttatattacatacaataaggatggcagcgaaagggtatctcctgcaaacgcttccgcctatgcagacagaactgcttccttcccctacaaaattgacgaaaacgatctgtgctatcagttatttaaagagcatggcttcacctggggaggtcactggaactcctgcaaggattaccagcacttccagaaggtggtggagtaagccgcttgtcagcaatcattttcctgtaataatcgagtagactgtctcctactcgatttgtatacttcgaatacacaaaaagcgcctccggaaataaaccaactcatttccgaaagcgctatttttatgtctgcttataagttatggattaaactaattccagaacaacagtcatagctgcgtcacccttacgctgaccgatcttaacgattctggtgtaaccacccttacgggtagcatacttgggagcatactcatcgaagagctttgcaaccaggtcaacttccttggtgttctttttcttgcctgctgcatcagcgggaacctcaact

SEQ ID NO: 5604 - DNA, 4109 bp, Unknown
  gut microbiota DNA sequence
aaaacacttccgattttgtagccgtatttctcctattagtgaagagagtaattctttttatcactaaagcaattacagaaaggagcaaaaaggctatgaagtatggataaataaaagcttcggttacacgaaacggaagcatgaaacaattataatttttatcagagagaaaggcaaggattgattatggaggcagaaaaactaaataatggcaatagaaagtccggctcatgtgaagctggatttttttatcgcaggattggtgggacagtttacaaaatcagggtattaacgagtgaaaacagtacagataccttttcggacaagatttcccatattatttcaagagaggtgctgacagagaaagcggattatgataagatagagctaccacaaatgagtcagttgccggaagggagttcggcatgaacagaaccagacagacaactgacaaatcgaaaaacagaataactgctctttatgagcgattctcaagggacgatgagcttgcgggagacagcaacagtatagtgaaccagaagaaaatgctggaggactatgcaaagagtaatggatataccgatttggtgcattttacagatgacggatattccggtggaaattttgacagaccgggatggaaagaaatgctccggcagattgaggacggaagcattggcacagtcattgtaaaggatatgagccgagtcggcagggattacctacaggtaggattttacacggaggtattctttcgggaaaaaggtgtccatttcgttgctatctctaatggtgttgacagtgatatcaacaccagcagcgaattcgccccttttttaaatatcatgaacgaatggtatctgcgtgactgcagccgcaagataaaggcagtattgcaggcaaagggcagggacgggaaaccaattaccaacaatccaccatacggatatatcaaagatccggaagataagaatcactggctcattgacgaggaagctgcggcagttgtccgcaggatattccggatggcagttgagggaatcggaccatatcagattgcaaggatactgactgaggaaaaggtggaaaaaccttcatattatcaggcaaagcggggatatggatgttacaagaaccggtgtgatatgtcaaagccatatgaatgggcaggagtaagtgtcgtaagaatgcttgaaaaaccggaatatatgggagatactgtgaatttccgtacaaagaagctttcctataaggataagactgctgtaagaaatgacagtgacgagatagtggtctttacggatacccatgaggcgatcattgacagaaaaacatggtatatggtgcaggagcttagaaagaccaaacgcaggataaacacagagggcgagacaaatccgtttgtgggtaagattttctgtgcggactgcggtggaaagatgcattatcgtaatgagggaaagcgtgccggaagaaactggagaggactgccggatggcagtgtcagaacaactccagcctgttataactgcggcaattataataacagccatgaccagtcaggaaaggtctgctgttcgcacaatatacaggcaaaggtgattgaccagcttgtgcttgaaaccattcagtatgcgtgtaaaagtgtaaggatggatgagagagcatttgtcgaaagcatccgcagtgcatcagaaatccgggaacagagtgaggcgaagaagctgaaggctgcgttaaagcatcaggagaagcggtatgcagagcttgatatccttcttaaaaaagtgtatgaggacaatgcccttggcagactgcctgacaaaagatatgaaatgctatcggcagggtatgaaaaggaacaggcagaactggagcagtccattaagacatgcagggagcaacttacgcagtatgacgaggatacagaccggacggaggaatttctggcactagtccataaatacacggatatcacggaattaacacctgtcatcatcaatgaatttgtggataagatacttgtccacaaagcggaaaagattgatggcgagcgtgtgatggagatagagatttaccttaacttcatcggtaaagtggaacttccggcacaggaactgacggaagaagaactggctgaaataaaggaaaaacaaagacttcgtgagcgcaatgccatgtatcagaggcggcgcagggcaaagttcatgccaaaaacaaaagcaatccgtgcaaaggtgcaggaggctgagataaaagaagctttggagaatgcgagtgcaaaagcggaaaaactgcttatggcagataatgatacgcatatcgcagaggtagttgccggggaaaacaaagtatatgttgataccgggattttcccaacagcagaagaggtaaaagaaaaatatgcaatttaagaaagagaggattttattatgacagagaaaatcagagaatataagatgaacgggagtctgattattggagtagatgcaggctatggtaattttaagaccgcaagaagggtatttccgactgcggtaagtgtgagtgataaggctccggtatttgccagagactttattgaatggaatggcagatactatatcatcggggaaggacacaaaggatttgttacagacaaagtgacagatgatgataactatgtgcttacaatggcggcagttgtgaaagagctggaagcaagaggctatacggacagaagaaatgctgtccgtatccaccttgcggtaggacttccgctgaaatgggtgcaggcacagagagataccttccgggattatatgatgaaagagagaattgtaaaagtcggctacaaggacagaatctatgaaatggagttcacaggctgtacggtaatgccgcagtgctactctgcggtagcggagaacctgaaagacttcaagggaatgaaccttcttgtggatatcggaaacggaacaatgaacctgatgtatctgaacaatggcagacctatggaaagcaagtcctggacagaaaagctgggagtgtatcagtgtgagaaagctatcttaaataaggttcgtgataataccggaacggaactgatgcacgaggtaattgagaatttcctccgcactggggagacagatattgcacaaccatatgcaggtttgatggtggaagctgcaaaagagtatgcagtgcagattttccagaagctgcgtgattatgagtacaatgagcagatgatgaggctgtatgttatgggcggtggtgcaaggattgtagaggcatttggcgagtatgatatggacagagtgacatttgaccatgatatcagagctaatgcaaaggggtatgagtattactgctatatgatcttaaagcatcagcagagaaagaaggcgatgtaaatggcagaaaaatcatggaataagaatgtccgatttaaccggaacagtgagagtgcaatgcaggcatggagcctgcttcactctgatgaggtggaaaaagagtttaagtcacagaatgaatttgttatctgtgccatcaatgactattacgaaaggcatctgcgaaaaaagcgtgatccgtatcttgaaacaagggaaaaagaagatgcttttgtggaacgcatcgtagcgcaggtggctgaaaaaacattggcaaatcttccgacactggcgggaatgtatctgattcagcaacaggcagtgcttacggcaggatttcagagcactgtggcaggtgcaaatgcaggtatgccggtaatgccaagccctgcaaatggcaatggaaatggcagaattaagcaggggcatactgccgaagcggttctgggggaatcagcagaggaagaaccggaggataatgaatttcttgattacagctttggtgtgtaaagcaaaagtgcagaagattctatgggatgaaggctataaagccggaaaatattgataccacctttgcaggtggcaatatttatccggtgggggttcttagggggctgtgccccttaagcaggtagcaccgatggtgaagacaatgaggaagaaaaaggaagcggggatgccgtaaggcattttcgcttcctttttttgacgagttggcaagccagcggtactacc

SEQ ID NO: 5605 - DNA, 6268 bp, Unknown
  gut microbiota DNA sequence
tatcatcccaaccacatcgaaacacaggagagagatttcttctggcaaaaaaagagatgtgggaaagccagtcggagcggtaagcgcagaatggctttcggaagtctgctgtgttttttacagcaggctgacagatgggatgatgtgccctgcctgcggagaatttctaaacaatggctgcggtacagcttaaaagcggcagcatatggcaataataatgtggcggaatgtagccggaattacagatatagctatatccatacaaaaaagtggagccacagtcaaagaaagagggcacacccgcagtaaagggttatatcatcaggcagatatgtagccagatggatataaaaacagaataacaggatgcaatgagcagatatgtgatgtatgtcatgtgtctgcttttttcatgtgacaggaagtgactattacactttttagacagataggaggacttatatggcaaacagagcaagagacaaggttatctacattcgagtggatgaagcattaaaaaagagatttgacaggataaaggaagcaagcggatataagggaaatgcagatttccttaactatcttcttgatgtatatgacggaaagcgtgtggatggtgtgacactaaaggatatccgggagctgctggcacaggcagtgcatgaaatgaagaaacagggagtcaatatcaaccagattgcttataccatcaatatatatccgggagtgttctcggatattcagtttcaggcaaccaatgtatttttaaagaagatagaagacctgctgttgaagattacagagaagttgttatgagataaaacgacagcagaaacaagtatataaacaagaataaagaggaaagagaggtacattgtaatgggcgatgtatatggcaatgtaaatgtgaattacagctattgcaaatcggtggcacagctgaaaagtgctgccgattatattttaggcagaagaaaagagcaggtggaagatggtgtggtaaagacagaaccacacctgtataaagctttcggctgtaaccgagataactttgcaaacagcctgcttataacaagaaagatgcatgacaaaaggtacagcaggtataagcagaaggagatactggcacagaagctttcgatatcctttcacccggaggataatgacagactgacctatgagcaggcatataaaatagcagaggattttgcgagggagttcttctgttcaaaaggatatgaggtattgcttgcagtgcatacagatacagcacatacacatgtgcattttctggtgagcaactgcaatgtgaaagatggaaagtccttcagacggggaccggcagagctgaaggaaatgtgcagatatttcggggaacagtgcaggaagcgtggactggttcattcgtatcgtgacagctattatgtaaaggataaagacagggagcgccagagcttcgcagaatatcagatgaaaaagcgtgataagctgtcgtttcgggaagaaataaaggtgcttctgcgaaatgccatgaacagaccggagaataagactttgcaggatgtgattgattatgcgaaggtgtattatctgatggatgttcggctccggggcaataccatatcctatgccctgaaatacaggacggataaaaaaggaaagccgatggcggtcagagggagcaggcttggtgcaagatttactgtcgcagggataactgaatatctgaaaaagaaggaaaaaagcagactggagtatgaacgcataaaggctgatatcgagcaggaatccggaagatatgatgattatgcggaatgggatatatctgatgttaaggaaagtgtcggtatagatacagcagggagtgttcaaaaggaatatgaaaagccagaaggggatatcagtgtatatgagggctttgaccggttctgtgagaaagagaacattcgtgatgacgaggaggaagtgttctatggtgctgcgtttgatgaatttaaccgggagtggcagggaatagcattagaagaacagacagaaccgacttcccataaagaagagcaggagataccaccagattatacgaagatgtccatacaggagcgtgtcagacagcttccgccgccaacagaggacacgtcacaggagtttgaagcatataagaacaggatgggatatgatgcggctaagatgaagagtatccgttataagatgagtgtatatgatgaattcttagaggaactggaagccagaaagaaataccatggaacgaaagcgtatggcagacagagcacgaggaagcgtgacagaggggaaaggtaaaaataattttgatgatcataccatatcggcaattataaaaagtgccgatatggtataatagaaaaacaaaagttattacagggaggagattggattgttagaagtagtgatatgtgatgatgataaggaagatcttgacaaagcgacgctgatgttggataagattctttcagaatatcaggttcagtatcagatacggtcgtttctgtcggcgaatgagctgctgaacagtaatgacaagattgatatcggaatactggatatttccatggaagaactgggcggaattacgctcggaagaaagctgaaagaaaaaaatcatgatataaaaattatatacatcaccagttatgaagaatacatggcacaggcgattaataaggtacatgcgttttcttttctgtgtaaaccgatcaatgaagaagaaatgaaaacgcagattatggaaattctggggcaggagaaatatccggaaatagaaaaggaatttgaaatactagatgaatcaggaacaaaagcaggttgtgtttgtttgaaattaaacgagatattatattttgagtacataaaaagatccagaaaagcagcaattattatggaagattgcagatatgaatgtgaatgtacatttgaaaatcttgtggaagaattacatccatatgattttgcggtaaatcacagaggctgtcttataaatgtgagacatattgagaagatacagggatttcatatttatctggacaatgggaaagaactgtcccttgcacaaaaaagaagctctgattttcgggaagaaatgaataaatttttgcagaaaacccagaggagagaatagaagatggataagattttacttgtgatatgtaatggactttcctgttttattatctgtacaattctttttcaatttatgaatgaaagatataagaaaagttacagcaatagaactttgtatatagcggcagagatagcgatgggaattactgcattttacataaatatgctgaactttgcaatattgaatctgctgatatggtttgttggagttggtgtaacggtatattttctgtattacgaagatgcagacagaccaatccgcagaattactgagagtgaagtactggttttatgtatgtctgtatgtgaaacgctgggagtgcttctgttacactgttttttgcagattggtggaattttaaatattgatgttgtcatgcaatattgtctggaagtggcattttcaaagatagtgctgattttcctatactatgttttgataaacagattgataaaaaggacagaggcagcctgttccagagaacaatatatcatatatggaatcatgtttttttacagtctggtcaatatgcttgtgattgtgcagaattttagggatgggcagaaaagctatctgtcagcggtaaatatggggtgcatcgttttagctgacctgtatcttttgtattatgtcaaaatggcagacgaaaagaaacactatgaaaactgcgtaaaggcattggagcaacaggcaaaaatgcagtatgagtattatctggcacagactgaaaaatataatcagacaatacggatattacatgatgtggataagcatatcagggctatcgagaatttgtatggaacagagagggagcatacggctggcgaatatgcagaggcaatcagaagtacactggcaccactgattcctatgtcttacacagagaatccgatattgaacattctgctgacagataaaaatgctgtcatgcaggagaaagggatacattcggacattaagatagacaatgtagaattatcttacatagagccgatagacataacaactattttcggaaatctgctggacaatgcgattgaagctgctgcaaatgttgacggagaaaaatacatttttattaaaatcagtgcctatcataagatgacggtagttcatatagaaaacagttgtggaaatgtaaaatggaaaaaacgtatgccggtatcagataagggaaaaggcagggggataggactcttaaatgtgaaacagagcatagataagtatgatgggaatttacaattaaaacaggatggaaacaaatttgtagcagatttgtttctgaattcgtaaaaagggcggtttcgtcctttttttgtgctcaaatcgtagttggtgcaaaaaaatcgtagttggtgcagaacgtataaaatatgagaagaatagtgccgatgaaattataaaagaatggaacatgatataagtcatattaaggatataggtgatattatgaatattttttttaatagtcgaatttataccaatcagtcattcattaatacgctgtatgggcaacaacgaaaaactacaagaagtcaagatgcaggttgcagcggtacaagagatactttaacgataagcgcatcaggaaaggaaaagcttgtaaaaaatacaaacggaagaacacataatacaaatgttgacaaaagcattgacttaaaatcctatatagcttcagcccaaaaaacaaatcaaaaaataattgataatgcagggacacagattaatgcgaaaacaagtgaatatatgagtacaggtaaggcttttaggggagcattaacggaaaaatattcaaagcttgccgcagaagcaaaaacacattccaatcctgaaaattatattcatgccaagtattttgataagagttcagattattatgagactaatttgaccgatacagaacgaaggattgcatataattatgaaatacagatgtggcgaacaggaaagataaatggtgtaaattatcaggattctttgtttaggggaattgaagtagatggtgacagtgtagattcggataaaattcaatttgaaagagcattggtaaattcgcaaatttcaaatattttaaagcaggctggtgtagatacatcttctattacgaaagattgtacttttactgttgatccatatagttatgaaataacggtagacggtgtagatgaagaaacaaagatgcggatgcaaaatgcattaaatgtgggagataacggaaaaaatctctataagcatatttactattgttcgacacaagatggctgcgaaagcactcagataacaaaagaatcaaaaatgaaatacgaagcatatcatcaggtgtatagttatacgggatatgaattagataagcttgaggagaaaaatggtacatattacacagagtcaggagaggacatattggatttagttaatcatgctgttgaagatactggaaaggttccaaaagagtataagcagcagatgaaaaattggatacatgatttagtttcgactatgtcagtaaaaggctggaataatgtgtcagatatgactttgagcatcctatatggtaaaggtgggttaaaggatatgaaacagttaatatcctatcaatgtgatgctgataataggaaaagggcatggtattctgtgacttagaaacaatagttacttaacgaaaagcggagtttaaacatttgatgcattggcagaaaggtaaaaacatgaaaatatctaattatatctaattatatggataatgcaaatctgataatgaaaacaaacgctaataaaattcagaaagaaaatagtcagacaatggatatacagaattagacgagaaatgacgaataaaaagataaatagtatttatgaggcggaaagatggaggatgttttatgaatgtaactggagtaggaagcacctataatttcatttataacacaaagacaggtaaattatctacaaaagatggcagcaaaaatgagtttgttgatttttgcaatggagatgtaaagggagaagatacagagacactgaatcattttgatgaacatacaagatatcagtttacaagaatgctgtatgcatatggaaccgggatgacaggacagaatccttttgccgatg

SEQ ID NO: 5606 - DNA, 211 bp, Unknown
  gut microbiota DNA sequence
tccagtatagtaccatcggccgcttaggtcttaaccatcgtgttcgggatgagaacgggtgtgtcccctaagcgcatcgccaccagaagtgttcttattttggatttcttcaccggcgatgcgctttgcgcataaccaccagttcattatcctttttcttgatttacctctttggcaaatcaacagtaatgcaacccctacttcttccgtt

SEQ ID NO: 5607 - DNA, 28226 bp, Unknown
  gut microbiota DNA sequence
accggatctcagtgctctgacgctgcatatcctcgctatggcgttcatgttctgtgatcacctgtgggctaccctcgccggagatgcctggtggctgaccggcatcggcagactggcatttcccatgttcgcctttttcctggtggaaggcttcttccatacccatgataggaaaaaatattgcatgcgcctgcttcttctggccattctttctgagcttcccatcaatctgatgtacagtgggctgttattctacccgtttcatcagaacgtgatctggacactgctcacaggcttcctgtgtatctgggcaatagataccctacggaaaaaatgtccggtctggctgtggattccgtcgatcctgctgctatctgcagtgggctacgtgctggcaaccctcctcatgttcgactattacggagaaggcgttctgactgttatcgtattctatctcttccatgggaaaaattggtggcagcttgccggacagtttgccgggctctactggatcaatgtcatgctgttggcaggaatgcagattccattacagcttttcggtcatgccttcgagatttcagaacagggactggcgctgttgtgtctgccgcttctgtggtgctaccatggacgccagggcgcgcataaccgtaagatccagcttgcctgctatgccttttatccggtacacatgctggtactggggattctgtcaaagctgatttttagttaaaacgatagtgctgacagaaagtctattccctgaaatagaaagactcccgatggaatcattccaccgggagttctatatttttactctaaatttctaaattagtactgcttcacctgttcttcgccgttcatgacacgcagagccccctgagccagagctaacagctcgtcctcaccgggatatacggtcacaggagcgatccagccgcatctctctttcagcttagccactacatcctcaccatatgcaatgcctccggtgataacgatctggtctaccttgccgttcagcacacaggccatagcaccgatgtctttggctacctgtaacaggaatgcctgcttcacctccgctgccttggcatcaccttcattggcacgcttggtaacttcacgcatatcgttggtacccaggtaagaattcagtccgcccttgccgatcagctttgcactgatctccttctcggtatattttccggagaagcacatttttaccagtgctgcacaaggcacaccgcctgcacgctccggagagaatgcaccatcaccgtcaaatgcactgaatacgtctacaaccttgccgtcctcatgtgcgcctacggatacgcctccgcccatgtgcactactaccagacgtaaggactcataaggcttgccggcctcttttgcatatctcttggcaactgccttctggttcagggcatggaagatacttcctctggggatctcttccagaccggaatatcttgcgatgggcatcagctcatctactacaacggggtctacgatgtaagagggaacgccgatctcatcaccgatctctcttgccagaataccgcctaagttagaagcatgctgaccctgtacacctacttttaaatcctccagcagatcatcggttaccgcataggtaccactggggatgggctttaacagaccgccacgtcctacgatcacattgaagctcttcagatcgcagtttttctctgccagcagatcggtaatgatcttcttacggaaatccttctgttcgaaaatagtatcgtatttggagatctcctcggtagaatgtctcagggtttcttcaaataataagttctcatcctcaaatacaccgatcttggtggaggtggaaccggggttgatgatcagactcttgattgccattgtgtgtttcctcctatattcactcttatattcgctcttatgctttaccgctttgtccactacagcatctatacctgccgacagcagttctcccgcagcttccacagcggcttcgatcacgatatccatagcttatttctgattctttttcatctcttctgctacaactgcagccagtgccagggagtataccttggtctcgaaggtatcggaacggctggtcaggactacgggtaccttggtaccggtcaggatgcatccgttctttacttttaccatatgtacgattgctttgtataccaggttgccggcatggatatccgggaacagcaatacatctgcatcaccctggatcttacggtcggtagctcccttatgcttggctgcctcgggatcgatcgccaggtcaagagacagcgggccgtctacgatacagccgggaatctgtccttcttcacacatcttagtcagttctgccgcatctacggtaacgggcatcttgggatttacaacctcaactgctgctaaaggtgctaccttaggctctgcaacgccgcaggcattacataccggaatggtgttcttgatgatctgaaccttctcctccagtgtaggataggtcatgaatgcaacatcggtcaggaacagaagtctgtcaatgccgggaatctcaaatacacatacatgagacagggttccaccggtacgaaggcctacttctttgttcagtacgctctttaagaagttcttggagtcgatcagacccttcatatacatatctgcacggccgtcatgtgccagctttacagctttcagggaagcttcgatcatatccggctcattgatgatctcataatcggagaggtccatattcagtccggctgcgatctcacggatcttcgcctcatcacctaccaggattgcatctgcaatgcccagtctcttggcctcatgtacagcttccagtactgcactgtcctgtgcaacggagactgcgacggtcttcttcccacactcttttacttttgctacgatgtcatcaaaattcattttcttccattcctttccgcccctcgtgggctccaagtatgaatacattccacacattattcgcaaaatcgcacgataaatcgtgctttcgctgctgcgcagctatttttgctcatatgtgtggcggtgactctattcgagtcacctaaaatcaagcaaaactgctttttacatgcaagcatgacaaagcagtcccgcttgatttcattgtcttccgaatagtcactctaatcgttaaaataataacacaccggaatacaaaaatcaagctactatgacaaatatagccacctctaaatgaggtggctgatatctgccagggtcggtacgcaggcgtacagacatttttttaatttttcatctggctgtgtctgatctggcaccatcacgaccttacagccggcgcggtaagcactcatgactccgttgggagaatcctccacggccatgcactcttccggtgccagtcccagctgcttgcaggcatagagataaatatccggggacggcttaccttctgctaccatagtggccgaaatcagtttctcaaaatacggccgaagtcctgccatcgccagatatttttccgtccgctccagatccgtcgctgtggcaaccgctgcagtgatatgcctttttttcagatcttccagaagctccacggcaccgggcttgcatttgatgccatcccggtccagtgtttcttccatcatctcttttcgtttgtcacgcaccacataatagtcaaaatcttcaccgtaccagtccttgagctgtctggtggcaaaggggcgtcccagactgcgcatcgtaagtgcctgctcatctgtcatggtatacccacaggctgccagtgccttcggccagaaaatacggtaatatttttcggtatcgatcagcgtaccgtccatgtcaaataaaactgcctgaatcattgttattcctctgcgtcagccgtctgtccggcatcttctgctgcatccgttttgccactctggtcctcgtcagcttttccggctttccggtcacgttttgccgccttgcgcgtcttccggcgttttgccgcttttttccctaacaatacgatcaacaggatcacgactacaccaccgacgatgcaaagtacgatcagcagtgtatggctgccctcggcctctaccgtgcggaagctgccgggcacttccatggtaaactgtctatagctgccgatcacagtggattccacttccgtgtactctccatcctgtgctacctctatgacagtgttatccgcatcctcacagtagacacgcaaggttgcttctccggtatagtccggtgcatcctcttccatggaattggtcatggatactgtataagtatttccctctacctgcagatgcaatgctgcattgggatagaagttgccttctgccataaccagtgccttattgttatcgtttttctctgcggaagcaatggatgcggtccattcctcatactctgcttccagcactttattaccggtaatatcactgaaatcataatccggccatacaccgtaatagccatccttctccggtacttccggaatctggtctgccgacagataatccccgtaaccgcatttataggaagccacttctacaccatccgcctggaaggtaatggtaaactgtgagaaagcgtccggaacgtctttgctgcagaattcctggtaggacaacggggtagcaccaccctgataaccaatgccgtctacgccaccggctccgccttccacataatagttgccatacagagttccatcatcactgacttttccggcaatgctgccctggccttcgccggacatatccagatcattgtacgcatagctgtagaaaatatcacagccttctccggcaatacctccgatattatttttaccggtgatcctgcccatgctgtaacagctgcggatcgcatagctggcagatccggcaattcctcccacatagctgcctccggtactctctacgggtgcataagactcacaggaaatgactgcgccatattctgctttaccgaccacaccgccgacatagtcttttttaccggtcacgtctccaaggttgcggctgtctctgatgactgccttgaccgtctgctccacatcgaaactctccgttccggttaaagtgatatcgtcctcagggtcaaaatcgtattccgttgccacctgtccaacgataccgcccacattcgtatcggcttccaccgtaccgcggttcacacataaggtgacctttcccttctggaagctggaagtatcatagcgcgcttcttcggttccttccggttctgcggtgtcatcctccgcatcgggatctccggggttcacctcttccttgctggctgactcatccgaagtatcttctacagaaattccttcataccggaagagatcatcccggatttcgctgaccagattccgcagaactctggcctgatccatcagctcatccatgtgggcactggtgctgtctgtcccggcttccagtacatcccccaactgacccaactggtcaaaagccttgtcgagcctgtcattcagtgtatccagattatctttgataccgccactgcgatccttggaagcattcgtcatgttatccagatgcttggtggcattctctccgaattttttcagtgccgatttatagctctccgtatcgtccggtacggtgatggtaatgtttccgccactgacgtcatgatcgccatcgccaccccagttaccattccaaatatcatttccactgatggtaacgtcatgactgttgccgttattcttgtcattatccgcctgcttgttcagatcgtcattcagggctttcagatcgttgctgacgccgttcaactcttgattgtaaatataccacagatcatgagcggtcccggtcagagaacttcccgcattgttggcatccttcaggttcgaactgatactcttggcaatactggatgcctgtttgctatagctgctcacatctttctgggtggcatccaacatatccaggaatttgtctgtctccgtatccagttccttcagcttgtcactgagatactggatttccaggaacggctccatctgacccacgataccgcccacatcttttctgccctgcacatatccggtgttggtgcagttctgcagatagccctgatgcagtctgcctacgatacctccggtattgtagcctacgtgctggtagccgatggcaccggaattggagcaataataaatcttaccatccgaaatacctgcgattccgccggtgtccgtatgagctgccacattggaggtactgttgatctgctccagattgtccatggtgatatcttccagatcataagtcacttccgtgctgtacgtattgatattgccattgttgctgcagttattcagaataccgtggttgttgcccacaataccgcctgcggaatgattgccgatcacatttccggaggattcacaccgacggatctctccgctctcggcattgactccggcaataccgccgacatccgtatcaccgaccacatttccggtaaatttacaattttcaatgctgccatagttcacaccgacgataccgccgacctgatcctgacttccagagggagatacttcccccgtgaccgtaaggttgcggacttttgctccctcctgcacatagcggaacaatcccactgccgaaccgtctccggtcagtttcacattggaaatagtaaaaccgctgccgtcaaagattcctgcaaacgtaggaatactgagttcacctgtcatgctcagaacaatgtcgttctgcagcactacttttttatctctggaccaactgtccagtacacagttctccaccagtttccgcagatccccctccgtgctgatctctatgactgcataatcctgctcctttatcgtgctgctataaccgctgccgcctctgtactgctcataggtcaaagtttctgctgcataggcggtggccggtgtctgcaggatcaatgctgctcccagcaggaaacataataatctcttactgttcatcttctgttccctcgctttctgctgttttttccgtatttctgtcctcactgttgtccgaaatttccccgtcttttccggctgctcccactgtattttctccagccggttcttcctgtcctgctgcttcgtgctccggcagctcctgggcttccagtctgggatagttttcttccggggcatcgtcccgctcctccatcgtcacggtatccttgggacgcaccaccgcacccatctcaccatcaatgacaccgatgaaatcaccctccaacacaccattgacataacccttgatgtgaccgttcatacggattcttccggcggagggcaagggctttgccagatcccgtttcagtgtaaatgctgtcttctgaataatgatatctccgatcagcagtgtctgcggcaatgccagcagtaccaacaaaatagatgtcagagtaccacgaccaagagccagtccgatggccgctaccgctgcattggaagatacatagctgataataaatcccgcagataccagcatagatccgctggtaacaatggtagggaacgcctggttcagtgcttcgatggcggcttccttgatcggcatataggtcttcagatccatgtaacggctggtgataacgatagcgtagtcgatcgttgcacccatctggatcgcagatactaccagatatcccaggaaatatacattttcattcaacagatacggcaatgagaagttcatccagatactaccctgaatcgttacaaccaacagtaccggcagaccggcggactggaaggtgaacagcaggatgatcataacgaacaatgctgtcagcaccgtgatgatcgtattatccgttgcgaaggaatcgcccagatccttatcactggtggcgttaccgactagcagaatgtcatctatattatagaactttgccacggtattacggatctgatccagtgctgctgtggtctcttctccctcataaggaacattcaattccagaacaaatcgggaattgtcttcacccagcagctgatctttcgcaatacagatcttggaataagcatccgtcagagtttcttccagatcatcgtccagtgtgatgttgccgctttctttctgatcataaatgaacaggaacatatcaataaacggaacttcgtattcactgacaccactgaccagcgcaccataatcgctctgatccagtgcatatgccgaatacaacatatccgccacttcaatatccagatcgatcagttccgcaaactgcctgggggtcagcttatccgtcagcatatagccgtccatggcctcgatattgccaagtccctgacaggatttcaccacatccagcttttccagagctttcagtgtctgtgcctctttttcataatcaccgttcggcacaatgaccgccaactggttcaccatgccgaattccttatttaccatgctgacggaaaatttattatcactcatagtactggattccagagtgttggtatcgtacacgtagtttgccttattggacaggaaaaatgctataataacacctacgatcagaataggcggtataatgtagcgggtagccacacaaaacttaccgactgctgtgatcttcggaacgaagctcttgtgatgggtgttgtcgatggccttggaaaaggtcaacaacagtccgggcatcaggaagaatacggctaccatactgaaaataatggattttgccagaatgatacccatatcataaccaattctaaactgcatgaacatcatggctaccataccggagatggtggtcagggaactggaggaaatctccgggattgccttactcagggccacgatcacagcctctctggcatccttgtcctcatgttcttccataaaacgatgagcaagaatgatagcatagtctactgccagacctaactgcagcaccaccgcaatagagttcgttacaaaactgatggttccgaaccagtagttcgtgcctttattcaaaatagctgccacaataaatgtagtcagataaactgggatttccgcataagtcgtagaggtaaataacaatacggctacgataaccactgctgccaacaacagaatgacgatcatatcattattcaagtcatccgcgtcacgctcttcctgaccgatatcggaagaatagtaaacatcataatcggacaatgcatccaatacctcatccagatgctgctgtgtagcttccgtgtctgcttcctcatcaaaagtgacagacaataaagcctccatgtcatgataatgatcctcggtgtcatcgaaatccaacatgctgacaccgtccatctcctccacctgatctgccagtttctgtgcctcgtcaaacgtcacgttacagatcaggatccgggcggagccatacgtggtaaattccgaatccatcagatccagtccccttctggtctctgttgtgtccggcaaataagtggtcagatcgttattaaccttgactctgttcatggataatacgcaaaatatgcataaaacaataaagatcagataaaatccttttcgtttgtctacaatgagcgtggcaagtttcatcataaaggaattatcttttttgtctttttctgcgttgtctgccatagttccctcctgctttttctctctttgtacccttatttatgtatttgattttatacacctctagtttaaaatgtttttgaacatctgtaaagacttactacaaagatgagaaattgtattaatgtcatttaatgaacttgtgttgattttctgccacatgcaaaatataataatggggaagaaaaagcaagctacagattttttgtgattgtttatttttagacattttcgcgatgttcgtctattattttagaaaaaattcagatttgtattacatatacatataggaaatgatttcttcttttcccggaaaggctggtggattgtcttatggaaaaaatggatcgccgtgtgcgcaagacaagagctctcttattacaggggctggtaaaaatgttagaaacccatgatattcaggatatctccgtcaaggagctgactgaactggtggatatcaaccgcggaaccttttatctgcattatgatgatatctacgatatgctccataaaatcgaggatgaaatgttcctggaatttaatgaaatcatggagcagaaaccggtcgttaccaattctctggcctctcaggggccgttgttggaattcttccattttctggaccgaaacagggatctggccaaggtcatgatcggccctcatggggatctggctttcgtcaaccgtctgaaggatcagattgaaaagcgcaccctccaggttctggaaagtgcgcaatccgatgccaactataaatatctctgctccttcatcatcaccggctgtgtcggtgtcgtagagacctggctgaaagaatccgatccccagtccccggaagaaatggcagagattctcggtgccatgctcttacgtcagcttaattttgctccggggcctgcataggctgtgtcggctccggcataccaacgcttaaagaagttacgatctcaccatccaggaagaaggatacggtatcacctacctgaagttcatccagagtggcatcttctccgtcaatcgtaatgatcgtatcgtcattgactgtgatagtcatagtatctccgctgagagttaaggtcatctcatctagcatgtctttctcaggtttctgaccgttcggtgcttctccgttgggcgcgctgccattgccatcaggagtctggtcgttcggcttttctccgctgggagcttcgccggtaggggcttcaccattgggcgcgccaccgttgccgtcaggagcctggccatccggcttttctccgctgggtgcctcaccaacaggtgcttcaccctccggagcttccggcttctctgccagtgcgatggagatcacattgccgtcaatcgctgtaatctgaccaagataagattctaccttctcttcactgctctctacagtattctgctccgtcgtactctccgatgcgatcgtctctttattttccgatgcttccgtgcttgctgcactcgcagtggttgatccgccacaggctgtaaatcctgtcatcaccatagcagctgtcaacactgcacacattacctttgtattcacctggggtaaattccatcttctcatattctcattcctcctgttccattaaaaatcttgtgaacatttctttccccttatctgcctcttatgataaaggacatctgcgaaggaattgtgagaaaaatgtggtgattctgtgaacttttcacgcatgacacatttgtcatatgtacagtgttggcagtgtcagatcatgtgtcgattttgctgttttgttgtaaatattcaaggaacgcggtacagccttccagaacgtcatcgtaggtcgtcccaaactctcccgtgtaccatggatccgaaatatcccgttccgatcccgcataggaaagtagcttcgctactttcccctccggatctcccccgaatatccgcagcatgttgcggatattcgcaccatccataccaatcagataatcatattccgcataatccgctctcgtcacctgtctggcccgcttcccctcacaggagatcccatgcctcgccagctccgccttcgccggcggatacaccggattcccgatgccgttccagatttcctctgtgctggtggccgcggaggcgatctggaagcgggcggtgagtccggcatcggatactaattttttcattacgaattccgccatgggggaacgacagatgttgccatggcagatgaaaaggacttttatcatagttattgtttactcctttttgtccggaaacaccctgttttgcgaggttttctggggttatggtaaaatgctgtgaaattacagattgtggcaaatcagggcagaacttagcaagttgttactacctgttagtagtaaaatgaaaaagattactactaaggattttgttttttattcctatataatcgtaccaaaaacaaaatattagccgcagccaaatgcaatgcataatcggtgtattcgtctgatatagtaataatctgatttccttgtccatgtccagctactttatttcttacaacaggtaatcctgtttccaatgttgttcgtatacttgtcaaatgcgcattcatatagcttggataaaaaccattgttttctaaaattgcaattagtttctgtgccgtatccttgtttttatcatatacatatccctgtttatcacaaatgattttcattgtgctttcaaaagctttctctgcctctaatattgcatttttattatcaccttttcgtcttttttcataagcatttcttatctcatcttcagcgccttcgaagccttcttcgagcaataattttaaagctggttttacagctgttttatgcaaaaaagtactatcaatagtaataatctgtgaattgacaaactcatatcccaaattatgctgtttaaatcgataattcaactcaacgattgcatcatttattgcgccatctgcatcataatcatatttgtattttggttttatagtacgtagctttttatcaatcaagtaaaagaaataatctattgcatccaaaaagtcaatatcatcacaatctttaaaatattcttctatactggattttccataacccttttgcagtttaccatatcccatgcccttcaatcccttttctctgcaaaaattttcctcgaaaatatcccacaaattttcatcatatgttgaatatggctctaaaacatcttctaaaatataaaaaacctgatttctaaaagctgatggaaaactattatatataaatacttccggttctccgtctgcattcttaattctctttgataataattcgtacataccttctcctttcttatattccagagtgcctcataaatgctaatatcaattaatacgctcttgcctattagtaaaaatcatattaatcccgaatcaagcaattcatagggacatgttaattttctcatccattctctagtttcatggttgctatctttattataaataaatactctcacttttaattttgtattaattatatgaattaagctatcatcgccatatggtgacattccaaaaatatccagttcatcaacattctttatgtcttcatataatttttgtttcttaataagatacaaatcatctgctgggaataatctatttgatggatatattccttctacgcaaattaaatgttctttaataaccgctgacggagcaaaaattatatctgataaatttactatttgaaccttattatttcttgctactttttcaacagcttccctgtatttatcataactcatacggagactactaactagcacattaatattttcatggattgcatccaagtctactcttccatgtaacggtaccgcaatatggttataatcccaaaattcataataattcagtgtaaataccatatcatatacagaaaaatccggcagctggtctaccttgtaatttactttctttttaccattttcatctagaaaaattgtagtaatagcaatgcatgtcaacaaatcctgcaatcggatatcatcatttgtagaccatttgctcccgattttgtcacaaatatatttgtagactgtacctgctaatgtttcaattcctctgttacttgaattcaacaatacatcaactatttcatcttcatatatcgtaatatcaaatgttgcctcaaaaaccggtttgtattttcttatattctctataaaacgccgccaaatgttatcgactgaaaaagaatcaactcctattctactatttattccattccccaaaagcaatccttttttcatcctaatccccttttcctgtataaaaccaacatccacttcataaataacagaataataatgcgtatttaaacttccccatgtatcacaacttttagttctatttatagtttatcatattttgccgcacttccctttgccttctccaccggatacttcgcctcgttctgatccatcttcatatttacgatctcatccgcatccagccccagcttatccagcaaattctggctatatacaataacatccgcaagttcttcttttacatgctgtaaatcatagtctttatcagaccactgaaagcattccaaaagctctgctgcctcaattacaattgattttgcaaggttttccggtgaatgaaactgatcccagtctctatcctctgtgaattttctgattctgtctatcgtttcctgtttcatatttactttgtctctcctctttgggttgccctttttaatgcctctctaagttcatcgtcacaagcataaataaacattccatttacaccacgggtcatcaaaacacgaactgcatgttgaatcaatatttctccaaatttttgttttgaaccatctgataatgttctgttttgaatcgccttatcattacagcttttttcggtgtcatatattacttttccatttctgtatttaacagaaggtcccagaataactccggcataatttaaatcaaatccctgaattgtaaaagtagaacccacttcattgattgtctgtggttgttctgcccaggctaaatctttaatctgtctcttttctttttgggaaagttctgactttaattctctattccagggtttatgccatgctccgatttctacttcccaatattttctaaatcttcttttcgctttgctactatattcccagtcataagttgcgatcaaacgtgataatgccgaatccgttttctttgccttttccgtaatttccagatccagttgttccggatcatcaaaaaccttgattgtatatccatcaactgtttccggaagttttttgatctcgtttctttttgtaaacgaatcgatccagtccatcgtttccggacctgcctgcatccgaagctgtttatccaatataatgtgattattggttgcttctgcctgctttcggtacttttccaaaatctgtgcttcccaaaactgttccgtcgtgagtatctgatattcatcaaacatcaccacagtaactcttgcccgctctatgatatcctgaagctgattttttcctctataagattgcttaccctgtgtcagcaataagtgtgcctcatctataaatgcaacatctaccggatcatctgctgaatgggtattaataaacgatgtgggcttgctgacaacatttccatatttttctgttaatccaagtctctccgctatctgctcatatacctttatctgttcatcatggtttacaagcatatagcatcgtatactggttttattttcttctgcccggcaatataattcataaaatgtactgctattcaaaacagtcttacctgttcctgcctcaccatcaataaagatcagctgctttgtttttcccttagaaagagcgtccgtgactttctgtatgatcaattctcttgcattttcctgatcctcagtcaacttgtgcagtggtgaagccttatatatcgccgaatctttaattgcactctctgagggaaatagttccttattttccttccgaagacctctccatattttactgaatatttcatccagctcttccatcgggtaataacccttctgcggattatctctcaaattatgtacatgccttacatgatcagcgctcatcatatagtgcattaaccgattttcaatatccaatgtcaatgatttattaaaatgttcgtgtccaataatgaacaagctggaatccttttccaataatttactctgccattgtgttctgtcattcgctgtatcatagtgttggcgtgttcttttaaagatattattggactcccctacatacacctcaaaatcaccggagtctttccagttatgtatataaactgtgggaaaatccataatgattttccgtgttttctcatcttcggaaggaagtgaaacagtttcaaagaaatctaatgattcactgttgtcttttatctgtcttataattggttttgcaactgccatcgtaaatccccttttccaatatcttctgctttatagctctttaattctcgtatatttttaccttatttattcctatttcatcaatcatcttaatctcatattcatgatattccataaaagttctattagtcaatataacgattactatttcatgcctgtcattcgctttatttttatcccttgccaatagagtatcatatctgacagcacttgcttccttagataaaataaaaagccagtagggaacaagcgttctttttcgattgatttttttatattagtgctgtataatattattgccagtgtaaatagcagatttactcccatttggttcgtctaagacgaatggtacatattgactactcaatatgtatttttaaggacgcgactgcatctcacagtctatgccgcccatatcccctaagagtaccaagtctgtaccgcagttcccggagagggggcttaggtggtgctatacttacttttttcgcatcataaacgtatataagtgctcatagggagaagaaatatgctggtgtgagaacaatagatatacgctataacaatctctttgttatttgaggattagggagactcctatatggagccaataataacaaggaggtgatctctatgaaaaagaaagcggataaacctaatgttactataaatgtcaacatacttagtaacattaaacttgatggcaaatctttaatctgcatcattatcgctattatttgtcttacactggttatgtctatttgtgatcctactactcgtgctgaatttattcgtttatttatcagcatagtacgcaattgctaaacaccagcatttaatttgaaatgagggaattttatgattaaccctattcattcgaacctatataaactaacttcaaagaaatatttattgagtttattacatatccacaacaggcaatttttaaaacaatcttatgtttccaaacaaatttctccatatatacaaacagatcccaaacctcgtttaattgaagttccttctgaagaactaaaaaccattcaacgacatattaaaaatgaattaaataaaatcattgttccagctaatattttttctgggataaaagggaaatcatatataggaaatgcaaaactacatagcggtaataaatatgtcttcaaaattgatttgtgtgccttttttccttgtatcacacgcaatactgtatacaatttttttatagagtcactaaaaacctctcctgatattgcaaatattttaactaatttgttgacagtagacttgtcaaaatgtagcattgaaaacgttgaatctgtaaatgcttttttaatatcaaagaaaattaaaacaccaaaccatttaatctccgggtctcccgcaagtcagatattatcttatttggtgaaccataaaatgtttgattctttacagaatttttgtgataaaaataatattactatgtccgtgtatgttgatgacgtcaccttttcttcacaacacataatttctcatactcaaaaacaagtaatatataaaattatctctaaaaacttataccgactttcacgtaacaaagtaaaatactataccaaaaaatatcctaagcttatcactggtgtcgttatatcgtctaatggaaacttaaaaatcaaaaattcattaagtcttaatgtaatcagtgaatggaaatactttagtcagaatccaaaaaatcttcagtcaaaggcccgattgcaaggacttctgattgccgcacgccaaagtgaacctgcaaaattccaaaatatctataacttaatccgcgaggcaagtattccattttcttaaatttaaaatttacattccgatttattcattgcaaacaaatatcaaaattatctgcaaattatcttcctcggaacgtcaatttgtattttagacaatcatactttactaaattatattttactatatattctatttttgctagcttttctctaaacttttacactcgcctatggcatttctccaccagacaatgctacgatacatatctgctactgtcgtccttccttaaaacgactacatactaaacatgaccgatatatgtatttcccataaaaaacagaccgcgcatccttattagatgcgcggtctgttctatacgataatccccttttgcttttgatacctttggtatcatttcttaaattatataaaacatctcatgaattgtcaatagtactttcatttttttgtcgttttttcaaaaattataaaagtactatcgtctcccgccacacttcgcacaaactctccagcctccatgccgcattggccgggctggtggagggcagcaccgtggcttctatgccggtcaggggcagctgatattttcgataaagctctcctgctttgttaccgttggcatagatccgcgtgatctgtgattccgccaggatccttcgaatatccgtcggctccacattgcggatgctactgtcgctggatcccttaatatcgcagctctggatcacatcccatatggcgatatggtgggtcagcagcattttctttttctcctctatggtctccggcaccggttccccgcacagatctgccatcactttccagaaacggttctgcttatgtccgtaataaaaatggttctcccgggatttcacagagggcaatgtccccaggatcagcaccagcgaatccgcatcgtacaccggtgcaaacgtgtgctcaatatgttcatattctgtcatgctgttttccttcttccttatggctgtccctgtctttcagcagatatcgggccgcaggaatttccacgatcagagtaaccgctaccgccaccgccgcagacaccacgataatcagtatctgatatttccactgccatacacggtcacctgtcatatttggcggcgtatccccgctccaataaggaattcttttttctttcagccagacggcgatcatctgatgccagagatacagattataggaaaatttgcaaaaaagtgatgccactcggttggaatatagtttctgataatattctcccgcacaggctgtgctgaaaaggaacaatgcaaacaggaacgactgcaccagcctgctctgcagctgaactgcctgcagattcacatccccatcgtatttatgaatcaccccgttcatcagaaaaatgcacaaaacagagagcactgttcctgccagctgcgaatatttattttctgtcacgtatttcttccacatgacatacaggatgcagcaaagcatgccattggcatagattcccataaacgtcagaatattatttccataatttctctcttttcccgcaaaacagttcagaattaccgcagtacttgtaacggaaatcatcaacatcacactataagtggcaaaggcccacttgcggaacaatcttgcgatccacggcagcagcagataatagattacttccatctgtaccgtccacaacacaccgttaaaagaggtggatatataagtgtccgaccagtttggtgcaacgcaaaatacatgtgttacaatatctttgcacaatgcccccacattccgatatttatgccaaggtaaaatataaaaaaccagatcgatcgtcagcataaaatagtaagaaggcaatattcttgctgccctctttctgtaaaatctcttcgtatccggccagtcctctcccagaacaatagatctggcatagggataaaaattgcagaacgcgctgagcagaatcatcatatccacaaaaacgaatccatatctgacccatccagctaggttgatctccgtgagtccaatatattttgtgtactctgttggaatccgaagatacggtgtcagccatgtctgctgccagaaatgaaaccacactaccatcccgatggctatggcacggattccatccagcacaccgattctgttttctattctgtttttttcatccatgctgtattcccgccgtttctgattttctgctgcttcctatctgtcatgttccagtctccatctgatacatctggtgagataatccacgtaatccgcattcttacacatttccttgccgggagtatcggagatctttgccacatccatgccgttgcaggcagtggtcttcatgacaatattcaacggttcctcgcaggtatcattggcaatataggttccgataccgaaagccaccgtcaccctgtcccggaatgccttacgcagttcatctgcccgtgcaaagtccagactgtcactgaacagcagggtcttgcgcttcgggtcaatccccagagattcataatgagatatcagcttctccccccatgcaaagggatccccactgtcatgccgcacgccggaaaacagagtggaataggtcagctggaaatctttcaggaaacaatctgtggtgatcgtatccgtcaaagcaattccgttcaaaatgccatactctttcacccaggcatccagggcataccagttggaatatgccggattgtgcttgtgattgccctgcccggtacacatgatccattcatgggccatagtgcctaccggtgtcacgttccatttctttgccagatagacattggaggtaccaatgcaggcggagtccttataatccttattgtgacccaccagctcctgtactgccagttcctgtgcctctgcagagagacggcgtctcagaccgaattcactgaaatttccaaggcaatacgttccgtccaccagcttctgtagcttgtctgccagacgctcccggaaggaggcatacagcttctcatagtcataattcatacggaaaaatacttcattaacaatagccagcgttggaatttcatacatggaggtattcagccaggagcccttcgtctcgatagtcaggccacagtctgcctctgtgccgatctcaaaatcctcatatctgggctgccacagccgtaggaaatccacataggaacccttgatccattttacgttttccagataagccagttcttcttccgtaaaacgtaagtcacaataggcccggatctgcgccttgatttcttctaccatttcagatgtgaaaaatacatctgtattcctgcatttgaaggtccaggtagtcttataagcgctgaactggtggtagatacactgtcccatagagaacttgtacatatcattttccagtaagctgttgatgatctgtggtaattgcatgattttatcctctttctctcttagattcacaactgtgtaaatatgatatgttctctaaatcacatccgcctggatcggtcccatagctgcgatggccgtctggtgcgtctggggtgtcacacaggcacaggccttctcaatgacacacactctcgcttccggtacaaatgcctttgccatgaccacattgcttaacacacagattccggtgcagaatccggtaaaatccacttccatgggatattcaccccctgctgcctctcctgctgccgtcacctcttcccagattgccttcagcgtattcccaaaatccagactgccaaaagtaggctttttcaccgtaaggatctgttccggcgcataatgctcctgtaccgccttcatgatatccggatggatcttatatccttctgtgccttcctgtccgtgcagaacgggcagacgctttccttcctgggtgtgcagataatccgccgtatgggtatcctttgtaaagatcaccttgtagtattccccgctttctgctgccgcaacgatatactttaccgccgcctcgcactccttgtttcccagcgccccggtgatgaattcgttctgtgcatccgtgatcactaatactttctttgtcatgtccctctcctctactcgtttttctataatgatgccggggcaaaagcccccgactttgcacaaaaagcaggcaaccgcatcctgcgactacctgcttctattacttatagaaataatttcttcactttttctgcatcaaatacaacttcctttaccccgtccacttcgatctgatacagggcattggctgccagatgctccgccgcctgctcaaggtcacggattccactggtgttggaatagatctccaccaccgcatccagtccctcttcggtgagtgtgcattcgtctgcctgcagtccaatccttttcagcaccttcggcaatgcaaatctggagaaaatgatcttcttctcctccggtgtgtaatccgggatgtcgatcactgcaaaacgggacattaacggagcactgatctgctccttgtcattggcagtggcgatggggtagacaccaaaggtgggaacggtacattccatatagttgtccgtgaatcccagattgtcaagcaatgtcagaagcacatccgccggattgccgttacccttgccgtttgccgccttgtccaactcattgatgatgaataccagattagactctcccgccatggaaaaagcctccatgataatgcccggcttggcattggcatagattctggagcttccggtcagctgctccggatcgttaatggaactcatgtctaatgttgtccagggcaatttcaggatcctcgccaccgcataagcgatctgggatttaccggttccggccggacccaccagaagcagtccgtaagccggtaaggtgtgggtacggttaatctggataatggtctccatgatccgctgcttgactctctccataccgtacaattcctcgtccaggatccgtctggcttccaccggatcaatggcttcgaagtaattgcccttccactgaatgttcatcatgatggacagcgctctctgggcatgtcttctctcttccggagacacctcatgggatctggccaccgccagatttcttctggcccacaggcggatgttttccggcatggtccttccagcacatgtcatgaaatcggagatactctgaaggctggtaagcttcatatcatcgccgtcttcctcttcgtcctccccctgttcctcttctgcgggagcactgctggcgaacagtctttccatcatgaactgtaaaaatccatcttctgccgaaagcttggttccgccgccaaatgcagtctctcggatcttgtataccgcatagccttcttcccggttttccccggaaagccggacattgatgtgattttctcctaaccatctgacgaggcttacgaatcttgcatcgatctgtaaaatatcggcataggcactgctgccctcttccctgaattcgaaattcgtgcgtttgttctgattgccgaagacaccgatagcatggtgcttccacggttcgctgctgttgtccaggatcaggatcggcttttcgggacttgccgcagcctcattggaacggaacatggtataggtgcatacgggatcctgcttcttctcattttccggaatactgctgaaatcaaataccggcattgtcagcctccttttttctcgcctgaatcttctcctcatcgatcagcttgaactgctttaccagattggtcatattctcggactgagccagcagttcctcactggtagcggataattcttctgctgccgcagagttggactgtacgatctcggagatctggttcacaccgctctccgcctgattcatggcatctgactgagcagctgcaatctggttcagttcctcagaatcctgtgcgatcctgcggacgccttccacgataacgctcaacgtctgggacgcatgatccacagcttcattgccggcatggatctcctccagtgtaccgccgatcagctctctggtattgacagcggactgcgcactctgctctgccagcttaccaatctggtctgccaccacagcaaaacctcttccggcctcccccgctctggctgcctcaatggacgcatttaaggacagcagattggtctgactggcaatatcctcgatctcaccgatgatgttgctgatcttctcggaagtctcgttgatctgttccatgatctccatcagatgattcatctcggtacggccttcatctgccttagcagagtattcctgtgcctgcctgctggaattcttggtatgctctgcagtattgtctaccatagaggtaatattagtaatggttgcctgtagctgctgtacggctccggcctgctcagtagcgccctctgccagagactgtgcggcatctgccaggcttccggcacccatggatacctggccggatacggaatttacattgtacaatgcttcgttcatcttatatttgatatctctcagggcttccttcaattcatccagatcccctgcatagagatcggggtaaagaaattttaccgtccagtcaccatttgccatggcattcagagcctgcttgatatcctcaatgatcattcgcagattttcagccattgcaatggcggcacgattcatctctgccacttcgtcctctgtctttacttccgggaactctgaagacagatcacctgcagcaaacccatccagtctgtctgccagcgctttcagcggtccggcgattcctttggctattctttttcccgctttttcagatcccgcaaagcctactccgatgatcagaaggattacgataaaaataaccacacggaaaacattcagtttggcttccatggcatttccgttcgttacactgctgtccaacaggctcgtcatatctgcatagacctgctggaacacgggatccatctgttcgcctgccatctgctgtgcctgcatccgcttagcagaatcggaagctgttcccagttccagtatctgtgcctcgatctgctgataagaagctacgccgtccttgatctgctggtaggtagctcttccctcatccgtgatcatgtcatcttccagggcactgatataggtatccaactgttccgccgtcaggtcatgggcattttttgctgtagcgatcagtgtatcgtcatcatagccgatggcggcacgggtctcactccgcatctccgcgataacgatcatcgccttaccgatgtcaccctgcgcgaaaccgtaatgcttcaaggcgtaggaatactgataactcacgattcccatggccacacaggcgatgacacccgtcatgctcagcagtatcttggtcttacgaaatactttcaataggcgcttctcaatggagagcttgtttaaactgttaaatctgtccgttctgtccattccaatgttccatcctctctgtaaactgtgtgtaaaaatctatcgtcccctcatacggcaataaataaaacagacgcagcagcaggagattttcttccctctgtttcccttcgtcttctcctgtcagtctttcttccatggcatgtaacaggtcatgccattgtaaggtaaattgctgattgcgggtcagatccggagtatcgatccatttactgacttttatcttgctgcggttctcctttgcacattccccggtctgaagaaaataggaaaatcctccattttcataatatcttcccagaggaaacagtctgcagattccgggacggtacgggtgaatactgcatcgaccccctccgtccagatacgcacaggcttcctctgctccctgcattttcagatttggcaggatcacaccgtccaccacattgagctccaccgatgccgctaatagctcctgcatgcttttccccattcctgtagtcatccggtacacatcatagggatccaggataatggaattgcccatgccgtgacaacaccgggaacagccattgcaaccaccgcaatccgcttttaccatatcatttgctttgtataatcggccgtcggatatctccgcaaggcttacatttcgcttcatatcttcaccatcagcctctctgtgccttgcgttccatgatctccttcaggctctcggtgtaaggcgctctcgccaccccgtattccgtgacaattccggcgatcagttcatggtccgccacatcgaatgccggattgtagacctttacaccctccggggccatgcgctccttgtaccacatctcagtaacctcttctgccttacgctgctcaatacagatatctgcgccggtggctgtggccatatcaatggtggaagtgggtgcacagatatataccggcactccgtattgttttgctaccgctgccaccacgctggtaccgatcttgttggccgtatctccgttagccgccactctgtcacaacccacgaacactgcctgcacccagcccttggacatgacagaagcggacatattgtcacagatcagtgtcacatccacgcctgcggaatgcagttcaaatgctgtcagtctggctccctgcaaaagtggtctggtctcatccgcaaatacatggaagttgtaacctctctcctgtcccagataaatcggtgcggttgcggtaccgtattttacggttgcaagttgtcctgcattacagtgggtcagaataccatctcccggttttaccagttccagtccaaattctccgatttttcgacatacttccacatcttccgcccgaatctgtagtgcttcgtcatgcaggatttccttcacttttgcgacagtcttgtgctcttctctgccagcctttacagccacagcatccatgcgcttcagcgcccaggacagattaactgcggtgggtctggaagaatccagatattccttatattcggtaaatttctcataaaacttttcaaaatcttcggtctcgatgcggtttgccagcagataaatacccagtgccgccgctacgccgatggccggagcccctctgactttcaacagataaatggcatcccagatttcctgtgccgtatgtaaagcgatcagttcgatcctgccgggtaataaggtctggtctatgatgatcaccgcatcctgtgcttcatccagtgccacggtgtcgtaatcgagaattgttttttctttttccatagatactcctttatatatgttttcgtaattgtcagatccttacggtatcttcccggttaattttcatgccggataatatcggcaaattctgctttcgctgccttggccagatcctccggtgtcagacggatctgagatccgatcttgccgccgctgacatagatctgctcctgtgtctttgcgctttcatcgattctggtcacgtactgctttttcatgccaatggcagtacagccgccgcggatataaccggtaatggcgttaatgtcctttacgtggatcatttccacgctcttttcccctaccgatttcgctgcctttttcagatccagctccgccgcaatagggataacgaatacaaaataattcttgctgttgctcacggtgaccaacgtcttatagacctgttcatagggcagggataatttgtcagctatctgaagaccgtccacgaattcctcacactcgtaggtgtgatgggtataaggaatcttcaaagattccaggatccgcattgcgttggtctttatttctttttgttttgccataaaactactcacgcctttcaacaacctgcaaactttgagccgaaggcacaaatttgcaggtgaaaaatttatttttcaccttgttacccttggtatcattttattttactattttgcttcccccagcgcaagcatacaaggcaagaaacttgcacaagttgcatcagttttttgcagaaaagaactccgcccgactcccggacggaccggggaatcaggcggagttcttatatgtttttaatccgttgttacgaattagtttgctgccttctcagcctttgcagccttcagctgctcggtcagagcgggaactaccttgttcaggtcgcctacgataccgtagtcagccacatcgaagataggcgcggtctcatccttgttgatggcaacaatgagatcagactcttccatacctgctacatgctgaatagcaccggagataccgattgcaaagtaaatctgaggacgaacggtcttaccggtctgtccaacctgcagatccttgggcttccagccattatctacaactgcacgggagcaggatacggtaccgccaagaacctctgccagatcgtccaggatcttgaagttctctgcgctgccaactccacgtcc

SEQ ID NO: 5608 - DNA, 629 bp, Unknown
  gut microbiota DNA sequence
gttacatatttgttgttcggagtaaatccgggattgtactcttcgattacagcctttgcacctgcgataggagcgatcttctgcataacgccgggacgaacggttgccatctgaggtctgttgtcggggcaggcgatggtagcgatggtgttaccaccgaatgcaggacgggtcatcagcagctggttgtgcttctgctcctgtccgggaatcgcattgagagggaaatcaccaatctcaagtacggtacagtcagcagtcagaccggtcttaactcttgcggaaacggtagggccgaggtcacgtccgatagcagttgcacctaccagaacgatctcaggcttatatttctcgataacagatgccagtgcatgtgcataaggctcggttctgtaagtctccagttcgggatcgtccacaaggattaccttatctgcgccatactcagccagcttatctgccagattctttacattataaccgatcagaaccgcggttacctcggtctccagctttgcagccagctctttacctttgccgagcagctccaatgcgataccgctgatctcattgtctacctgctgggcgaacacatatacacccttgtattcttcaatattattggttac

SEQ ID NO: 5609 - DNA, 356 bp, Unknown
  gut microbiota DNA sequence
taccgggatgaaaacggatacaggaggaataagtaatgcttttacaggtgattctggaaggtcttgggttgggggctttgctggctcttgtctgtgctgtgggcatccgcaagggggctgttgggatggtgcatctctacagcccggcagtgcagcagcggtgcgtgaagctgggacttacgacacacgagaaaatcaagcgcaattctcaacttttcaaagctgtttgcattcccggctatattggttatgtgctggtctgtgtctatgggataaacggtgcgaaaggctttgcggcgggcttctggcagctgcttgtcatcttgtccgttatgaatctcattgaccgctttttg

SEQ ID NO: 5610 - DNA, 1463 bp, Unknown
  gut microbiota DNA sequence
agcccagagattacatgaccacctttatgttactgggcatgatcatcggcgctgtactcggtgtggtcgtagcacatcccgatatggagctgaatgcatttaacggttttcaggtgggcaacagcagcctgttcccgaccctgtttgtcacgatcgcctgcggtgcggtatccggattccacagcctggtatcctccggtacttcctccaagaccatcagtaatgaaaaagatatgcccatggtaggctacggtgccatgatcgtagagagcctgcttggtgtggtagcactggtagttgtcggagcagtagctgtgaacggcacaaagcccgatggtacaccgttctccattttctcctccggtgtcgcaggattcctggagaagatgggggttcctgtaaccgtagcaactgtattcatgaccatgtgtgtatctgcattggcactgacttctctggattccgtagcaagaatcgggcgtatgtccttccaggagctgttcctgggagacaccacagataccgcaaagatgactcccgtgcagagagttctgaccaataagtattttgcaactgtgatcactttgtttttcggttatctgctgactcttggcggatacaacaatgtatggccgctgttcggttctgcgaaccagctgctggcagcactggtattgatcgctctggccgtattcttaaagactaccggtcgtaccggctggacactgtacttccctatgggaatgatgctggtcgtaacctttactgcattgatccagaagacagttgccctggtgaaaaatgtggcatccggacaggctgccttcctggtagacggcttacagctgatcgtagccatactgcttatggtactgggagttatggttgcttacagctgcatccgcaagctgttcggtgccgggaaaaattcagaaaaagaggcagcataagttgtcaaaaaaattgattttccggtagaaaagaaagataagatatgctagaataaggaacggtcaaggagcaaaaaactctttgaccgttcttttcgtcagagtggacgctgatgggaagagtaataacagagatacaaatatgggaagaagataaaaggataggattgaaaatgaaacagaatatgcaggatctgacggaaggacccttaggaaagaaaatactgatcttcagtgtgccgttaatgctgtccaatctgctacaggtgcttttcaacatggcggatattgcggtgatcggtcagttcgccggttccctgtcgctgggagcggtagggtccacagccacgttggtcaccatgtttaccggatttttgatcggcctgtccggcggtatcaatgtactgacggcactgtattacggggcaaaggatagggaaagcctgtcgaagacgattcattccgccgcactggtcagtctgatcatgggaatattgctgttggtgacaggcg

SEQ ID NO: 5611 - DNA, 8468 bp, Unknown
  gut microbiota DNA sequence
acaaagcagtattgtacctgcggatctattatctgggaatgccggcgctggccatttacaactttggtaatgcggtgtacagcgcagtggggaatacgaagaagcctctgtattatcttggtttttccggagtgctgaatattattctgaacctgttttttgtgatcgtctgtcatatggatgtggcaggagtggcattggccagtatcatttcccagtatgtatctgcagcattaatcctgcaggcactgcttcgctgcaaagacatttatgccttgcatccgggaaagctgcggttggatccggaacttacgaaggatatcctgaagctgggaatgccctccggattgcagaacgtaattttccagtttgccaacagctttgtgcagatgggtgtgaattcctttgatgccaccatggtggcaggcaattccgcagccaccaatgcagatgccatggtatacgatgtcatggcggcattctataccgcctgcggcagctttatgggacagaattacggtgcgggcaagaagaaaagggtgcggaacagttacctcatcagcctggcatattccttcgccatcggtctgatcctgggagtgtcactggtatttttcggaagagcgtttttgtccctgtttaccagagatgcggcagttatgaatgccggtatgtaccgtctgacaatcatgggattttcgtattgtatttcggcatttatggactgtaccattgcggcggccagagccatgggcaagagcattatacctatgttcattgtcatcatgggctcctgcgtgttccgtgtaatctgggtctacaccgtatttgcctatttccatacgataccgtccctgtatctgctgtatgttttctcctggagtatcaccgcagtggcggaaatcctctatttcatacggatctacaaacagaaaatggctctcctgtcgtaagacagaagagccattttttgcgtggtgtgcccggcggtgcatgtcgctctttatattatgcggcttcggtttcggcggaaacagaaactgcagggtagcgtaccggaagcagatgagcgcgttccagtgcaacatagatgatggggatcagaatcagctggataatgataccggggaggcaggatacgaaatatccggcagcccaggcagaccagctgtaggagccgcctgcgaagatcaaggcacgcaggattccggtgatcacacggccgcccagcatggcgatgattaaagccgcatacagatcaatgaccagcttaccgctgcggagaaactgcatgaccagaccgctgatcagaccatagagtcccaactcgatcatcatgacaggcatatatccgaaaacgggcataccggtaagcagactggataccagaggtccgagaatgccgcagaccagaccgaaaggtgctccacagaccagaccgcacagaagcacgggcagatgcatgggggagaacaggacaccgcccttgggaatggcgtgcagagtcatgggcagaaccacacataaggcaacacacagagcagtgaggatgctcttgtttaaaacagttaattttttcatgggaaacctcctgataagatataactgttcagagtctccattcgcaaaaagcctctccgagacggagaaacctgaacagtaacaaaaaagccagaacggcacacttttcccctctgggataaatatgccttctggcgttaagctccttcctgaagcataatacataataaagggtgggcatttttttgtcaagataaattgcaaaaaagcatttgccatgctatcatggaacatgtatgtattatttttggcaggagtaaagttatgcgtattatggtaatggacggccagggcggaggcgtaggcagaagcctgctggaggctctgaaggaacggtttccggaggcggaactgatcgcagtgggaaccaacgccacagctacggcgaatatgatgaagagcggcgtgacaagcggtgccaccggggagaatgccgtggtatataacagtaagagagcagacgtgatcgtaggaccggtgggaatcgtcatggcggatgccatgttaggtgagatcacccccaccatggcagcagcggtagcttcgaatgatgcaaaactgatcctgatccccatgagtaaatgccatgccactatcgtgggagtcgagagcagacgcctgggagaatacattgcggaggctgtggatgagatcgctgagaactgtttctgagctgacagaggaattgcgtgtgcttcccaccggaatgcgcattattgccattgacggcagatgcgccgccgggaagacaacactggctgccagacttgcaaaagaactgggcggagatgtgatccatatggatgatttttttctgccgcctgcacttcggacgcaggagcgcagaagcgagcccggcggaaatgtgcactatgaacgatttttgacggaagtcataccgaagcttgcatcgggacaagcattttcctatcagagatttgactgttcccgcatggcaccgggagactggctcccggtacaaaataacggttttgtattcgtggaaggcgcttacagctgccatccggtactgggagaatacatggaccggaaagtatttctggatatagaccatgagacgcagacggagcggatccgcacgaggaacggagaggacatactacaggacttcctgcagctgtggattccgttggaagaagcatattttcaggcattttccctagaggagaatactgattacattataaaacagacgaaaggcgagacagatgttgcatcagttttacccggattatgaggcggattccgcctatggcatagattacagaacattatatgaacaggggtatcgcggaatcatttttgatattgacaatacactcgtaccgcacggggcaccggcaacaccgcaggcaacagagttcttcggcagattgcgggaactgggatttcagacactgctgttatcgaacaacaaggagccccgcgtaaaaagttttgcggatgcagtaggtgcttcctatatctataaggccgggaaacccggaagagaaggttatctgcgggctatggaacagatgcataccggggcggataccacactttttgtgggggatcagctgttcaccgatgtgtggggagctaagaaatgcgggatcatgacctatctgacgaaacccattcatccgaaagaagagattcagatcgtactcaagagatatctggaaaagatcgtactgtttttctaccatagagaaaagcgtcggaaaggaaatcaaaatgctgaatgatatcaatggctataccagaacctgcggactgatcggaaacccggtggagcacaccctgtctccggtgatccacaataccctgtccatggtgcttgggaaaaatctgacctatgtcccgttccatgtggagaccggaagactggaggatgccgtgaagggtgcttttgcactgaatctgctgggaataaatgtaacggttccctataaaagcgatgtgatcccgtacctggatgacatagatccgctggcatcaaatatcggtgctgtaaatacgctggtccgcacggaaaagggctataaaggctacaataccgatatgccgggattgtaccgggccatgtgcgaggacggcgtcaaagtcaagggacagaaagtgctgatcctgggagccggaggagtagccagagcggtagccatgatgctgttggataagggggcgaaagaggtcattatcctgaaccgtacggtggaaaaggcacagagcatagcggacgaggtgaatcacctcaccggaaaaaaacggaaatttgcaaaagccctgtctatagatgcgtatgatacgctgccggaaggggaacgctatctggcaatacaggccaccagtgtgggtatgtatccggactgtgatgcggcggtgatcgaggatcccacattttataagagagtacacaccggatatgatctgatcttcaatccaccgaagacccggtttatggaactggtggaggcacagggcggtgaagcctataatggtgcgaagatgcttctctatcagggaatcattgcttttgaattgtggacaggctgccaggtggaaccctggcttgcagacaaagtctatgaacggatgcagaaagcaaaaaagacagaggacggaaaataaaaaatgaaacacaaacgaaggaatatcgtcctgatcggctttatgggatcggggaagacaacactgggactgaaactgtcctatctgctacggatgccggtagaagacacggacaagctgatcgagagacaggagggcaggagcatcacacagatctttgcggatgacggtgaatcctatttccgggaactggagacggaactgctgcgaaaatgcggggaacagaaatacgaacgtatcctgtctgtgggaggaggcactccggtcaatccggtgaaccggcccctgctgcatcagtgtggaacagtggtatatctgcgcgtgtcgccggaagtggtctacgagcggctgaaaaatgacactacaaggcccctgctgcagtgtgaggatcctctgacaaggatccgggaactgctggagatccgggacaaaatctatgcggaatgtgcggacattatactggatgtggataacaggcattccgatgaactggcggaagagttacagctgcagttacggaagcagaaagacatacagagaaaaaaggagagaaaaaagatgaaaattctggtgatcaacggaccgaatctgaattttctgggaatccgtgagaaaaagatctacggaacacaggactatcagtatttactggatctgatcgacaaaaaagcaaaagaaaccggagaggagatccaggtgttccagagcaaccatgaaggagccatcatcgacaggatccaggaggcatattctgacggaacggaggggatcgtgatcaaccccggtgcctacacccattacagctatgccatccgggatgctctggcaagcgtggatattcccaaggtggagattcatatttccgatattacgagcagagaagagttccgcaagatttctgtgacagcaccggtatgtaacaggcagatttacggacagggactggacggttatctgcaggctatcgatttcctgcgggagaacaggcagtagtttcccgagaaatttgaaaaaatttttcaaaagtagttgaaatgtgcatgtttttatattaaaatgttaaagaattatgacgtgaaaatatttaggaggaatacattatgatttctgcaggtgatttcagaaatggtattaccattgagtatgataacaatgtttaccagattatcgaattccagcatgttaagccgggaaagggcgcagctttcgtaagaaccaagctgaagaacatcaagagtggcggtgttgtcgagaagactttccgtcctactgagaagtgccctcaggcgcgtattgatagaaaggatatgcagtatctgtatgaagatggcgatctgtactacttcatggataccgagacttacgatcaggttgcactgaactctgagactgtaggcgatgcactgaagttcgtaaaagagaacgagatgtgcaagatctgctcccacaatggcagcgtattctccgtggagcctcctctgtttgtagaactggagatcactgagaccgagcccggattcaagggtgataccgctaccggtgccagcaagcctgctaccgttgagaccggagctactgttgcagtacctctgttcgttaaccagggcgacaagatcaagatcgataccagaaccggtgaatatctgtctcgtgcataattgttgagactaccactgttctgagcgatatccgataagagaacctgtaaggcaataagttatcctgtttcgggatggcttattgcctttgttattttctacatttttacaccggaaataccacatgggaaaaagcaggaggggagcctgcttcggagaggcatggaggtattctatggagatttctacatttaaagtaaaggtacagaaggctgtcagcgaagtgttgggacaggagtatacagtggaactgcgggaagtgcagaagaataacggagtgctgcttcagggactgatgatccgtaagggacaggacaatgtgacacctacgatttatcttaattccttctgggaagcttatgagggtggcgtgacctttgcagatattattaagaagatcatcagtatctataaggaggacggaatcggccggaagatcgatgtttccttttttcaggattttgagaaggtaaaggagaaactgtgcttccggctggtgaaccgggagaagaaccgggagcagctggaaaaagtgccgtatattccgatacttgatctggcaatctgcttctactatgcgtttgacgaagcaggagtggacaacggtatgatccccatctacagatcccatctggacaactggaaggtgacagacagggatctgctggagattgcagtgaaaaatacccccagactgtttcccggtgagaccattcccatggaggatgtgctgggagacgcactgcaggaacttccggaggaagtccggagggaatttttgaggaaggtatccatgatgatcctgacgaattcccgcaagacttacggtgcctgcagcattctgtatcccgggatgctggagcagctggcagagcgtatcggcggcgattattacatgatccccagttctgttcatgaattcctgctggttcccagggaacgggaacaggacagggaagaactgaagaaaatgatcgcagaagtgaaccggacggagctgccgccggaggaagttctgtcggaccatttatatctgtattgcagccgggagagggaagtaaggatagtgtagaataccggagtgaatattatgtttgaaaaaaactaaataattccaacaatttaaactggacatatgtagtgttttatgatattatagtcgaggtgatgtaacaaatttgtaatatttgcatccgtagtctaatggatagaacggaggcctccgacgcctttaatgcaggttcgattcctgtcggatgcatttacatcaccttgattatagggagagagatgagagaagccgcttgcggctttttgcgattaaagaactttttttcagaatttggaaaggacgcaatatgtggaaagaaaaattacattttcttggaaactatatcataaagcatagtaaagtagttttgccggctgtcgttgttgtggcagtggcagtcaccgtatctgtaagcctgagcatgaacaaccgtcaccgtgaggagcagcagaacgcagagagcgcagcggcagcgtccagtgagattgctacggaaccgacaacagaggatgtatctttggtagcaaatgaggaaggtgcggtatatactctggtagctacttattataatgctatggcgaccggtgatgagacaacgttacgttccgtttgtgatgagatctccgacaaagacatgtatcgttatctggaactggcacagtatattgattattatccgactttggagatctataccaagaccggcccggaagagggttcggtgatcgcttatgtatattacaagattgcatttgtgggtcatgaggaagaggtgcccggttatcaggcactttatatctgcaccaatgatcagggagaaatgtatatcaagcgcggcgagaacagtgaggaagtcaacgattatatcaagacggtaagcacgcaggatgatgttgtggaatttaacaacaagatcacagtggaatacaatgaactgatggtagatcatccggaagtattgcagtatatcagtgagctggattctcaggtaagcattgccgtaggagagaagctggccaatcaggtagccggagatcagaatacagatacctctgcggaaggcggtgatcaggcggcagacggtcaggatacttctgccgaaggcacagagcagcctgcagaagagcagggaccgcagtatgtgacgacaactactaccgtaaatgtcagaagctccgacagtgagcaggcggataagctgggtaaagtggcaggaggtacgaagcttcaggtactggagcagcgcgctaacggttggaccaaggtagattatgaaggtaaggaaggctatatcaagacagagttcctgcagctggcagagagcgcagccggtgccgagaccatcggaaccgtgaccgctaccaccaatatcaatgtacgtgcatccgccagtgagactgcagatcgtctgggagttctttccggtggcgattccgcggaactggtcggcacagaaggcgactggagcaagatcaggtacaatggccagatcggatatgtcaagagtgaatatgtacaataacagattttccaagttcgtaggg

SEQ ID NO: 5612 - DNA, 8502 bp, Unknown
  gut microbiota DNA sequence
tcgaatgatagagcgaatgcccgacagcgaagaaatgcgaagcatttttgagcggtgcactgcggaatgaggaagaagcaatttgcggaagcaaatcagcggaatccgaatgtaggtagaattgcgagagcagcgaaggctgcggagcaattcgtattgcgcggcgaataatagggcgaatgcccgacagcgaagaaatgcgaagcatttttgagcggtgcactgcgggcttggaataaaataagataattcagggaaagcttcttaccaaaaacggtaaggagctttttctatgaataaaacaggaaatcacaatctgaagaaacaggagatcaacatctaccgggagatccagcgtaacacggaaatggccatgaaggcactggatgccgttacggacaaaatctacgacgacaggctggcagccgtggtggcggaacaggaattacagtactccaggctgcatgacagggcagtgcagaatctggtggatggcaaggcccagacctaccgggagaatgccatggagaacatgatgctgcgctttggaatcggttataacaccctgctcaacaccagcacaagtcatatcgcagaaatgatcatcaagggcagtaataacggtgtgctggagatggagaaggtgttggcacacaatgaagagtttgctggaagcccctgccgcagtctggcgaaggaactgatcgagatggagaatgccaacatccggactctgaaagaatatctatagcatacaaaacgaccgctttcggcaatttaacgtacatcataacgcacaaattgtatacttgcatacctttttgtgcaatttttatagaaaatggccaaaaacttttacgatttagtgaaataaagtttattgtacaattaaaaaagtcgttttataataaagcatatggcaaccaggttgtcatgaatctgtataccaattgaaggaggacattcaaatgtcatatgttgatgaagtatttgatttggtagtcgcaaagaatcctgcacagcccgagttccaccaggcagtcaaagaggttctggaatctcttcgcgtggtgatcgaggcaaacgaggaaaaatatcgtaaggatgctctgctggagagactggtaactcccgagagacagatcctgtttcgtgtaccctgggtggatgataagggtcaggtacaggtaaacaacggtttccgtgtacagttcaactccgcaatcggaccttacaagggaggcttacgtttacatccttccgttaacttaggtatcatcaagttccttggtttcgagcagattttcaagaactctctgaccggcttgcctatcggcggtggtaagggtggttccgattttgatcccaagggtaaatccgacagagagatcatggctttctgccagagcttcatcacagaactttacaaatatatcggagcagataccgatgttcctgcaggtgatatcggtaccggcgcaagagaaatcggttatatgtacggacagtacaagagactgaccggcctgtatgaaggtgttctgaccggtaagggcttaagctatggcggatccctggcaagaaccgaagcaaccggttatggcctgttgtatctgaccgaggagatgttaaagtgcaatggcaaggatatcgcaggcaagaccgtggctgtatccggtgccggtaacgtagcaatctacgctatccagaaagcagagcagttaggtgccaaggtagttacctgttccgattccaccggctggatttatgatcccgaaggaatcgatgtagcactgttgcaggaagtaaaggaagtaaagcgtgcaagactgaccgagtatgctgctgcaagacccagtgcacagtatcatgagaagaagaacggtgagcacggtgtatggactgttaagtgtgatgtagctcttccctgtgcaacccagaacgaactggatctggaggatgcaaagcagctggtagctaatggcgtattcgctgtagcagagggcgctaacatgcctaccaccatggaagctaccgagtacttccagaagaacggcgttctgctctgccccggcaaagcatccaatgcaggtggtgttgctacctccgctctggagatgagccagaacagtgagagactttcctggaccttcgaagaggttgatgcaaagctgaagaccatcatggttaatatcttccacaatctggatgatgcagccaagaagtacggcatggaaggtaactatgtagcaggtgctaacatcgcaggcttcttgaaggttgcagatgctatgactgcacagggtattgtataggaacatctgaaaacataaggtatatcatgagcaccggatcgaatgtgaaaacgtttgatccggtgatttttttatgcaaaaaatacccgcccctgtagctgcgtggagcagtggtacaggggcgggtattgttatttctatggtattctatggttcacatattattcttctgtctgcggctgcgctgcagcattacgggcattgatctcggcctgttgctggttgatcacagattcgtagtccggattggcaaagaaggttgcatcatgctgacactgacttctggtgttcggtgtgctgacagtctgcgtgccatccggattgttgatgatgacagtggagccctgttgtaatgcaggatcttctaccagaggcatggtggcaacaccggtgtacttgaacgggcagtcagggcttgcgggtaatccgtcgtaagcacagatctcgccctgatagtgtacatcgcagctttccgttggttccgtaccctcagcaaaatactctgtatatacacagccatcgcagagaccgggaatcgggagcttgccggactgggaacataccgctacctgtacaataccggagggaaccgggaactgggtgttaggcagatcctcgtgaacacgcttcataaccttacgccataaggtcttggagacaccgtcctcggcactgttcaggtcaacattgttgtcataaccggtccaggtagcagcggtgtagtaaggggtatatcccacgaaccaggcatcggtaggtccggtggtagtaccggtcttaccggcgatagccataccgccgaaatttacacggccaccggtaccggaggtaactacatcctgcatggcactggtcagcaggaaagcagtggtctccttgatgacctgtctggtagccggattggtgttgtccagaattacattgccatcggaatcggtgactctggtgtacagcttcggggtgacataagtaccgccgttggcaatagctgcgtaggcaccagtcagctcgtaaggagtaacaccgtaggtcagaccgcccagagccagggactggttcacgtcggacttgatctcgttgccgacctgcacaccgtcggtcagagtggtaaatccaaagttcagcagataatcataaccaagtctcggagtgatcaccgtgatgttcttaactgcgatgatattcaaggaatcacggatcgcacttcggatattctggatgccccggtaaccggtcttgtaccagttacggacgggagtaccgtcggcatagttaaacggtgcatcgttgtatacagtagccagggtcttgccggcactgtccagagcgggagcgtaggaggccactaccttgaaggtagatcccggcagacgcttggcactggtggcgcggttcagggttcggcggccctctttggcaccgcggccgccgatcatggctaccacatagccggtgttctgctcctcaatgaccatagcggactggggctgtggagtcatggaaatagtttcttcgtaattgtccgcattgtcttccacacccagctgcgccagcattgcggagcggtaagtgtctacagccgcataggcatcgtcctgggaagaaaagatcaggttgaattttgaattctggttctgcttgaaccaggtcatcatgttttctttactgaagttattcttggtaccgtcgggagagataatggtaagagcatagttcagataccattttacattctccgggtagttggaagcatctgcgtattcctcgttcagaatattctggatcttgggatctaacgtggattccacacgtaaaccgccggaggtcagcagtgtctctgccatggtttcattatagccggccaggatcagatcctgttttacctgttcatataccgcatcggagaagtaggaacctgtggtggcattggcctcctgataatcgatgtcgtacaggccgatccgctcgtacacagcatcggtatctgccatggcttcgtcgtattgcgcctgggtgatgaagccaagctccagcattttcgtcagacatttctcacgacgttttacattctcttccggatgacggatgggattgtatttagaaggattctgcgtgatactggcaatgaccgcacattcggaaatggtcagttcgctgcagtgtttaccgaagtaacgtaaggaggcggattccacacctagggtgttctgacccaggttgatggcattcatataacgcagcagaatctcgtccttggagtagtactttgtaatctccagtgccaggtactgctcctgaatcttacgtttgatttttttgatcttgttattaccctcggaggtccagtccgtaaagacggtattttttagaagctgctgggtaatggtactggcaccctgggcttcttcaccaccggtcttaaaaaactggtaaccggcacggataatactcttgaaatcaatcccgttatgctgatagaagcgttcatcctcaatggctacgaaagccttgcccatgtagtcgggaatctcgtccatgccgacggagagacggttggagttggtactgacgtactggtcgatctcgttgccctctctgtcatagacgatggtagcttcgccgactgccacgacatccgacagacggatcgtgggggtggaggagaggatgccgcggaaaacaccgataccggcggctacaccgcagatgccgatgcctacgacagctgccagcatgaccttgacacaggtcagagcgatttttcttccccatttttgtgatttagagttgagtgtcttctgcttcgcacggacacctttttttccataattcataaaacaagtcctttctgtctgagatacagacgaagacattataccaaataatgctatgtaaataaaggctttttagaattgtttcacattttggagaagttatgctacactggaaaagaaagcaaaagaaaataagaatttataaagcagaaaataagagaggtcatacatggacaacatgacagcaacaggcagctacagagtccttttgtccggtggggaaggtgagatcgtggagaaaaagtcccgttttattgctacgatccgcaagtgtgaaaccgaggaagaggcagtggcttttatagaagaaatgaagaaaaaatactgggatgccagacataactgttcggcatttataataggaagcagaggcgaactgacccggtgcagcgatgacggggaaccctccggaacggcggggcgtccgatgctggaagtattgaccggatccggtatccgcaatattgcggtggtagtgaccagatattttggtggcacgttactcggcaccggtggtctggtgcgggcctatacccaggcggtgaaggagggactggaccactgcgagaccggcattatgcggaagggctgcgaactggaagtgacaacagattataatgacgtgggcaaactgcagtactatttcggacagcagggcatcgttcctgcggacagcatctatgcggaaaacgtaaaatttattttacttgtcccggtggaaaaagaggatggtctcaggaaaaacctgacagaaaccacctgtggaaaggtaaaaattgagaaattgaaagaaacttatttcattgacaaagaatagtcataaagttaaaatattattaacaattcagaaccattaaatattgacggatattcgtcgaatgtttacattgtaagaatatatgtcaagagcaaaaggaaagcctcgtagaggcgattttgcgaatggggttctggatggatcctacagaaaggtggtggtttttatgaagtgtacacagaagagttctgacaacccacttccggggcgaagttactgcataagttacacccatagaaaacatcataaggaggatcatcatggaacagatcaaagaactggaagaagtcttagagcttcttaacaccaagcagtataccaaactgcgccagtatctggctgaactcaacgatgccgatattgcaggacttctggaagaactggaagaagaggatatgctcaaagtcttccgcattcttcccaaggacctggcggcagacgttttttcctatttagatatggacaatcagcagaagatcatcacctccctgtcagataaggaagcaacgaacatcatcaacaacctgatggcagacgatgcggctgacctgctggaagagatgcctgccaacattgtcaaaaaacttctgaccaacgcaagccctgaggtacgcagagacatcaatcatctgctgcgttatcccgaagattccgccggaagcatcatgacggtcgagtatgtagacctgaaggagaatctgacggtgaatcaggccatcgagcggatccgtaaggtaggcctcgacagtgagaccatcaatatctgctatgtgctggatgcccagagaagactggtgggaaccgtggccctgcgttatctgctgctcatggacggtgacgagatcatcggtgacatcatgcatgaaaatgtcatctccatcaataccctgatggaccaggaggaagttgccagacagttcaaaaaatacgactttacagccatgccggtagtggacaatgagaaccggctggtaggtattatcaccgtggacgatatcgtggatatcatcgaagaagagaccacggaggatatggaaaaaatggcggctatcgtgcccagcgataagccctatatgaagacgggagtattcgagacctttaaaaagcgtattccctggctgttacttttaatggtatccgcaacctttaccggtgccatcatttcctcctttgaggatgctctgagtgtctgtgcggtactggtggcttatatccctatgttgatggacaccggtggtaatgccggaagccaggccagtgttacagtcatccgtggactgtctctgaatgagatcgaataccgggatgtgcccaaggttattttcaaggaaatccgggtggctctgatgtgcggcattacgctgtctgcggcaaactttgtaaaacttctgatactggacagggtaggagtgctggtggcagcttccgtgtgcctgacattggtagctgcagtagtgatcgccatgatcatcggatgtctgctgccggttctggcaaagcgtctgggcttcgacccggcggttatggccagcccgtttatcactaccattgtggatgcattgtccctgctggtatacttccgtgtggcatccgctatcatgggactatagatatcagacaatattcgaatgatttaaatatgtgaaattgtggataagccatgcacccgcgaaagaagcatttttgtggagcatggcttattttatacactgttattatgataaaaatttgacaggatgtttttttttcagtactttccgacaagccctttgcaaggacggaaatttttgctagaatcaagataaatagcaaatgtaaccgctttcgtaaatatctttcttaagagaatactcgggaacagcaaaagcaacggaggaataagtcatgagatatttttttgaatctaaagtagaaaaaaaggatgccggatataccatccagatccctttcaatgtatgggaagtatgtaagcagagagaagtcatcaaaggagacattgttctggacaacaacatcatcgagtgtgaacttcatcccaaggaaaagggcaattacgagatcgttatcaccgatgagaatgctgtaaaggtagagcttggtgtagcacataagattctgctgcatgtcaatggttccctgatccgcatggaccagaacagcccttacagtttcgagaagcccatccgtaagatcgacagcatgaatgtgatcatccagcccgaagacggtctgtgcggtcaggcatgtgtggcaatgttagctggtgttaccattgcagaagttatcagcgttatggactgcagagagtggcaggctaccatgggccgcgtgatctctgcactgaactattacggcattgaccataccgatatcatcgtatataccgagggcagacccgctgtactgcctaagtgctgcatcatgatggagaagatgggacgcttctgccactatctggtacattacgatggcaagttctacgattccaatctgggcgtaatggaagagtatgatatgagcaagctgttaggttacc

SEQ ID NO: 5613 - DNA, 31009 bp, Unknown
  gut microbiota DNA sequence
cagagtcacctcgaaaatagagttccatacccggggcatcttgaaatagatgctgaccagatgctccccgcttgcctcattccggtcaaaatccaacttgaatttcaggataaatccgttgctctttcgctctacttcgaactgcgcttcgtcgtcattatctccgctgttgtcaattcgcaaaatcggcatgaacaggtcattgatcacatcccgtatcttatccgcgggaatactgttgatgaagtccacagcttccggttccaccaccagatcctcattgaaaatgctcttggtgaaatccgcatcctgtccggtctccagcaaaccaccgtccagactctttttatcataggcgaaaccgagtctgatcacatcgcccgtgtagttctcgtctgttcctcccagacactttacgctgaacttcaattcctcatcgatcaggtaatactttccgtctgtggctccggggaatccggcttttacatattcctctgtcagattcggctccagattgatcgtgtaatcgaacattttccggatcctggcgcctcttgccctgtcaaaatatttctccatattggtagaaagcatatccaccgcatcttcatcctttatcatggaggtaatggtggatttcaggaaagtctttttatcttcatcgctgaaggaatccaggatctccggctcccccatcagcgtcttggtgatctgctgggaggtctctctggcgtaggcatcctgggtcagcttgttattcagtatatcgaataacagaaatgccgccagcacaccgatgagatttcccacgatattgtcgatcaggtcatccagcgtgtaaccgttcttcagtgccagatacgtatatcccacaaacaccagcaacagtgcgatcagcaccagtaccatagtggcggacagcgtatccatcacactttttttcttcttttgtttctgattatccatgaatttcctccctcgtaaatacgccctcatagatggccggctgtttcctgtaatatgcccagaaccggtcaccgtagtcataatgccaccattccgacggcagattggtaaatcccgcatctatcatagcataataaagcagacggcgattttcacggacctgctcgtcctctgccccctgtacatgctccggtgcctcaaaatacgctgcacaggtcttatccgtaaaagcatcgaatccacatcccataggaagctctctgccctccggatccagaagcgtcagatcaatggctcctccggtggtatgggcgggaggcacctttgtatccggtaccgggtccgagacaaatttgcagatcgcagctctcctttttgcctccggcagctcttctaaatgaaaatcccggatgatgtccacagaatacttttcaaacaattcatgctgcagcgcaaaggggcgccaggcatcccagatgcggaaccggtaaccatccggcagattccccgccgccttcaccaatttctcatacatctccttacggacgaagcacttctcttccgcatggtccatatgcaggatcggatacagcattttcacatcccacagatcacaacttttcaattctataaacgcggaatccacaaacgcactgtctatatagcgctccggatccccgatcaccggtatcggcctcatgggatcagcctccttattatttatatttatcataataccccttttccaataaatatggcaagtgtctggtgcatcaaaaaagagactgcatatcaaaatagcagtctcttttttatgttcgtttacagattttcaccgttcgattcaatcacctcgcggtaccagtatgcggagtccttaaggatcctcttttgagtggtgtaatccacatagattagtccgaatctctccgtataaccgttgttccactccatgttatcgatagctgaccaggcaaaataaccccagatatcagttccctcctctgccgcttttttcagacagcttaaatagcggtgcataaagtcgattcgcataggatcatgaaccttaccgtccaggaatacccagtcgggacaggacagtccgttctccgtaattacgatgggaagtttgtatttttcctgcaggaacttcggtacataatacagactctccggtgtcacctgccacttcattgcagtcaccggtgctccgcagggattcttcgcctcgcgatatcccccctgaccatccgattccactcgtccgctctggtagacattgattcccaggaaatccaacggttccgagatcagtttcaggtcttccggattccgtaactcctccgggcaattctcgccataggcttccatgcctttctccggataatgtcctaaaatgacgggatccagccaccaggagactgcccacaggtccttcgtatcttcccgcagggtggcaattcttgctgctttcacatcctcaggttggttgcttacaggcaccgaacttccgaagcagaatgccacaccgatctcgggctttttcttcgcgtattttcggatgacctgcaccgctctgccgtgggctttcaggtgattatggattgccagcagatactccggctcggtgagccgtaacttcggagcacagcttccctgcacgtgtccgataatcagatggcactggggctcatttaacgtcatccagtgggacactctgtcggagagtctgtccacgattaccttcgtatattctgcaaaccactcggggctctcgggattctgccatcccccgcgaatctgtaattgctggggaaaatcccagtgaaataaagtaacccagggttcaatttccgcctctagcaaagcatccaccaaatcactgtaaaactgcagtcctttttcattcacccgtcccgtaccgtctggcaatactctggaccagctgatggaaaagcggaatgctttcagtcccatattcttcattctctgaatgtcttcctcataatgatggtaaaaatcacaagacacatcacctgtctctccgtctaaaatattctgttttccttctgggttcttacgcgtgtcatggcaatgcacatcccaaacggattctcctctgccgtcctcataagcggctccttcaatctggtaagctgctgttgccgcgccccaaacaaaatctttgcgaaagctcattccgtttcctccttatttatccttttactgctccgatgacaatacctttgacaaagtacttctggaagaatgggtagacacacatgataggcagtgctcccataaccgccactgccatacgaatggaaatggagggcatcttcatggtacttgctccggctgcggaagccttttttatcatctcaatatcatccatcatcttcttcagcaatacctgaatactgtacagattatcccggttcacatagtacagaccattcagccagtcattccagtaagacagtccgatcagcagtaccaacgtcacgataatgggttttgacataggaagcactactttagtgaggatgtagagttctccgccaccgtcgatccttgccgcttcgaggacttcctccgggatgtttgtcgtaaagtatgtacgcatcataatgacattaaatgcgtttaacaacaaaccgggaacgatcagagcaaatatcgtatttttaatatggaacatctgtgtccacatcatgtagccaggcactagtccaccgttgaacaacatggtaaagaaaatataaaaggcaaaaatatttcttcctggcagattttttctggacaacgggtaagcgtataaagtagtcagcatcaggctcgtcagtgttcccacaattgtcacgaaaaaggatattgcgtagcctctgacaatggaggtactgtccatcagcaaatatttataggcggacaggtcgatctccgtgggccagaaccggtagcctgtcttcaccagtgctgtctctgaagtgatggaagaactgagcaacagtataaacggcatgacacacatcagagacaatataattaatacggtattgatcacgacctggtatttggtatcttttataaccataatctcatctccttaaaacagtgcattttcacggctgaccttgcggacgatcatattggcggtcagtaccagaatgaatccaacgatggactgatagaagcctgctgccgccgacatacccacgttgttcagtgttgttagtccacgatatacataagtgtcgatcgtattagtcacatcgatcaaggctccgctgttcatgggtacctgataaaacaggccgaagtctgaatagaaaatacgtccgatggacatcagcaccagcgtgatgattgtgggtttcagactggatagtgtcacatatctgacctgctgccatctggtagctccgtcaatcaccgccgcttcataataggtcttgtcgattcccaccaccgttgcgaaatagatgatgctgctgtagccgaaatttttccatagatagacaaatgtaataataaaaggccaatactttggctgtgaataccaggcgataccattcttgcccaaaggctccaaaatagagttattaatgaatccgttctgtgtatttaaaaagccatatacaatatagctgacgatgactgtggagatcagataagggatcagaatcagcgtctgatatatttttttcttcgtcttggatctcacgtcatttaacagaactgctaccgtaatggccaagatattccccaggataataaatactgcattatataataatgtgtttctggtaatattcagtgcatcttttgtggcaaatagataagtaaagttgtcaagtccgatcttcgggctcttaaacattcccagtttgtaatcatatttttcaaatgccatgattagtcccgccatggggatatagttgttgataaaaatgtatacaacaccggggatcaacatgagatataaaggaagataacgtctccattttacgaaagtactcttcttattcatgagtattacctgttcctttcttttgaaagaggtcccactaaagaactggcgggacctcttttggcttcaaagcttatattttaggtttggacgattatttttatgatttgtagtgctttagttctgctctgcaagccatgcatccagctgtgcctgttttgcttcaatgatggtgttgatgcctgctgcttccagttcctgattcatctgggggatagctgtctcaggatccagacatccggtcagcagacctgcacgatatttctctactacgttgttgcatgcggttacttcattcagtactccggagttatcccatacaaatccttttgcaggagaggactgtgcgtttttgttgaactcacccagctgttcccatacatcgggctcatcaccttcccatacataggtaatctgttcattaggccaagcccaacctacggaagagtatgaagtattggaagaatccacaccttctggataggtgatcacacccttgctctcatctgcaaatacccagttgtcgccttcgataccgttgactaacaggttggatacttcggggttggtgtacatcagattcagcatctgcattgctttttcggggttcttgctgttattagcaatacaccagcttgcatttaccatgcttgtggtagaatggggtgcaccgttctccatctgtactactacgatgtctttaccgcattttctggtctcttctgcttcaaatcctgccttgaaggaagtgaaagtaccaaaaccgacacctgagttgaagaattcctgatacccttctgtggtattgactgcatccggcatcatcagaccttcctgtgcccattggtatacccacttgcaatattccttgaaggaatctgtatcgtagaaattcactacctgggtactgtcggaaagtgcattttccagtacgcccagatcatcgctcagcacgtcacatgcccatgccggatagatcattgttccgccgttgggaaccaggggatacatatccggatatgcttcttttacttttctcaggttggcatccagatcttcgtaggtccagggagtggagtagtcgattcccagttcatccgcaatggattttaccatttcaaaaccacggccctgtgccttatccttattcattggcactccgtagatacttccggatacggtagaacaccgccagtcatcctcggagataccggacaatacatccggtgcatattctgctaacaggtcgtccagtgcaatgatctggttcgtagctgccatggtggacattgatacctgccaaggcattgcaaagaacagatccaggtcttctccggaagccagtgccagattcagttgctctgagcttacgccggtcagaaggtttacttttacgccaatggcgggctctgtgatctcgcttaccgctgctgcaaccttttccgcagcctccgtggtggaattgttgtacgcataaatggtaatggtggtcacatcgtcatttgacgctgctacctgtgtgcttcctgccgcactgtctgtgcctgcgctctgtgaagcgttgttatctgcggcagatccgcatcctgcaagagtcgttactgccatcgcggtagcaaatcctgttgccaataactttttcattttcataaatttcctctcctttcgtaggtcttcgttgatgatgaattcattataaaaaaatcccacgatcgtatctatctgttaaaaatgttgtttgtgtcaaaaaaatatgtttttttactttccgccttccagaatatcaaaaatgtcacattctattgtaaaaaatgtgacattttgaaaaactattcggttgtgtgcccagtctcttcccgatcctccgtaggtgagaccccgttgatcttcttatagctctgggaaaaatgggaaaagttggtatatcccactttcatggcgatcacactgatgggtaacgccgtctcccggaccatgttccgggcaagcgtcattttctctgagataatatattcttttaatgacattcccgttttgtttttaaacaacgcagaaatataattggcattcaggtgcaccgcatcggcaatatcatccctcttgatatcctcatccatgtggctgcggatgtattggaatatctcatcgatctgagtctccttccccgactccgtattccgcagttcatgtagtctcgccgttacatattttaccagccataacgtatcttccgtgtatgtataggcggacatgacacgctgcatggtctcttcctccggaaacaactgctccatatccatatttaatttctggagtaccagatagatcacacccatgatcttctggtaaaaccgcattagatttttggaattcagctgatcctccgccgccagtctctgtaaggtatccgaagcatcctttaccacggtatcgtacagttcattttccagaagttgtacccagttcccgcagtagtgttcctcggcttcccgttccttctgcttactctcctgcacattgtagattccttctttgcgtcccacattgttctggtcggcttttttcagggcccgcactagctcccggaccgcctgccgattctccaatgcgccgtaatatatggcaaagccacaatcgaaaaatttctgaaacatgatctgaaaacgctccatctgatgatacatggattcttcattcaactctgccgcactgtcagtgcacagaagcacataatagattcccttttcctgctgacaaaggagtgctttccatgcgtaagggtagaacagttcctccagcacattggagatcgtatcatataacaacgtctgatcccagttctccagtccctttccccaacgaaccacatccatcaggcacagtctggaattttccgccacacggatccccatttctccaaggttccgcattgctatttccacgtcatccttctcctccgagaacagatccgctaacattgcccccaggacaaatccctttttgttcttcagcagctgtccgtagcgggagtcctcgttgacccgctgtttcatccggatcttctccaccgctcttccgacggcatcctcgatctcttcatatctcgctggctgtaaaatatagtcaaagctccccagcgccacggcctccttggcatacaggaagtccgcatgtgccgtcagaaaaatggtctccacatccatttcctgctttctgcaccaagccaacaggctcagcccgttttccaccggcatttcaatgtcgcacagcatgatatccacctgcttctccagcagtacctgttttgcttcataggcattatatgccttgtatacctgcgaaatccccagacggtcccaatgcaccccaaacatgacaccgcttaccacattgatctggtcatctactattaatacattcatcttttccatagggtaaatacatctccacgcaagctccgttcgagttgctgtataatattgttgctttttcctcataacgtattttcatacgtttccagacattctgaataccgatccccgagctcttctcttccgcgaattctcccttgttcagaacatgcagcacatcttccgggaaaccgggaccgttgtccagaatcgtaatacacacatacgtatcctccggcgtctctccagggagtagcgatacccggatactgatgagcagtgttttttgggactgtacaccatatttcactgcattctccacgaaagtcagcaccgacaacggcaggatctgaaattcttccagtttttcgtccacggcgatgctgtaattcaccggtacggacaatcccagctgtgacagtttcaggtaggattccacgctctccatctctttccggacactgatggtatcttcctcataagcgatcacttttctgagataagaagacagcgccagagtcagttcctgaatggagcggtattccttctgctccgccagcgcatagaaattcttcaggcagttcaggaaaaagtgtgggcggatctgaatctgtaaatactgaatcgtagcattctgaatcctgcgctcctgctcataggcatcgatcttcagcttctggatctgatccatcatgtgattaaaggtggtcgccatcaggcggaattcctccacatcgctgttttcctccgcatgagcgttcaggtcaccctcggcgatttcttccatagtagccttcagtccctctaagggtgctacgaagaaacggtacatataaaaatacaagatcgggatcagcagaataaaaataaagctgcaaaaaagcaggaaccactgcaaagctcccatataactccagaagcttccatagggactgatgtaatactgcagcaggtctccataaggcagctgctcatacaccacaaggtatcgttccattccttttcccgtaatgtaatagcccttggaattctgtttcagatcgatctgtttttcttccagcagattttcctgattcaacgcctgtccgtcctgcgttgcatagaccagataagacgtgcttcccccatcttccgcggagggcttcataaactggtcaaaatccatgaccgcaccgacatacacagaaccgtatttcagaatccggatcaggaaataatcatcccccaccggaatcacataccagtcattattcagttccccctgcttcatctcctcatatacggcccggcgtattctggactgtttggtctgctcatagcgagtacctgtggcatgcttgatccggaccagatcattactctccgaatagaattccaatgccaccagtccatccacatccgaagtcagatattttgtaaaatcttccagaatgctctgcccacacagataggcctgtaatgactccaacggataattgagtctccggaaatcatttcccaccatttccgaaatcatataagactcgaccgttttaatatctttctcataaaactgttcgtaaatatagccggtaccggctgcgctctgggcagcctgccggttcagcgctgtcatagaataaatattatatatgatcagcgtcaccgcaagaggcagtaccatagcgcatacggtcagcattaaacgttttcttactcttttcatttctttataattttatacttttatcttctcatcacggtctgaccggcgtgccatccggcagacggctgaacagccagccaaaattcacattttcgtttgcaggatatttttttgctaatttctcatcaaatccggttccgattccaggcgcaccgcttaaataagcgtaaccgttccggacttcgggacagccggggaatacttcccgctccgcatcctcaaagccggagaattcctgaataccaaaattaggcatcgcaagatccaagtgcatctgcgccgccattccgatcggcgacagatcattgggaccatgccatgcagtacgcacctgatatacatctgcaaaatgagccagtctgacagcaggagtgatgcctccgatatcacttaagtgtacccggataaagtcgatccactggttctgaatgatcgtccgccattccgtctggttagtgaacagttccccgattgccagcggtacacttgtctgttctctcaaatatctaagatattctccctgatctggtctcacgcaatcctccaggaagaacaatttgaatgcttccatctctctggcaaatgtcagagtatctgccagagatagtctctcatggacatcatgcatgatctccagattccatccgaattccgttcgaaccttgtccataagctctacaacgctctgcatatacagtctcgggttataataggcgccttccggtgcattttccggctttaccagcacctgtctgctgtcaaggttaccaccatagagccccatgtgacaacgaatatatcgatatccctcttccacataaccataaatacattctctgacttcttcccagttttttccgtcggcatgccggtacagggcaattccttctctgcattttcccccgagcagatcatagaccggcattcccgccagtttgcccttgatgtcccacaatgcctcatctactccggacatagcgttgttcaataccgcactgtttctccaataggagctgcccatcatagactgccagatttcctggatgttctgtacgttttttcccacaaacagaggcttcagatactcctccactgcggttaccaccgctttgtgtctccacgtaaaagtggcacagccatagccgtacagctccggctccgatgtttctaccttcacaaccaccaggttgatccccctgggggcggtgacaaaagttttcacatctctgattacaatttcactcataaaattcctccttctgtatctttccgatacgaaatgattccttttataagctttgatgccaaatatcgtccagcatcagtttagcataagaccacacaaataacaaataaaatattcctatttgccattttctgaaaggcttgttaaaatcccatctttgacactttatagagccaaaaacagccatgccccccagtgtttatctgtggtatggctgttttggtttttgcatcgatatgtactatttttgaaattgtgctatttttttctgtttcgtttctttgataatcgcccgcatatctgcctttgagatgaattcgtaatccgttcggaacccgaaggctgtgtgcagggcgtctgtcagtttcgtgcgtttgtaggagggaatgtagccactgtctttggacagcagggttacattcatttcccggagggctttcaaaatttcgctgcaggtgaatccttctcccagtttcttttccagcagacggtaaaccagaaggctaatgtaacaggttataaagtgggcttttatactgtcttcccgccttacaaaaacaggtcttgcttcgaattctgttttcatgatccggaagttttcttcaatctcccagcggcgtttgttgatgttgataatctctcggacatcaccgtccaggtttgttacaacagcatagaaaccatcatacatggcctcttcacgaatgcgttcctcatccaactggtaaacctgcttctgtgcgatttcaccatcgttggtaactgctgttttttgaatgaaacgggaaggatcgtttggatttttcccttttctggctttatccggggactgcatgatcctgatggcgcgttcaatctgaccggcccggattctctgctggtatgctttgtatttcggagagtaggtgatgataacagtttcgtccatatctcccgtgacaatggggtattctttgtaataaacggtgttatatacttcggggtcggtttcatccagcgtggatatgtctatgaacttgtctgatcccggaaccttgaactgtgttggaaggagcgccagttcacgttcttcctttttcatttttttcagggaatacgtgatcacataagacctgtttccaaagctgttaaaaaagcggttgcccttactgccaagcccggcatcggagcagaagataaactcgctgcagttaaaatcccggatcactttcgtctccagaggcttcagggtaagctgctcgttctggtttccgggatataggtcaacggaaagggggatgccgtctgcatccatgaaaagtcccatggtcacgataggatttggtctgtgttccttgctttttccatactttttcatgccatcttccgcttcaatctcaaaataatagttggtgcagtcgtagtaaagaatttttgagttacgcggatggacaaagttggagttctggtaaagctcttcctgaatgtaatccgattcttctgcgagaacggaaagggaacggtaaagattctgcagggaatactttggcgcttccagaagggactggcagtaagagaaactgctgagcttgctggaaggggaaaggatccttgcatagatcagatccgtaaggatagcatggaaatcgtaagtaaacctgtgatggttacggatatttctgcagatgttgtcgagccgcagttcggtgcagagctgctgcaggaacagatagccgacgttgaagagccgctcttcgtccagtgggatacgggcaagcgcggaaaaggaaaccgtaactttttccctgcgttggttgtagagcagagtttttttcgcttcttttttcgcccagtccatcatggcggcttcgtttccggaaaaccgtgccagaagatcattgtattttccgagttttttgtagatgcgggaagaagttttaccgttgtctttgcagtaggactgtgtaatgtaaacatccttgttatctttactgcctgtaatattgatatacataagtgaacctcccagttaattctaactaactataaccagtacaaaaaagcacgtataaaatcataaaatttgacaaaaaaataagccataaatggcttaaataaaggatttacatcagaacgctaaaaaaaagaagtgtcaaactcccgataactatatcaaacattactaaacattacaacaacattacaattacatcataggtgaaaatttatttgcatttctgcctatgatacactaggataaggactttaaataatatatgacattatataaacattattacaacattactgaaacattattcactataatgacaggtacaagtcccattcgtatattaaatgcaaaaacagcatgcgagtgcctatttctcatagaaattttaacatttgccatttcccgcaaggcttgttaaaataaggatatgaaaaagaaaaatttatgtaaaacgttattaaaaaccatgtgtatcgtgctggggatcctcatcctcgcactgttggcttacatcgtctacctctatgccagttattacaggatcgaggacaatcaggaactggtggtggaggcaccggtcgacgataccaccacaggtgcggctgcggtgctggctacggatacggaatattccgcagtgacctacaacatcggtttcggtgcttatctgccggattatagcttcttcatggacggcggtacctcctcctgggcggagagccctgagaccgtacagtatgccataaacggtgcgggagagctggtgaagtcattagacccggattttgcactgatccaggagatcgatctggatgccaccagaagctatcatacggatgagtacgagatgctgcgcaacattctgccggaatatactactgtatttgcgcagaattatgattccgccttcctgttctatccgtttacacagccccacggcagcagcagggcaggactcggactgttctcgaaatatccggtgtcttccgccctgcgcagaagcttccccatatccacttccttcagcaagttcttcgatctggaccgttgctacagtgtctcccggatcccggtggacaacgggaaaaagctggtgatcttcaatctgcatatgtccgcttacggcaacagcgatgagatccgcaagggacagattgagatgctgtgcaatgatatggcaaaagaatacgaagccggcaattatgtgctctgcggcggcgactttaaccacgacctgaaggcttccgaagaggatgcggagagctgtgagtcctgggcatttccttttcccagaagtgatcttccagaacattttaccttctgtctggatctgttgaccgaagaggagcaggcagccctttggaacagcgcccgtaatgcagatatggaatatgttccgggtgttacttatactgtgacactggacggattcattatctccgacaatatcgagtgcctgtcctacgagaatgtaaacaccggctattcctactccgaccatgatcccgtgaaggtggagttcatgttaaaatagtgtcaagatttacaaagtctgttgacagtgcttgtccttttttgtagaatgagggcacagttaagagggagtagttcccggatggtttctgatagaatggtagcctggaatggtaatcgaatgatacaggcagctgtccggaatgataatcgtcatcacgtccgtcggaccggttattattgtaagcaacgagacttttatcgatcatttttgatgcggtaaaagtctctatttttatacttttttctaagaatacagacgcttgctgcaggaaaggacagcttatggaatacatattgttactcgtaggatttatacttctgatcaaaggtgcagactttttcgtggagggaagctcctccctggcggggatcctgaaggtccccagcgtcatcatcggactgaccatcgtggccatgggcaccagcgcgccggaggcttccgtcagcatcaatgctgccctggctggcagtaatgatatcgccatcagtaatgtcgtcggctcgaatatcttcaacgggctggtggtggtaggtatctgcgcattcctgcacagctttatgccccacggagagatcctgaagcgggatatgccgttaaatatcctggtaaccgtcgtattatgtctgatgtttttagatggcagcttaagccgcattgagggtgcagtcctgctgcttggcatgatcgtatatctgggatttatgatctattctgcccggaaaaacagagaagagggcgaacccggcaagatcctctctcttccccgcagccttttgtatattgccggaggtctcgctgccgttatcttcggtggggatctggtagtagataaagcctgcatcatagctacgaattttggtgtcagccagaatttcatcggactgaccattatcgccatcggcacctccctgcctgagctggtgacctccatcgttgccacgaaaaagggagacagcgggctggcgctgggcaatgccatcggctccaacctgttcaacatcctgtttatcctcggaatgtccgcggtgatcagccctctgcatgtcctcggagagtccgtcatcgacaccgtactgctccttggcagtgccattctgctcttcgtattcgcccgtaccggcagacgcatgacccgcagtgagggggctgcgtgcgtgcttctgtatgttgcatatacggcttacctcttcgtgaggtaacagtgcggctatagacgcacacaaaaagcgcacctgggggaggtgcgctttttcgtgctaatatcctcttccgccttgggaagaatttgcactttatacattattttccgttatacctgctttccaactctgcgaaaaaaactttgtaatctctaccttttccgctcaacatatcttgatagctatccattactttttggcgaactacattattatctactttgctatccgaatcgacaatatgtctgttcccttgagccaatacttccatagcctacatcctccttaccttaaaatcaaatccggtctaatatgttcaacggtattctcacacattccgattttattatatccgactcttcacgtttaatcaacatataatcactgaatgatagagtaaacttactgtcagttggagagtcgcagaagattccctgctatgaacttgcccagatcgttttctcatagtctacttctcccacagtgttttgtcaaatacctcccagacgctcccggattgcaagctttttccggatgtctatactcgggatggttgcctgcagcttttcgatgtataccctgtcattgtcatgactgtggagtaacagactcctcatgtatcccctgtttggacgcactgatatcccctcggttcccgttgcttcttcctgcttatggctccgccggtactttaccagttccaggatcttttcttctccgtaatccttcacatagcatctcagctgacacatcgcatccgctccggcttcgctccagcccatcggacgggaactcatccggtcggaatacatatgactcacatgaccttctgcactgcatccatagacattcttatcctgcattcttctcactgcgctatcccagttgttcagcaggtattcctcacagtcattcactgctttttcgttcggcgcacatttccggatagcttttatagtctttacaaactttttcttcttgcccttatacagagccttccacagccgtcctttggcttcccctgcctcatccagcatctggttggccgccttgttgatatatttcatcatgtggaacttatccagtaccggaactcccttttcaatatattccgcccctgctttgatccatgctcctccatctccactgatatacaccgcattcagataccggctctcgtagttcgtgtcgatgtattcctgcatccgttcaaacagatgtctgtttgcttctcctccgctgcaaagacctcccaggtagaagacgttcttcagttccttccgcccgtctttcttttcctgtccttcatacagatacaacagcttcccgatcatgctgcccttcttctctgttccgtttttctcctgcttgtgaatgtgatcctcgtctgcctcaacataaaggtattccacacactttttcttctccggcttcgggaagggcagttctgtctggattccgtgtaccttatccatgacggcagtcttgctgatcaacgaatcttctcccagtaccctggcagcactggcatagctggtctttaccgcttcggccagcacctcagcttccgcacggctgctcagtctttcatgggcatccagttccatccattcatccagaagataatggcaggttccatccttacggcttcggaacagcgtgtgggtaaagcaaaccggccccactgtagtcagcagctggcgttcatcatgcctctggatggtatatttttcagctctggaaatatcctcacacaacatacgatccatgtcgctgtaaagggctgccatgtgctctgctgcagccttccttgcagcctccgcaagctgcttctcgtacagttccatgtccttcatcccggatgagagaaaaagtttatctgcttcttccaaatccttgtacagcttttccattgaatatgctataatgtttttcatgagagtgcctccatcgtctgtattttagattctcgtcaaatccattataacagagatgttggtactctctttttttcttttattcaactgacaaaaactttaccctatatcactgaattcagatctcatgtaatacaaaagagcactcccgcatgggaatgctcttcattatttgtggcagatatctctccactggcagtcgccacagatgaccttgccatatcccggctgcagaatcttctcttccacaatccgctcaaattccgcaaaagtcatttcctgccctgcctttaatccggtgtatttcaatacacccgcatcataccggtctaccttctccgcagactcgcagctgccacccttattatgggggcaggcgctgcagatctcatccgtcgctccgaccagctgcagggatgccggtccgtttttccccagaagccattccttcacctccgccatatgcttagtgaacccttcactgtatcccttcccttcgaaaaaatacaggcacatgccgtggtgcggacggatccggtaagttgttgttacttccatatccggtgtatcctttattcctgtccgttcagcttcagagccttagacagtctcttgctcagtgtcagtgccagtgcgatcttcaccagatccggaatgatgaaaggaattacacaccagcccagtacggtagccagaccgacagctccggaattctgcgcatatacaaccatgaaccacaccgttccgatagcatagcacacgatcagacccagtaccatggagatacccagcacccatgtcttacgtccgaacagcttctcgatcagccacatcagcagtgcagagaataaaaatccgataatgtaaccgccggtgttgcccagtaactgaccgataccaccggagaaaccggcaaatacgggaattcctactgcacccagtaaaatatagatcaataccgcaaggcttcctctcttaccgcccagtacgccgactgccaggaataccgcaaaagtctgtaacgtaaaaggaaccgtcatcgggatggagatccaggagcagatcgcgatcagaaccgcaaataccgcaatgtacaccatgtcataagtcttgctacgagttgttgtctgtgttgtcataataaaaaaccatgcctttctgtcagatgtcttttgtaaaaacctctgttagaatagcatggtgtttttcaattgtcaacctttttataatatggttaacaatcgagtagattctctggtcaggactgcttcatcgccttcttattccggtacatatcctcatctgcacgctcacgcaccttctccggatccgtatcatccgccgtgaatacagcatacccataggcaattcccacaggaacgggaatgatgttcttatgattcaagatctctacatcctgatcgatcttatgcatcacacgttctatcttaaaatatcttcccttcggaatgatacagcagaattcatctccgccaatgcgataacatttcccatagcgttcaaaattgtcctctatgatatgtgccgcgttgataatatactcatcccctaccctatggccatattgatcgttacactgcttaagattattcaggtcaaaggtcactatgacatacccttcaaaatccttctcatttttcacaaaataatcataagcatttcgattgtacatgccggtcatggaatcattcagggcaaactgttccagctcctccaccctgcgaccttttttcagccgggcaaccgtctgtctggcggattctattcccagcaccacaataaagatcaagaaagagattctgccaaagacacctacatcattgctggttttataataaccactcacatctacaatggtagcaaaaaatacaagcagcagtgcccctacacatgccttcagcctctgatccagctgccttctggcaattttgctacagatgaccaccagcaggtatagaatcatcagaataatcaacgcatgcgtcatccacaggcttctccggaactcatatatctctgttgcattcagtatatgcgtcaggacgatcaatgccagattagcattacagataattctacaaaaccggtcatccctgatctccagaaagctcttcacaaacaggataaaggacatcggcaacagcatgagcgtagcaaatgccagataagagcatccctgcctgttggtcaggagcagcgttgccacatccgtctcattggccgaccatgttcccagcaggatcgaaaaaatacccagatacaataaggttccgtcgatccggcttccgcagcggataacgatccaataaatactaatatacaatcctaccagtatcaccatcatgctgacgagaaaggcaggcattgcccggcgcatcacccaacgatagctattatagccgccaccgatataaaacgtcttctgctagcctgccgtttccggataacaaggggtgaactgtacctgcaagctgctcacattacttgaaaacctgacaatattccaggtccagcccggagtatttccccatatgccgggtacagcattcagctgatagatcagcttcccatctgcatacaccacaatctcctgatgtgtcgaataaaacacgatcgagttcgtctcatcatcgttttgatccaatataaaatcgtacagctccctgccgtcatccaagacgctgactgcgtccggcgtacactcctgtaatgactttacctccggcacactgtctgaggtgcagatcatgcacagaagcaccatagcaaatacgactgatacaattataataagctttccctgttccttctccattacttccctcaatatccaacgtgttgtttggtactatagtactagtttccttatcatttgtcaacgcaatgtcgtatctatctcacgtttgaaaatattataattctgctcatccctgggggaacaataaatggccagttctatggttttaaaacattttctgtaacgagcgatcacattggaaaacgcagctgccacagcctccggatcattctcaaaagctccgcatccgaacgcccccagaatgaccacttcattgcctcccgccacggccacatccagaattctggtcagacgcttctcatgcaatgcctgctgctgtgctctcgtcatcttcacggtcttattaccgtctccgggattcatcccattggccgggagcagacgcagattcggtgctgcacaggtgatcacattaacggagtaccagtctttttccggaagtggtgacggtgacgcagtatcggatttgaatacaatgactttcggcgtatagatgcagtcatcattgtggatcggatcctgcgcatatctgtgtggagaataaaagcctgcccacatttccttcgtattcagacaaaaatacagggtggaacaacggcacaggcattcctcctgggcagagcttcccttggtcacaccacctccgggattcgtcgctgatgcaaaattgtgaacacataccctttctcccggatacccggcagctgcctcatagcttcgcttcttcgacactatgatttccgcatccttctcatatctgtcacgattctgtgcaagctccggcatcaggtccgtgacttccatcatctccgggatcagcacctgctccgccacggaatgtttcactgcctcctgcagtccgggatctttctttaccctttcttctgtatcctgaaaaatttttacattctcatctcttgccatgattcgtttctccttctgtctgtcccggtaccggcaccgcattcacactttccttctgctccagcggcagtattgcatagtataccagcgtgtgcttgtcatccggctgacagtcccggtgataatggccgaaataccaatgcctgtaatgcagcttctgttccaaagtctccagatagtccgtcagcagatccggggcacaggagcgttccgtcccggcattgatccggtcctgcaacgtgctggcacagcagtgtgtgatcacataatctacctcgtagtgatatcgttccagattgcgcaggccctcctgcaattctccctctgtcggcagctcctggggccaccagctttcccgccatgccattcttccagcggatattccccgatcatatcatagttttcatggtttccctgtacccacagaatggtgtaaggtttctccgcaaaatttttacaatgatactcaaaagttttatccttcgcccagcacagtccaaaatctccgcagataatgatgtaatcttctattgtcagttccataccggttctccgtaatcttttcgcggaaaatcttgtgaaatccccgtgggtatctcccgttatgtaaatcatactgttctccctgtgcaccttctcttccattccgcactatgcgacatttccccagatatgactagaagagggcaccaggtcctcttctaccaaaagctccatcgggcttacacgatacaaaatagctaaagcaatcaaattgtcggcctgaggaaagcactttccggcttcccatttatacacggcctgcgtggattcaaagcccatgtattccatgacctgcttcacggagatcttccgctcctgacggattgctctcatccgtgcgccgctggccacaatgtcaaaatgcggtctttccatcatacgcctccttccgatgccgtacagcatccagttgcatatcagtctttccgtagacttttactataacacaaagaatctcttttgcctattaaccgttggttaaattatcacaaaatttcctaccagtactgttctccccagtatctggccagaatcctctccatgttggctctccccaccgggttggccgtatggatctccaccggataaaaggtctcacgttctgccagccagtccagcagccggatggcatcgccgccctgatccgcataatctcccagatcatgatccagatccagagcctctatttcgatcccattgtgctccgcttccgggatcaactgttttgcctcgtttaccgatcttgcaccttcgtacccgtagggcaccgggcgaaggtcatccagccatagtttcatagtcctctctcccacatcatttccaggttatcttccgttccgggcaacactgcgcgtatcctgtccggtaacaatatcacgcgtttcccgcactgagggcataccgccgtatggaatgtctctccggtctctacagaccggtattttttgatcgtcggtccctcttcgacatccatccacatgaaacgatggctgcaggaaggacaaatcacttcacatacctacatttttgttcctcatcctatgggctctcttgctctctccttgctgtaggataatattagcatactgcatggaaagaaatactgtttcaggtaaagtttacaggagttattctatcatcccctgctttttcaaccgggcccgtatggcaccataggtcctgtcatgctgtcttgcaatttctgctattttcatcccgaaaccaaattcccgcttaagttcctcgtcttccgcagcatcccaggtgcggctggctccctccggtctattgtgggctcggttatattctgtgcgatcgaaggtacctttctgcgattctgcttctggtaatcctgcagcctcttctgccgtctcacagatctccatgtctccttgtttctcccggtattccctgattgctgtaagaaaacgctgtccatatttctcatattttgcctgtcccacaccggatacgtccaacatggttccgcggtcttcgggcaattttacacacatatctattaacgttttatcactgaatataatgtagggaggcactgcctcttctctcgcgatctcaagccgtagtccccgcagaagttcaaacaattcaaaaccctccccggtaagcatatctgtgtttctacgtctgctgcctctctgctgtctacgggaaggttctttttcctcatacattttcaccaaaattgtggcattttcaagctctgctaaggtcttgttgccgattttcaggacactgtactggtcgtctgtctgatataaatatccctccacgatcatctgatggatcagcgacttgatttctttttcgcccagatctttaagacttccgtaagatttgtaatgtatcgtccccagttctttcagccgtgccctgttcgctcccaacagtgtcccgacgactaccgcctgcccgtatcttcccttcgtctcgctgacgcaatcgagtaccgcctttgcctccgcagtcatatccacctcgtgatactctctatggcagtttccacagttatcacagggggacgtcaccttttctccgaagtaggtgagaatataatttctaaaacaggaagtggtctggcaatatccctccatgatctgaaggcgtctggcatccctctgccggatcggctcgatatcctccggtggaacttccgagaaatccttatgttccaacagaaacttatcgatcataacatccctggccgagaacagcaaaatgcattgaggaggctccccatctcttccggcacgcccggcctcctgatagtaattctccatactctggggcatattgtagtgaatgacatatcggacattggatttatcgattcccataccaaaggcattcgtggccacgatcaccggaagtctgtcatagataaaatcctcctgacttttcttccttgcctctgtgtccattcccgcatggtattttgctaccggaacccctctcttccacagaagttcatacacttcgtccacattctttcttgtggcacaatagatgatcccactctcctccgcatgcttttccacatattctatgataaaattatctttcttccgaatactttcgaccctgtaatacaggttttccctgtcaaatcccgtcacaacgatctccgggttctgcagtcctaagacacagacaatatcctccttgacttcttccgtagccgtagctgtaaatgcactgaggatcggccggggctccagtctgttcacaaagtcaactatcttcagatagcttgggcggaaatcctgtccccattgggaaatacaatgagcttcatccaccgtgaccatggaaatctctgctcttgctgcaaactgcccaaactcccatgtttccaatcgctccggtgccacgtagacaatcttatatgccccttgtgccgcataattcaatgccttggaaatctgcgattccgtaagggaggaattgatatatgcagcccggattcctgccgcattcaatgcttttacctgatcctgcatcaacgagatcagcggggagaccacaatcgtaatccccggcagcatcaatgccggcagctggtaacagatggacttgcccgcaccggtgggcataatcgccagagcatcccgcccactcaggatcgtattcacaatgcgctcctgcccttcccggaaggacgcatagccaaagtatttttttaaggtctctaatgtatttttattcattaaacctctcaatcattttctatttccgtatcggataaatagtcccgcaatcgttcatgcacacattcctgaatctttgctgccgtttttcttgcctttgccattccaatgcctatctttttcgctaccgaaagaagatcctccattccaggatctacaccatttccatttactgttgttgcatgctctccaccaatagaattggaatacgtgagatcatatgctggagaaagtatccatcgcttctccctatccctgtatatataggaaaaattcttggaatgatcatctctgttatgtgcgaaaacattgaaacacataagacggtaaagtttctcgcactcctccatggatttcgtaagctgaagagttagtttcataagaatatcatagtccagattgggaattctgtgagacgtctcaagaattgccgctgccgaaaggaagagaaaatgggctgatcgagaatccctcctgtaaccattcatcactatacgcaaacgccgcaagccggttttgatataatgccattgttccgaccttccggtcatgataatatacatccagcttattcagtctgtccatgaagtatctcctctatggaatcaaatggtacctcctcaaataaagcttccagctctccctccactccaagagctattgcaagttttgtaaaagactgcagtgaaatctctccggtctgctcaaaacgcttcaacgatccgagacttacacctgatctgaccgcaaattccttttgggaaattttctttctctttcgaagctgtactattcgctttgcaagttccatatttatttctgcccatgttttttgatataaattaaccatgctaatattttatccattttccatcaaaatagcaagaaatagataaaatattatcccttttatataacgattccgttgcagtgatctacttcatgctggatgatctgggctgtccagccggtgtatttgccatgctgtttcctgaaattgctatccaggtaatccacttcaatctcttcgtatctcgtgcagggtctcacaccttccagtgacagacatccttcctctgtctggtacggacgcagctttttcgtgatcaccggattgatcatggcaaactgaaacgggcctgctgccactgcaataatatttttccgaacccctatcatatttgccgccattccgacacaatgatccagattcgctctcagagtatccagcagatctgtcactacctgtgcgtccgcctccatggcattctcggatttctgtgcaagaaacatcgggtctctcataattgttctaatcatcgtcatattccttcacgtttcctcagttccagcccttccatacctccgggcagtaaccaatcgtagactgttttccgtttctgacaatcggtgtgcggatcaccgatggattctccaacacctttgccagcttgtcctcttccgcaatgtacttaataagcgccaaggtgtcctgatccttcccttcccagttgaccatgttctccaggccgccgttcgcctgcgcaacggaagtaaactctcccttgctcatgcctttttccttcatgtcgatgaattggtatttgatgccgcgctccttgaaaaaacgctcggccttctttgtatcgttgcacttttttgtgccaaaaatctggatgttcatttgaatctcctgctatcttattccatacttctcctgcattgcattcattacttccggatcatctaatgttgcaatcttgtctgcgtcccctccggcatggtgatcttttcctttttgttccagtattgagctgcctgttcaaattgttcgtgggtcataatgccatctccatactcctgaaattcacacttttattccagaaaaacttaataaaaacctgttctgtatattcttttaaacttttgcgtcaagtcttcgccttccgtctcgaaagcatgccttacggccttattatataccagtttccccgtttcgacatcatattttcggattctgctgttatatacgaagaccagccgattgcccctcaataatattttttgcaagcgtttggtaatcactccctgatgtggaataggttccaattcccctctatattgccactctccgttggcgaaccgaaataaaaataccccggccctcagtcctcttgccaccaaaactaacaccataccgctgcagtcaaaaacagccccgctcatgtatgtcaaaaacattctggaacagctgcaactgtttgctgttctatcaataatattgaccttcctgccctcgcggacaacctgccactttccatcctcagaggaagccagtaccttccgatgcttaacatttgccttgggcttttcccccttattatccgccaataatgttacaggaatcgtatccgtccgaaaaatcatgacttgatctttatttatcccaaaggtattgataaaagtctgtacccgctccagatctccggttccataacagccaaagaaccattgcatccggttcctgtctttattacactttatgatctctgcaaaataatcccagtccaccggatacagcgaatgccctatggtgactatctgccggatatccgctaatccatcaaaaaaaggctgattgctctgaatgatctccttacattttttcgtcaatgtatcatcagcctccacgaccatctgcaaagcgatctgctgcacatcgtataatagctgggcatgctcatccagattatcgactgcagagtaatcatcttcaaattcataggccgcatcattagctcccggaatatgccccagaatcaacctttgccgtccccttccggtcttcttccgacagccatggatatagcaaatattcccggcatccgcgccatacaaatcttccacgaattccgtataattaaaatttaatactttcccgtctttgatcacattgcataacggtctgtcattcgtattggtatgcagactgccgatccatttacggaaccggtccattaattccgttgacatggaaataatcggctccaccaccatttctgcggacatatagatctcggccgcacctgcatcctcatcgtatgccccatttatgtccagaaaattatctatgatatacggctgacacatagcctctatgttgattttccccaatgccccttcaaaatccgcccacaggtcatcggttttcagatatttttccagataaaaccggaccgtacttctttttcccagagtcctgctgaaatcgtaatagctggatctgacgccatgtagcatatcaaatccgttgccaatcacataaagagaaccctccttaacagattcccccatctcttccagagataacagattccattctttcagattctcttcaaaattttgactgctttgaaattcttcgttggtcatatataattcttcttatcctcaagacatacagcttttgatcttatcaatcagtgtcacatccgccggaagccactgtacggaatccagttcttccttcgtcagccacctggcggcttccgcctcaaaaaaagtaaatgtcaaattttacgccttgactaactttttatgagtaagcgccaaatattcccgcggctagcccagaaccacctctaaatccataattatagttagactatttcactacaacaactacaattatggaggacaacatcatggcaaatatccgtaaaccccgtgttcccaaagaggaacagctgaaacttatcaatgaatgccgctccagcggcatgacagatatcgactggtgtcgtgagcacggcatcgctgtcagcaccttttattactggataaaacagcttcgcaaggaatcagctcagatcccggaaccagcttatggtcattctgagaatccccgtcccagactggatgtggttcccattgatatcataccggaacacttttcgctgcaatacaacgatccgttccctgatacttaccatactttagagataattcttggctctgctacgatccgggtctctgataagacggatccggaactgctgtcccgaaccctgcagatcctgaaggcagttgtatgttaggcgatatctccggactggaacggatctacattgtctgcggctataccgatatgcgcaaatccattgacggcctctgtgccgtggtggaagatcagctgaaactggatccggcatccagtgcgctgtttctgttctgcggcaggcgcagagaccggatcaaagccctgttccgtgatgctgacggttttgtactgatctataaaaagctgacggtacatggaggataccagtggccaaggaaacagtccgaagtcagaaatctgacctggagagagtttgactggctcatgtccggtatcgatatcgaccagccaaaggctctgaaaccggaataaaaacatgcacagaaaaatgcctgtaaacagcatattttcagcatttttcaggggtgattatcctttaggaaaactgctttttctggtataataaaggtatcagaaccaaggagaaaaagcatggcttccagtgcaaaggacattcagctgcgagagctgatggataccgtttcacaactgaagacaatgatggctgaacagacagagctgatccgttccctcagaacagtcattgatgaaaagactgcccatgaagcagtgctgcaggaacaggtggactatctgacgaagaagcttttcggcacctccagtgaaaagacacactctgacatcccgggacagctcaatctgttcaacgaggcagaggcagaacaggacccttcccttccggaagaagactgcattgaggaacccagccccagaaagaaaaaggcgacccatgcagaacttttcaaaggtcttacggtacataaacaggtgatacctctggcaaaggaagataagatctgtccggtatgcggtacacccatggaacgcatcggggaagaatacgtccgcagggagctggtattcacacctgccagatgtgagatctatgagtactatacggaaagctatggctgtcccaactgcaaggatggaaaaggtgataccgaaaaagctgtgatcatcaaatccaaagcagcaccggcactcattgggaaaggtcctgcttccctttctacagttgcatggacgatctaccagaagtatgcgaacggcatgccactttaccgtcaggagaaggactggaaggaatacggggcagccatcagccgtacgacccttgcaaactggatcatctacagtgcggaacattatttccgtccactgtacgattacttccatcgtcagcttctacagagggagttcctcatggcagacgagacccgggtacaggtcctgaaggaacccgggcggagtgctgaaagccagtcattcatgtggctgttccgcaccggggaagatggtcagcctg

SEQ ID NO: 5614 - DNA, 10964 bp, Unknown
  gut microbiota DNA sequence
tgcagtgatttgtgtagcggtatacaagctggcctatgtatcgtcgacagagaaaaaggcctgacagagacaaaaaccatcagataagaaggaatggatttgaaaaaaccgaacaggtcatgagtcatgaaacatgatataagagataagaggcaaaagaggcaacgaacaatgaagatcaacagagaaaaagcactggcagcatttcaggaatacacggaccgttatgacagcagccgggacatgatccgcctgaaaatagaacacacctaccgggtctgcggattgtgtcagcagatcgccagatctctggaccttccggaggaagaggtggacattgcgtggctgaccggactgctccatgatgtgggacgctttgaacagcagcgggtatatggtaccttcaccgatgcagattccatcgatcatgcgaaatacggagcaaggattttatttggtaaggtctgggaagagaaacacggacttgcttccggaagcgaagaaagcctgcccgaggaaattcaggcagatgccggaatcagtatccgggatttcgtagaagatgcttcctacgatgaacttctgtggacggcggtattttatcacagcgcctaccggattccggagggactggacgaacgtacggcaatgttctgccatatcttacgggatgcggataagattgatatcttgaaggtcaatgtggaattccctctggaagagatctacaatgtggacaccgaggtattataccaggaggaagtgacgccggaagtactgcagagctttgatgaggagcatgccgtactacgatccctgaagaaaacagcagtggacaacgtggtgggacatatttcgctggtgtacgagctggtctatcccgagagctgccgtattgtgaagcgacaggggtatctggatcggctgatgaattttgaatcacggaatcctcagacgagaaaacagttcgagcatatcagagaacatatgagagaatatcttgccggaaaataatgttgggtacctgacagacagaaaccaaactgaaaatctcacggatggcggagaataccgttattcgtgagatttccatttacaaagagcgagttttcgttttgtatatcgcagattcctcctgcacagactaaacagtagcacttgatcgataacatatgcaaaattatgttatcgatcaagtgcacgattgttatgtaaaaacaggatgcctgtaaaatgaggcatcttcgcagaacgcgggaaaggagtttgcaatggatggattgactgggggaagcggcggaacagaagcgtttcccttgaatgaactgccggtaggattcggcgtggcgctggcgatgaatgaacaggccatgcaaggctatgcggcactgacagagacggagaaggaacatctgatcctccggtgccgggatgctggatccaaagaagagatggagcggatcgtggcatcactggtaccgggagaatcggcggagagtgttattgccagcctccgtcaagagtaaggatctgtccggtgagataggttggcgcctggatgagctggaggacaagttttgcgacttcctccggctggcccagacggtcggcgggaatctcttcccggagggcgttcatttcctcgggggagaagcagtggttcatggcagtatcaataacaccgcaggagatggcgttgacctggatattactgggagccagctccttggccagtgctttggtgaagctgttcacaccacccttggaggcggagtaagccacttccatggaagctcccacatttccccagacggaggaaatattgataatgcgtccgctgtgcttcagcagcatcagaggcactgccagacggctggtgtagaagcaggagctcaggttcgtattcaggacatgctgccattcttcgacactcatatccgtgagcagaccaatgtaagagattccggcgttgttgaccagtacatccagatggtccagggaggcaaaaactttttcgatggcagcgggttccgatgcgtccgcagccatggcggtgcaggtgatgccatatttttcttctaaacaggcagccacttcctgaaggtccggcaaggtatggctacaggtgaggattagatggtagccggcttcggccagggcttctgcgatggccttaccgatgccgcgggaggcaccggtgacaagagccaacggtgcgttctttattgtattcatgtaaagtatcctttctgaattctacggcaccctttggagataaaacagtgccgaatgctaaaaacctgtaaaacgagtgtagcacagatggacttgcttttccataggggaactgctacactggacaaaaggagagtaaaaattatgtatgatttgatcattatcggttccggtcccgcagggctgtcagctgcagtctatggtaagagagcgggactgaatctacttattatagaagaaaagcccatgagcggcggtcagatcctcaatacctatgaggtggataactatctgggacttcccggcatcagtggattcgatatgggaatgacgttccggcagcatgcagagaaactgggagcggagttcctggaggctacggtacacagtgtggaagaacgaggcgattacaaatgcgtctatgcgggcaaccaggaactggagacccgtacggtgatctttgccaccggtgcggaacatgccagattaggagtgcccggcgaggaagaattgaacggcatgggggtatcctactgtgctacctgtgacggtgcctttttccggggcagaacggtggctgtggtcggcggcggtgacgtggcactggaagatgccatctatctggcaagaacctgcgaaaaggtgtatctgatccacagaagagatagtctgcggggagctatggtattgcaggaggaattaaagagtctccctaatgtggagattctctatgaccatgtggttacagagatctgtggcgaggacatggtggaaaagctgcgtatcaaaaatgtgaagacagaagcggaaaaagatctggaggcagcaggcatctttatcgctgtaggcatccatcccaacacggaactgctgcgggaactggtagcagtcggggaagacggttatatccctgcggatgagaccggagagaccggccgtcccggcatttatgtggccggagatatccgtaagaaacctctgcgccaggtcgtaacagcggtggcagacggtgccaatgcagcagtcagcgcaggaaattactgcaaccgttttcgttaacagacacagattagtaatagattcattaagaaattcggaagaaaaccgaagaatatttaaagaaaagagtcacctggatggtggctctttttatgtaaaaacaccgcaaacccgcatgaaatgggaacttttgacaatattgacaattaattcactatattgacaaatgaaagttcgcgtgatatatttgttaacagatgtaacaaattcgtaacaaatgatttgaaaatgtaaagaaataagttaagaaattgagacagctccaagagtttcaggaggatagaatggttcgtaaatctgtaaaaattaccgtttgcaccatggcagcggttatggctttttccggaatgaatatcactgcaaatgcagcagcatcttcatctgtactgcccagcggcggtatcgagctgaccctggcaaagggcaacaagctggagagcctttccacaggtaccaacagcacgaaacagattgaaagtattattgagactgtgatccgtgacgatcagatggataccaccccggaagcatccgaggaggagtccttcaagaatctggtaatcgcacaggtgaatgattatgtaaatgtaagaagcctgcccagtgaggaaggtgagatcgtcggtaaattgtatgacgattctgttggtctcttcatttccgaagagaacggctggtatcagatttcttccggttccgtaaccggttatgtaaaagccgagtactgtgtgaccggcgacgaagcagtagaacttgccaagaaggtaggaacccgactggcaaccgttaacaccaccacattgaaagttcgtaccgagccttcgctggaagcatcggtgctgggtctggttcctctggaggacgatctggtagtatccgatgagaccgatggctgggtacaggtagataccgaggaaggtcttggatgggtctctacagaatttgtttccctgcatacggaattcgtagaagcagaatccaaagaggaagaagcaaagcgtctggcaaaggagaaagaagagagagaaagagcacgtgccgcagcggcagccaaggcagccacaagcagcaagagttctggctcttccagcagcgctcccgcagttacttatgcggccagcggagacagcgagatgggtaccgcagttgccgactatgcattacagttcgttggtaacccttatgtatacggcggatccagcctgaccaacggcaccgactgttccggatttgtaatgagtgtatatgctaacttcggtgtaagtctgcctcattcctcttctgcagaccgcagccagggttccgcggttgacggacttgccaatgcacaggcaggggacctgatctgttactccggccatgtggcactgtatatcggtaacggccagatcgttcatgcatctaccgccaagaccggtatcatcgtatctaatgcggattacaagaaggtactggcagttcgacggatcttctgattatataacagaaagtacaaggcactgtgtggaaacacacagtgctttttgtgtatacgatgagcgagactactcgattgcaccgtgtcatgtggtcggtttattttccatgtggacaggatgctgtggggacagtggaacttaagtgccgataaggcaaaaaactataagttgtataacgaattgtgcaatttgtcaaaatattgttacgcgatgaaatggggattgacaaaacggaactatacaaagtatacaaaaaaagtgacacgaacgtaaaaacgacagaaaagaaatttaaatacaaaataagttatccacatccaaaatgccagaaaataggataaaagttacttatacaccaagttatacacattatccacagaaaaaccggcactgcaagggggataaatttacgaaaaaacaggaacaaatgttttgtgaacatgtaataaaaatagtaaaatgacaggatttgtcgattttagggttgacatacagaatgtcaaaaacaagtaaaaaacttcttaaattgttgcaaaaagctgtgctattgtgctataatgactatacaataaatacaagggatgctacataaaaccttgtaaataaatacttggaagggatgatcagcatgaagtttattattgttggcagaaacatcgaagttacaccaggattaagagcagcagtggaggaaaagatcggcaagctggacaagtatttcaatcccgacacagaagtacatgtaacattaagcgttgaaaaagaacgtcagaaaattgaggtgaccattccggtaaagggaagcattatccgttcggagcaggtaagcaacgatatgtatgtatccattgatctggtggaagagatcattgagagacagttgaaaaaatataagaacaagatcgttgacaaacagcaggcggcagcttctttcagcaaagcctatgtagagaatgattacacagacgatgacgagatcaagatcgttcgtaccaagaagttcgatatcaagcccatgtatcccgaggatgcctgcattcagatggaactgttgggacacaacttcttcgtattctgcaacgcagagacagatcaggtaaatgtagtgtacaagagaaagggcgatacctacggactgatcgagccggaagtataaaaccggacagaaaattaaataaagacaaatttacagcctgccggagtttccggcaggctgttttgttgtatgggaaatgatatgccccggagattttcgaattgcctgaataccggaaaaatcagaaacataacctgtaaggaggaactgagagcaggacagggaatgaacagagaaaagagaatgcgggcatggatccgggcagaggtgatgcttctatttataatgatgggagcatttctgctccgggagacaggacggacagaaagcatggaacaggcggtggtcaccgcaacctcggctgcgggaaaggattatatcaaatgggtggactttaccgtatcctatgaagcactctgccaggcatatgactgggatgtggatacgtttgacacggaacatcatgtggagtggatcccgctgcttgcatataccgcagccagaaccggaggggaatttgacaaaaaggcgctgaagatcctgaacgagacggcggagaagctggcggagggagaggcagagatggaaactctcacaaaagatatgaaatactatccgtattatctggaagcttacagcgcggcgctgggaggactggtgggagaatacgaggcagaggtgatcggagaagacggacagagcacctggcagaaaaaatacggattaaaaggttattgccccattgcgagaggatttgattatactcattatgatgatttcggggcgggaagaagctacggatataaacgaaggcatctgggccatgacatgatggggctcgtcggtgtacctatcattgctgtcgagtccggcactgtggaagccctgggctggaaccagtacggcggctggcgcattggtatccgcagctttgataataagcgctactattactatgcacatctgcggcagaactacccctatgcggaaggactggaagaaggcagcgaggtgacggcgggggatgtgatcggttatatgggacataccggttacagtaccacagaaaatgtaaataatatagaagtaacccatctgcactggggattggaactggtctttgatgaagaacagaaagagagtgacaacgagatctggatcgatgtctatccgctgacctgttttctggcaaaacacacgcaggaagtgcagaaagtcgagggaacaagagagtggatccgcactacaaaaatccgggaattctgatttctaaaaatttcatttgttattttgttatttttttgacaaaagcattgcaaaacagatttcgctatgttaaaatggggacagtgaaatgataaaaaaataacaatctacatttcagaaagcaaaccaaacgaaaacaaaaagtggaggacaaacaaatggcaaagaaagttgtattagcaggcgcttgccgtaccgcaatcggtaccatgggcggaaccttaagcacaactcctgcaccggagctgggcgcaatcgttatcaaggaggctctgaagagagcaggcgttgctcccgaagcagttgaccaggtatatatgggatgtgtaatccaggctggccagggacagaacgtagcacgtcaggcagctatcaaagccggacttcccatcgaagttcccgcagttaccatgaacgtggtatgtggttctggcctgaactgtgtgaaccaggcagcacagatgatcatggccggtgatgcagatatcgtagtagcaggtggtatggagaacatgtccatggctccttacgcaattcctcagggacgttacggatatcgtatgggtaacgcaaccatggttgataccatgatcaaagatgcactttgggatgctttcaatgattatcatatgatcaagaccgcagacaacatctgcgaagagtggggacttacccgtgaagaactggatgagttcgcattaaagagccagttaaaggctgaagaagctcagaagaacggtgccttcaaggcagagatcgttcccgtagaagttaagaagaaaaaagagaccatcgtattcgataccgatgaaggccctcgtcatggttctaccatcgaaggtctggctaagcttcgtgccattaatcccggtggattcgttaccgcaggtaacgcttccggtatcaacgacggtgcagcagctatcgttgttatgagcgaagagaaggctaaggagctgggcgttaagcctatggctactttcgtagcaggcgctctggctggtgttcgtcccgaggttatgggtatcggccctgtagcttctaccaagaaggtaatggctaagaccggtatgaagatcgaagacttcgatatcatcgaggctaacgaagcattcgcagcacagtccgtagcagttggtaaggaactgggcatcgatgtagataagcagctgaaccccaacggcggtgctatcgctctgggccatcccgtaggagcttccggatgccgtattctggtaactctgttgcatgagatgcaggcaagaggtgccaagaccggtctggctactctgtgcatcggcggtggtatgggatgctccaccatcgttaagatcgaggactaatggaataacaattcgctggggcggtagaatctctatcgccttagtgtggttttgaaaatactgattgaaatgtgaaatgaggtaaaaacatggattacattttgtatgagcagaatggcaatgtggcaaccatcaccatcaaccgtgaaaaggcactgaacgctctgaattctcaggtactggatgaactgaacgctacattggatgcagtagatctggcaacggttcgttgtctggtgatcaccggtgcaggcagtaagtccttcgtggcaggtgcagatatcggagagatgagcagcctgaccaaggcagagggcgaggcattcggcaagaagggtaacgatgtgttccgcaaaatcgaaaccttccccattcccgtgatcgcagctgtcaacggctttgctctgggcggcggatgtgagatttccatgagctgtgatatcagaatctgttccgacaatgcagtcttcggacagcccgaggtaggactgggaatcactcccggcttcggcggaacccagagactggctcgtctggtaggtgcaggcatggcaaaacagatgatctacaccgcacgcaatatcaaggcagcagacgcttacagaatcggtctggtaaacgaagtttacagcgcagaagtagatgcagatggcaatgtggtaaagagtgcacaggaagtaatgctggcagcagcacagaagatggcagccaccattgcaaagaatgctcccatcgcagtccgcaactgcaagaaggctattaacgaaggactggatgcagatatggatcaggcagtagtgatcgaagagaagctgttcggtgactgcttcgagacagaagatcagaagtatggtatggctttcttccttgacaagaacaaggagaaggtaaaagagccttttaagaattgctaatcattacgaatataaaagtataaaatcaggaggatttaccatgaaagtaggtattatcggtgcaggtactatgggacagggcattgcaaaggcatttgcccaggtagacggatatgaagtagctctttgcgatatcaagcaggagtgggctgacggcggcaaggccaagatcgtaaaaggctatgcaagactggtagaaaaaggaaagatgactcaggaggctgttgacgctatcgtagctaagatcactccgggcctgaaggaagatctgtgtgcagactgcgatctgatcgtagaagctgcatttgagaatatggaagttaagaagaccaccttcggtgagctggacaagatctgcaagcccgagtgtgtatttgcttccaacacttccagcctttccattaccgagatcggcaacggactgacccgtcctctgatcggtatgcacttcttcaatcccgcagaccgtatgaagctggttgaggtaattgcaggtgtgaatactcccgcagagaccgtagacaccatcaagaagatatctgaagagatcggcaagacccctgttcaggtaaacgaggcagcaggctttgttgttaaccgtatcctgatccctatgatcaatgaagcagctttcatcaagatggaaggtgtatccgatatcgcaggtatcgacgcagctatgaagctgggcgctaatcatcccatgggacccctggaactgggcgatttcgtaggactggatatctgccttgccatcatggatgttctgtacaacgagaccggcgacagcaagtatcgtgcatgccctctgatccgtaagatggttcgcggcggtaaccttggtgtgaagaccggcaagggcttctatgtatacaatgcagaccgcaccaagactcctgtggatgcacagtaggcaaaaggtaaaataactgttcggagccggatacggctctggacagtctaagttcataattacaaccaagtataaataacaatggaggattaacatcatggattttacattatccaaagagcatgagatggcgagacagctgttcaaagagttcgccgagaacgaagtaaaacctcttgcgcaggaagttgacgagaccgaaaccttccccagagagaccgttgagaagatggctaagtacggcttcatgggaattcccgttcccaaggagtacggcggacagggctgtgataccctgacctacgctatgtgtgttgaggagctttccaaggtttgtgcaaccaccggcgttatcgtatccgcacatacctctctgtgtatcgatcctatcatgaccttcggtactgaggatcagaagaagaaatatgttcccgatctggcaagcggccgtaagatcggtgctttcggtctgaccgagcccggtgcaggtaccgatgctcagggacagcagactaaggctgtattagatggtgacgagtgggtcatcaacggatccaagtgcttcatcaccaacggtaaagaagctgatgtatatatcgtgatcgcagttaccggtatcgtagagaagagaggcagaaagatgaaggagatttcttcctt

SEQ ID NO: 5615 - DNA, 12026 bp, Unknown
  gut microbiota DNA sequence
cctatgtgtggcattccctatcatgcggtggagacatatctggccagactggtcagcaggggctataaagtagccatctgcgaacaggtggaggacccaaagctggcaaagggactggtgaagagagaggttatccgtgtggtgaccccggggaccaacctggatgtccagtcattggaagccagcaagaacaattacctgatgtgcattgcctatacctcggatggaatcggcatttccgcagcggatgtcactaccggagattattatgtgacagaggtagaagacctgcggaaactgaaggacgaactgatgaaatatgagccctcggagatcatctgcaatgaggcctttctggtcagcggatatgatgtggaggacttgaagtcccggttacatatgtcggtcagctcactggagtctcacatgttcgatgatgacggctgccggcggatccttatgagacattttaaggtgaatactctgatcggcctcggtgttgaggaatttcctacaggaattctggcagcaggagcattactgcaatatttatatgatacccagaagacggatctggaacattttactcatatttctccctatcttaccagcaaatacatgctgttggacagttccaccagaagaaatctggaactgacagagacactgcgggaaaagcagaagagagggtctctgttgtgggtactggacaagacgaagacggccatgggcggcagattgctgcgaaactatattgagcagcctctgattgataaggaagaaatggagaaacgtctggatgcaatccaggaactgaatcaggattccatctcccgggacgagatcagagagtacctgaatccggtttacgatctggaacgactgctcagcaaagtaacttataagacggcaaaccccagagatctgatcgcttttcgtaactctctgcagatgctgccgcctatcaagacggtgttggcgggcttccagaaagaggagctggcagccatccgggaagaaatcgatggactggaggacatttatcagctgattgacgaggcaatcgttgaggaaccgcccatatctattcgtgaaggcggaatgatcaaggatcagttcgatgagactatagatcatctgcgtgcagccaaacatgacggcaaacaatggctggtccagctggaggaagaagacagagaacgtaccgggatcaagaatctcaaaatcaaaaaaaataatgtgttcggctacttctttgaggtgaccaattcctacaaggatctggtgccggaggattatatccgcaagcagacccttgccaatgcggagcggtataccacaccgagattaaaagaactggaagatacgatcttaaatgcggaggacaagcttcagacactggagtatgatattttctgcagaatccgggataccatcgcacaggaactggtacgtatccagaatactgccaaggcgcttgcaaagctggatgtttatgcatccctgtccctggtgtctgagcgcaatcactatgtacgcccgaagttaaatgaaaaaggtgtcattgatatcaaggatggcagacatcctgtggtggaacagatgatcactaatgacatgttcattgccaacgacacctatctggataatggaagtcattgtatcagcatcattaccggtccgaatatggcgggaaaatccacatatatgcgtcagacggcactgatcgtgctgatggcacagatcggttgtttcgtgcctgccagaagtgccaacatcggcattgtagacagaatctttacccgtgtgggtgcgtcggatgacctggccagcgggcagtccacgttcatggtggagatgaatgaggtggcgaatattttacggaatgccacatccaaaagtctcctgatcctggatgagatcggaagaggcacgtccacctttgatggcctgagcattgcctgggcagtgatcgaacatatcagtaatcgaaagcttttgggagcgaagacactgtttgccacccattatcatgagctgaccgagctggaaggcaaaatgaacaatgtcaacaactactgcatcgcagtcaaggaatgcggagacgatattgtattcctgcgtaagatcgtaaagggcggtgcagacaagagctacggtatccaggtggccaaactggcaggtgtgccggatatggtcattgaccgtgcaaaagagatcgtggaacagctgtccgacaatgatatcaccgaaaaggtgcagagtatcgccattgataataagggcgatgggaaagcaaaaaaacagccaaaatatgatgaagtggatctggcgcagatgtctctgtttgatacggtgacggacgaggatgtgctgaaggaactgatggagatcgaagtaacgactctgacaccgctggatgcactgaatactttgtaccgcctgcagaataagttaaagaaccgctggaacggctagaaagcataagggaggagatttatgggaatacatgtactggactcccggacgatcgacaggatcgctgccggtgaggtggtggagagaccagccagtgtggtaaaggaactggtggagaatgccattgatgccggatctacagcaatcacggtggaggcaaaggaaggcggcattgaattcatccgcgtgacggataacggctgcggtatcgagagagatcagcttcctaccgcgttcctgcgccatgccaccagtaaaatagaggatgcggatgatctgaaccatattgcgagtctgggattccgtggtgaggctttatccagtatcgcggcagtttcccgggtggagatcattaccaagcgaaaggaaaatctcacgggtacccgcatggtactggaaggggcgcgggagcaatccattgatgaaatcggtgcaccggacggcacaacgttcctcatgcggaacctgttttttaatacgccggtacgccggaagttcttaaaacagcctgccacagagggcagttatatcacggatctgatggaacatctggcgttgtcgagaccggatatttcgtttaaattcgtactgggaaaccagaccagattccatacctccggaaacggtgacctgcgggaggtaatttaccggatctacggcagggagatcgccgcagagctggtgcctatccagatcgaagagaacggcatcaaagtcgaaggatatctgggcaaaccggtactggtgcgttccaatcgtaacttcgagatctattttatcaacggtcgttttatccgcagcggtgtgatcgccaaggctatcgaggaaggctacaagcagtatctgatgcagcataagtttccactgtgcgtactgcatatcaccatggatacggagacggtggatgtgaacgtacatccttccaaaatggatgtgcggttctctgacggcatggcatttgccagaatgctcagtgagaagatcgccatcactttgcggaaccgggagatgatcccggatgcttctctggaggatgaaaaggcaatccagaagaaagaacaggaagagagaagagcttcctggaaagaacacacaccggaagtatttgaaaaaaagagagaagaaagctatcgtgtcatggaggcagcaaaatatgaagcggcttccagggaccggagagaatttatacagaaacctgtctggcaggaaaatcatgccggggtacagaccagtatccgcaagccggagctaatagagaactccacagtgggtgttgcaggaactgtgacggtgaaaaaaacgcagtccgtcctgtacggtaatacaccagaagtttccaaagcagtcagcaccacagccgtaccgcaggaagatgatttcttcgtggaggcagtgccgccggaaaacaggaagaacccggtacaggaacagatggccacaacaactgcttccggacagcccacggcatcgtcacaggatgcagctgccgccccggaaccggagatcaaaaatacccagcagttgaatctgttcgaggaaaaactgttgtccatgcagaatcgcagccgttaccggattatcggtcaggtctttgatacttactggctgatccagtttgaagacaaattgttcatcattgaccagcatgcggctcatgaaaaggtaaaatatgaacgcctgatgaaacagttttatgaaaagagtgtggtgtcccaacgtctgatgccggcgattattgtcagcctgacagggcaggaggaaagcattctgcacacctatgaggatgcttttgcacagctgggatttgagattgatgctttcggaggcaacgaatatgccctccgtagtgtgccagtggatctctacggatgcagtgagagggaactgttcctggcagtgctggatgaactgtcccaggagaccggcaatcgcggaagttttcaggtcattgaggaaaagattgcatccatgtcctgcaaggcggcggtcaaaggcaataaccgtctgagctttcaggaggcggagaaattgatcgacgaacttctgaccctggataatccctacaactgtccccacggcagacccactattattaccatgacggagacagatctggagaagaaatttaagaggatagtataatgcgtttactgatcaaacagagagtgttttcctggacagattcctatgatgtctatgatgaaaatgaaaatccaaaatattttgtaaaagcggagtttttctccctgggacaccagctgcatgtatacgacagaaataaccatgaactgggagtgatcagacagcggctgcttacctttcttccggcctttgaaatcgagatcggtggccgggtccgtggtgaaatccgcaaacagttttcttttttcaagcccagatatgagatcgactataacggctggcgcgtggagggagattttctgggatgggattatgatgtatacaatggatgcagcagtatcatccatatctctaaagaactgtttcactggggagatacgtatactattaatttctccgatccacaggatgaactggagggtctgatgctggtcatcgccatcgatgcagcaaactgtacccagaacaacggatagcaggataaaaagagtaaggaaaaaataatgtcggtaatacagaataaaaagaaaccactggtggtcctgaccgggccgacggcggtgggaaagacaaaactgtccattgcgctggcaaaagccataaacggagaaatcctgtcggcagattccatgcaggtatataaacatatggatatcggttctgccaagatccgtccggaggagatggagggggtgccccatcatctgatcaatattctggagccctgggaagaattcaatgtagtagtgttccagaaacattgtctggaatgtatggagcagatatatgacaggagccatatccctattctggtgggaggcaccggattttacattcaggcggtgcttcggggcattgattttacggaaaacgaagagaacaccgaatatcgaaaaaaactggaacttctggcagaagaacagggaccggagagtctgcatgagatgctgaagaaggtcgatcccgtatcggcggagaatattcatgccaataatatcaagagaaccatccgtgctttagaatattatgaactgacaggagaaccgatctctgtacacaacgagagggaaaaagaacggacaagtccctataatttcagctattttgtgctgacggacgaccgggaaaagctgtatgcacggatcgaggacagaatcgatgaaatgatgtcacagggtctggtggatgaggtaagacaactgaaggatatgggatgccgtaagggcatgacgtccatgcagggactgggctacaaggagattctggaatatctggatggagaatgcagcctggaagatgcggtctataccttgaaacgggataccaggcattttgccaagagacagctgacatggtttcgcagagagagtgaagtcacctggatcgacaagggccggtttgattataacgaagagaaaatattggaatacatgatcagagaattaggagaaaaagagatttatgagaagcagtaatgaagagatctacctgtctatgggaatcagcaagaccgtatatgattacggctgcaccattgagaaaagtttaagagaccgctttgatgaagtggatagtaacgcggaatacaatcagttaaaggtggtaaaagccatgcagcagcatcaggtaagtgaagcctgcctgttgggtactaccggctacggatataacgacctgggaagggatactctggaagcagtatatgcagcgaccttccatacagaggatgctctggtgcgtccccagatcacctgcggcacccatgcactggcactggctctgatgagcaacttaagacccggagacgagctgctgtcccccgtaggcaagccttatgatacgctggaagaagtcatcggcatccgcccttctaaagggtctctggcagaatacggtgtaacctatcgccaggtagacctgctgccggacggaagctttgactatgataagattcgtgaaaatattaatgagaagacccatctggtaaccatccagagatccaagggatatcagaccagaccgaccctttctgtacagcggatcggcgagctgatcgcctttattaaaggtattaagccggacgtgatctgcatggtggataactgctacggagaattcgtggagacggtggaaccctccgatgttggtgcggacatgatcgtgggatctcttattaaaaatcccggcggtggactggctcccatcggcggctatatcgccggtaaaaaggaatgcgtggaaaatgcggcataccgtctgacctccccgggactcggcaaggaagtaggagcatctcttggtattttgaaagatttttatcagggatttttcctggctcccacggtgacggcgggagcactgaagggtgcgatctttgcagccaatgtctatgaaaaattaggttttgcggtagtaccgaacggcagtgagagccgacacgatatcattcaggcagtgaccttcggtcagcctgaaggggttatcggcttctgccagggaattcaggcggcggcaccggtagacagtcatgtgacaccggaaccctgggatatgccgggatatgatgcacaggtcattatggcagcgggagcatttgtttccggttcctccattgagctgtctgcggacggccccatcaagcctccgtatgcagtgtatttccagggcggactgacctggcagcatgccaaattcggtattctgaaatccctgcaggtactggtacaaaaaggtattgtgacggaagaacagatccggaaagcaatgtagaactacattgaaaaatacgaatcctgtagaaaaagcgcaaaataaaatctactaaatttgtgtacagaagaagctttttgtgatagtataaaaagacgtatggaagacaggctcacggggagactgttcagccatggagagtacacagaagaaagaagaggaactaccttgaagagaattaattgggttttgatcgtcctggtactgatcggatttgtgatcggcagatttatagggacttatttcgacggtacttttctgaattacggacagaatttcggcctcagcagtccagtggaactgaatctcggtttcattattctgactttcgggctggagtttaacatcacgatcgccagtgtgatcggtgtgatcatagcgttcgtggtataccgttttatccgttaggcagcatacgtcggagcaggcagaaggagacttatgcccgagaagaatgtacaggtaaatacagaccggggacttccctatgagagatttctgcagttcggaccggagaatcttacggaggcggaattgcttgcggtgattctgcgaaccgggacgaaggaggattccgcggtggcgctggctgagaaggtactggcactggccacctatccgagagaaggactgctgggtctgcatgatgtgagtgtggaagaactgatggagatccggggcatcggcatggtgaaagcggtgaaactaaaatgcatcgccgaactgtccaacaggatgagccgggccaaagccagagagggtatctgcttcaccagagcggatcatgtggcggaatattttatggaaaagctcagacacagggataccgaatgtgtgtatctgctctgtctggatgccaaaggacagctgatccgtgagaagaaattgtcggacggcagcgtcaatatggcactgatctctcccagagagatatttttggaggcgttaaaggacaaggcagtcagtcttatcctcgtgcacaatcatcccagcggagatcccactcccagcagatccgacagggagctgacggaaaatgtggcaaaggtgggaaaccagatggacattccgctgttagaccacattattattggggataacaggtatactagcttcagagagcaaaaatttttgatataagaaagggataacgacagtggcaaacaatgcatttggtatcgaccttggtaccaacaatataaagatctataaccgcaatgatgacaatatcatgatcgaaaaaaatatgattgccatcgagaataagaatactttatttgcttatggtaactctgcatttgaaatgtatgagaaagctcccagcaatattcatatttcttatccgctttccaatggtgtgatcgcggatatcaaaaatatggagacgctggtaaagtattttatcggtgatctgcagaagggcaataccaagccttctgatttcttcattgcagtgcctacggatgttaccgaggtggaaaaaagagcattctatgatctgatcaaaggagctaacgtaaaggccaagaagatcatggtagtggagaaggccgtggcagacggtctgggtctggatatcgatgtaaaaaattcccagggcgtcctggtggtgaatgtcggctacgagaccacggaaatctccatcctgtcactgggcggtatcgtactgagccgtctgatcaaggtgggcggcatgaaatttgatgatgccatccgtgcggcagtcagaagagaattctctctgatcatcggtggcaagacggctgagaatgtgaagattgccctgaaggaactggaagaagaaggaaagggtgctgtagtatacggcagagacattgtcaccggtctgccggtggaacgtgagattcccacaagaatggtggatgagtctctggaggagcactttaataccattattgataatgtaaaggtgatactggagagaacaccccctgaactggcagcggatatttaccgtcacggtatttatctgaccggaggagcatcccaggtaagtcatctggcagagagactggcaaccggtaccggactgcatgtgaatgtggctgagaatccgctgaccagcgtggcaacaggacttgccaagatcatcaaggatgataactataaaacggtagcttatgcaattgaagggatgagtaaatgagcccagtcgtaaaaagaaaaggggagaggtttactttaccgagtaaatatctcctttttattttaactatcctctgcaccatcatgatgctggtgacctttggaaccaatgtatttaaccgaccgttcaacagagtggtgggatatgtgatcgtaccctttgaacaggggatcgccaaggccggagaatggctggcaaatcgttccgatgaactggtgcagatccggacacttttagcggagaacagtgccctgaaggagcaggtggcttccctgacggaagagaacactctgctgcagcaggacaaatatgaactgaatgaactgagagggttgttggagctggatgaagaatacggggactacaataagatcggtgcccggatcatcagcagagattccggcaactggtattcttcttttgtcattgacaaaggctctaatgatgggctggcggatgatatgaatgtgatcgccggaggcggtctggtgggacgtattacgtccgtaggaccgaactggtcccgggtgacttccattatttccgacaattccaatgtcagcggtatgacacttgccacgggtgacaatctgatcgtatccggagatctgcagatgatggctcagggagtgattccattcagcaagctggtggacagccaggatgcagtggcagagggagataaggtagttacttccgatatcagtgataaatatcttcccaatatcctgatcggctatatcagtaccatcaataaagataccaacaatctgacgaaatccggatacctgactccggtggtggatttcgagcatctgagtgaggtgctggtgatcacggacaagaaacagcaggttccgggaggaggcgcagatggagaataacagcagcttcctgcgcaagattgtagtggttcttctgatccttttattttttgtcttgcagtgcagtgtatttaacagcctggcaatgggcggaatcattcccaatctgatgatcattctgacttcttccttcggatttatgagaggggagaaggagggactgctgatcggattttcctgcgggcttttatgtgatatttttttcggaagtttcctgggattttatgccatggtcatgatgtacataggctttgttaacgggaaattcagccggatcttttatccggaggatatcaagctgccgttggcgcttattattgtcagcgacatttcttatggattgatttgttacattctgatgtttcttttgagagggcgttttcatttcccgtattattttacaagtgtgatcctgccggaggcactttacaccatcgttgttacgattattttgtatcctctgatcctgaagattaatcagaaactggaggagaaggaaaaaaggagcgcacagaaatttgtttcgtgaaattagagatcacattattaatattgtgaccagcagactgacagtacttatgatactgtttgctttttttgccggtgttctgctttaccgctgtttcaacctgcagatcgtaaacggagaagagtatctgaacgactttatccttcagatcgagaagaccagggatatatccagtaccagaggacggatcctggacaggaacggcaatgtactggcggaaaatgaactggcttattctgtgaagatcgaggatgtgtttgagtccagccggaataagaacgcaaaggtcaatgacgttgtctatcggctgataaagctgatcgagaaaaacggtgacagtgtgatcacggattttaagatcattattgatgaagacggcgattatgcctattccgtggatggtacggcgctgcttcgttttcaggcggatgtgcttggatacagaaccatagacgagcttagtgaagaagaaaaagccatgacagcccaggaactgatagagtacttaagcagtgccaagggctttgctatcggtcaatacgaagatcccgagaacaccaagacccccttcgtgccggggaaaggttataccaaagaggagtggctgcagatggtaaccatccggtatgccatgaatctgacctccttccggaaatatgtgggaaccactgtggctaccaatgtcagtgcggagacagtggcggtgatcatggagaattccgaccagctggacggtgtgtccatcgtagaggatacggtgcgccactacatagacagcaaatatttcgcccatgtgctgggatataccggcaaaatctcttccgatgaactggcagagttaaatgaccaggtggtgacggaaggcggcctggaggatacctataccatcaatgatgtggtaggtaagagtggtattgaggcatatatggagactaccctgcagggtaccaagggcagtgaaaaagtggtggtgaacaataccggtaaggtgatcactatcttagagcggaaagaggcacagccgggagcggatgtctacctgaccatcgacaaggat

SEQ ID NO: 5616 - DNA, 347 bp, Unknown
  gut microbiota DNA sequence
agatgtgacagaggaagtttacaaaatagaatactataccattgcaaatcagaagcaagcacggtataatatagacaaaaagacaaaggccaccgcaacggtgcaaaaaatagattttggctgttcccacaaggagcagattgagaatcgttatcctcagtggctgaaaacgttggtgtgcagtgcatggaggaagttatttgaataaggcgaaaggtcgcagaaatgcggctttttctaaacacacgagttagccgaacctaacttgcggatatgcgcgtgctggttagaacagtctaattataaaaggtgagacaacaatgcaagatcacgagaatttctgggac

SEQ ID NO: 5617 - DNA, 14083 bp, Unknown
  gut microbiota DNA sequence
tgttgagccccggaagtttccgacaagcggggcgaaatccgtgttttttctctgttgagccccggaagattccgacaagcggggcgaaatccgtgttttttctctgttgagccccggaagtttccgacaagcagggcgtaatccgtgttttttctctgctgagccccggaagtttccgacaagcggggcataatctacatttttcttctactatgtcccgaagataaaaccatccgcaatgagccgcatctcggcataagtaaagacagcgaattgtgcgcaagcgcccatcgctgtcttcactatgcctatgcgcggctcattgctcgcgtaactttctatttaccgataaaattccaccagagaagccagctttgcggacatattcatcatcatggcatccaggacggtgatggcggtcatgcattccatgacgactacagctctggggacgatgatgggatcgtggcggccgcggatggtaagctctgtattttcaccggagcagttcacagtctgctgggggcggaagatggaaggagtgggcttcacgtaagctcggatgagtaaggggctgccatcactcatgccacctaaagttccgccggaatgattgctggtcttgacaactttaccgttctccatgcggaagggatcgttgttctcgctgccggtatggcgggctgcttcggcaccgtcaccaagctccacagccttgacggcaccgatggacataatggccttcgccagattggcatccagtttctcaaaaacagggtctccgattccggcgggaagaccttccacgaggcattccatgcagccaccaacggaatcgcagttttctctggcctggtgcagataagcacaggccttttcgtcagcctctgcatccggcatggcagtaatggtggaacgggcagtgtcccggttatattttgcaggatccgcatcgatggggccgatggaacgggtataggcgaatacggtaatacccatctgttccagaatctttgcagcaatagctccggccgccacacgcccgatggtctcacgaccggaagaacggccaccaccccgataatcccgaaaaccgtatttggcatcaaagcagtaatctgcatggccgggacggtaattctctgcaatctcgctgtaatctgcggagatctgggaggtattacggaccatcagggagatgggagtaccggtggtctttccgtcaaagacaccggacagaatctccacctgatcggcttctttacgttgtgtagtgatagcactggtgccgggtttacggcgatccagatatttctgaatatcttcttcggagagaggaagtccggcgggacagccgtccacgacgacacccagtgcctttccgtgggattctccccaggtagtgatcttgaaaatgttaccaaatgttgaaccggccatgacagttctcctttttccactgttcagaacctcacccatgcattcgcaaaagcgcacgatgaattgtgcgttctggttgctgcacagttaattttgatcatttatggagcggtgactctattcgagtcaccttacgaatcataaaactgctatttacatgcaagcatgacatatcagttttaacgatccttagaggtcagaatagttactttttatcataaattatacgcaattactgaaaaaatcgcaacttttttatagaaaaaggatgcaacacaaaacaaaatatgctatcatatgacataagtactaacgggaagtaaaaggtcgacacgggaatggaaaaaactacggaagaaaaagccagagcgaaacttctgaaatttggcagaaagaacaaatggaacagagcggtagcagtgccgctgctgttttttgtgatgtctttttttcatatccggaattattgtcacaacaacggaaagcgttttgcagtgatgctcggtacctttttcctgtttgcggtttatagcagcttttcttttccggcttttatcaccgaggataccggaacggattatgaactgaaaaataccgacacccagaacatctctctggcagaggaaaaggaaccggatatggcaggtctggaacttttggaggatgaggatgtgttggaacagtcggattacaacagcacttcccatgggtatgcactggtggataagtatgacgcttccgatattctgcaggcgtccgaggctattgtgagcgagaatgcggatgctgagaagaccggagaagacggcagtgtgacagaagacgataacgcagagcaggaggaattccgttccgatgactggcgtctggttctgatcaacaaacagaattccattccggatgattatacgttccagctaggtaccatcaaaggaaagatgcagtgcgacaagagaattctggaagatctgctggctatgctggaagcggcggaagaggacggtgtgaatctgaccatctgctctccataccgggatctggaatatcaacagatgttgtttaaccgcaagatcgagcgctatatgaagcgtggtatgtcctatatggaggcgtatcagctgtccagtcaggcggtgaccgtaccgggagccagtgagcatcagatcggtctggcactggacattgtctgcaacgactatatgtcgctggacgaaggctttggagatacgaaagcaggaaaatggctggcaaccaacagctgtcgttttggctttattttacgataccctgaaggcaaggaaaacatcacgggaatcgaatatgaaccctggcattttcgttatgtgggcaaggccgcagcaacggtaatcatggaacagggaatctcgttagaagaattctgggaggaatatgtagaagatgtatcgattgattaaacaggaaggacgtgccaagagaggcgaatttaccactgtacacggcgtgatccagacacctgtatttatgaatgtgggaactgtggctgccatcaagggcgctgtgtccacagcagacttagagcagatcgggacccaggtggaactgtccaatacctatcatttacacgtaagaccgggagaccagatcatcaagcagatgggcggccttcataaatttatgtcctggaacaaaccgatcctgacggattccggtggatttcaggtattttctctggcggggctgcgcaaaatcaaggaagagggcgtaactttccgctctcatatcgacggacacaagattttcatgggcccggaggagagcatgcagatccagtccaatctgggatctaccattgccatggcttttgacgagtgtgcccccagtaaggcagaccggatgtatgtacaaaattccgtggaacgtaccaccagatggctgcagagatgtcaggcggagatgaagcgcctgaacagtttagaggatacggtgaacccacaccagctgttattcggcatcaatcagggtgctatctatgaagatatccgtatcgagcatgccaagcggatcgctgagatggatctggacggttatgcggtcggcggtctggcagttggcgagacccatgaggaaatgtaccacattctggatgaggtggtaccttatctcccggtgaacaagccaacctaccttatgggtgtgggtaccccggctaatattctggagggtgtagaacgtggtgttgatttcttcgactgtgtatatccgacgagaaacggacgccatggacatttatataccaaccatggcaagatcaatctgttcaatgccaaatacgaactggatggcagacccatcgaagagggctgcaactgtcctgcctgccagagatactccagagcttatatccgtcatctgttaaaggcgaaagagatgctgggtatgcgtctttgtgtactccacaatctgtatttttataataccatgatgacggagatccgtgatgccttggatgcaggccgttttgcagaatataaaaaacagaagctggattccatggctacaccgttagaataagttacaactgtcggagtttagaggaatttcatacaattttatgcaaaaagacttgccccttaagctatttttgtgtatcatacttacttgtacagaaagttttacaggcgtaacacgccggaatggaggaacaaatgggtattttattaactgagtcagaggctgctgcagcaggttccggaaccagcatgatcgttatgcttcttgtatatgcagtattgatcggtgcaatgtggtttttctttatgagaccgcagaagaaggaacagaagagagtagctgcaatgctgtccaacttagagacaggtgactgcgttctgaccacttccggtttctatggcatcgtgatcgacattaccgatgataccgtgatcgtagagttcggtaataacaagaactgccgtattcctatggagaaatctgccatcagcaaggttgagaaggctggagagaactaagaagaagtgaaaaaggagcaatgccgggataaggtattgctcctttttgcatatacggcacaactaatgacttgatctattttaatgtccataattgcatttatgttaattttcaatgttgaaatttagtactgtatcagttattatgaaataagtattttacgtaaaaatacaggaaatatcacaggaaacgaggaaaataacactatggagttacatattacctgtattcccggcgatggcatcggaccggagatcgtcagggagacgaaaaaagttttagacaaagttgcgcataaatatggtcataaaatgatctataaggatattttaatgggtggagcttccattgatgttcatggagtccctctgacagaggaagcgattgcggatgccaaagcagcagatgcggtgctgatgggatccattggcggcaacactactacctctccctggtacaagctctctcccgagaaacgtcctgaggcgggactgctggcactgcgtaaggcattgaatctgtttgctaatttaagacccgcagtactttacgacgaactggcagcggcatgtcccctgaaggaggagatcagcaaagccggatttgacatgctgatcatgagagaactgaccggtggactttatttcggtgagcgcaggaccatcgaagagaacggcgtgagaaaagctatcgataccctgacttatgatgaaaatgaaatccgtcgtattgccatcaagggatttgatattgccagaaagcgcaggaaaaaagtaaccagcgtggataaagccaatgtcctggattcctccagattgtggagaaaggtcgtggaagaggtcgcgaaggattatcctgacgttactttggaacatatgctggtagacaattgtgccatgcagctggtgaaggatcccgcacagtttgatgtgatcctgacagagaatatgttcggagatatcctatccgatgaggcaagtatggtgaccggttccatcggaatgttagccagtgccagcttgaacgatacaaagttcggtctctacgagcccagccacggttccgctccggacattgccggtaaagatattgcaaaccctatcgccactgttttaagcgcggctatgatgcttcgttacagctttgacctggatgaagaagcagatgccatcgaggcagcggtgaagaaagtattgcaggacggcttccgcaccggcgatatcatgtctgagggctgcacgcaggtaggctgtaccgagatgggcgaccttctggcagagagaatctgatgccatttgccccggaagcacatttatccggtatagagaaaataaggaagagaaaataagcaagagaaagagagatatcattatgagaagtgattctgtaaagacaggaactgcccaggcaccccacagaagtctgttcaatgccctgggatttaccgaagaagagagaagacgccctatgatcggtatcgtcagctccttcaatgagatcgtacccggacacatgaatctggataagatcaccgaagctgtaaaaatgggcgtagccatggccggaggtatgccggtggtattccccgccattgctgtatgcgacggtattgccatgggacatgtgggaatgaagtattccctggtgaccagagatctgatcgccgacagtactgagtgtatggctatggcacacggctttgacggtctggtatgtatccccaactgtgataagaacgttcccggtctgttgatggcagcagccagagtgaatattcctacgatcttcgtatccggcggtcccatgttagccggacatgtacacggacagaagagaagcctgtcttccatgttcgaggcagtgggaagtgtggcagcaggtaccatgaccatggatgaactggcagagtttgaggaaaaggtgtgtcctacctgcggttcctgttccggtatgtacaccgcgaactccatgaactgcctgaccgaggctatcggtatgggactgagaggcaacggcaccattcctgccgtatattccgagcgtatccgtctggcaaaacatgccggcatgaagatcatggaactggtagagaaaaatatccgtcccagagacattatgacaccggaagcattccagaatgcactgacggtagatatggcgctgggctgctccacgaatactatgctgcatctgcccgctattgcaagagaagccggcgtggaactgaatctggagattgccaacgagatctccgccaagactccgaacctgtgccacctggcaccggcgggccctacttatatggaagatctgaatgaagcaggcggtgtctatgcggtaatgaatgaactgtccaagaagggacttttgaacctcgattgtctgacagcaaacggcactaccgtaggcgagaatattaagaattgtgtaaacaagaatccggaagtcatccgtcctgtggaaaatccttactcccagaccggaggtatcgctgtactgaaggggaatctggcaccggacagcggcgtagtcaagagatccgctgtagcacctgagatgctggtacacgaaggccctgccagagtattcgattgtgaagaagatgctattgatgctatcaagtccggtaaaatcgtcgcaggcgatgtagtagtgatccgttacgaaggccccaagggaggccccggcatgcgtgagatgctgaatcctacttctgccatcgcaggaatgggactgggttccagcgtggcactgatcacggatggacgtttttcaggagcatccagaggagcatccatcggacatgtatcccctgaggcagcagtgggcggcccgatcgcactggtggaagagggagacatcatccgtatcaatatcccggagaacaagctggatgtactggtatctgacgaagaactggcagcgagaagagcaaaatggcagcccagagaacccaagatcaccacaggctatctggcaagatatcatgaactggtgaccagcggcaaccgtggtgcggtactggaagcaccttctcagaagaactaagcaatcattaaataaccggagggattttgaaatgcagttaacgggatcggaaattctggtagaatgtctgaaggagcagggggtagataccgtattcggttaccccggcggagcaatccttaatatttatgacgcactttataagcacagtggggagatcaaacatattctgacttcccatgaacagggggcggcacatgcggcggacggctatgcgagagctacgggaaaagtaggtgtctgcatggctaccagcggtcccggcgccacgaatctagtcactggtatcgctacggcttacatggattctgtaccgatggtagcgatcaccgccaacgttaccttgcctttactcggtaaggacagcttccaggaggtggatatcgccggcgtgaccatgcctattacgaagcatggctatattgtgaaaaatgtggagatcctggcagataccattcgcaaggcattccatattgccagaagcggcagaccgggccctgtgctgatcgatattacgaaggatgtgactgcggcaacctgcgagtatacacctgtgaccattcagccggaggaaagagtgacccgctacaccagagaagaactgatgctggtagcggaaatgatacataaggcaaagaagccgtatatctatctgggcggcggtgctattatctccggagcaagtgcagaggtggcagagttcgcggaacttatcgatgcaccggtatgcgataccctgatgggaaaaggcgcttttgacggcagaagcgagcgctatacaggaatgatcggtatgcacggcaccaagacttccaatctgggcgtcagtgagtgtgacctgttagtagcactgggagccagattctcagaccgtgtgacgggtaacccgaagaagttcgcagagaacgcaagaatcatccaactggatgtggatgctgcggagatcaacaagaatatccgtgtggatgcatctctggtaggagatctgaagaagactctgaccgaattgaatgcctgcctgtcgaaacaggaacatccggagtggatggcacatataatggaactgaaggaaaaatatcccctgaaatacgatgacgaaaatctgtcctgtccttatatcatgcaggagattgaccgtgtaacgaacggagaagccatcatcaccacagacgtgggacagcatcagatgtgggcggcacagtattatcattatacgaagccccgtaccttcctgtcttccggaggattaggtaccatgggttacggtctgggagcctgcatcggggcgcagatcggacagccggataaggtctgcatcaacattgcaggcgacggatgtttccgcatgaacatgaacgaactggctactgccagccgttacaacattcccatcatccaggtggtcatcaacaaccaggtgctgggcatggtaagacagtggcagacactgttctatgggaaacgctattcccagacagtactgaaggataaggtggatttctgcaaggtggcagaaggactgggctgtaccgccatccgcgtgaccaaaaaggaagaagtggcaccggccatcgagaaggccattgccctgaaagcaccggtactgatcgagtgcatgatcccggaggatgataaggtattccccatggttccggcaggagcccccatcagcgaagtgtttgacggagatgatttgaaaaggcagtcctgatgaaaaagacgacgaaaagattagttttggcagtacttttatttttgctgttattactgaccggatattttattctggcattttattacagagaaggcttctctgtaaatacctggatcaacggtgtctactgtaccggaaaaacggtggaggaagtgaattcggagcttttgttgcgtacagaggctccgaatattgtcatcgtggacagagaggggacagagtatacaatctctcttgcggaagcagattatcaggcagattacagtaacgtactggaacattaccggcaggaacagaatccgttcctgtgggtggacaatgttctgtttcactcccggagggaactttctcccacagtgaccgtggatgtggatgggcttcggagagcttatgattctctggaatttgtacgggccgaacaacagaagaacaaggattacagccttgcccgggatacgtcgggcgagtacgtcttcacggatggacttgcgggacgcattgacttggagaaggcttttttggcgttggagaacacagtagaaaacgggcaggagacgttaaacctgtcagatagtggctgttattatgacatcactccaaatgagaaccagaaaactctgcggaatctctggaaggagattgaacgttatcagagctgtgatattgtctattactttggacaggagagacatccggtgacggcagcggactgtgcctcttttctggtgacggagaatggtctgccggtgacggatcagaccggtaactttgtactggatgaagaagccgtgacggcgtatgtagagcagctggccgaaaagtatgacggttatggccgtaccagacaattccacagtaccagaggagatgtgatcaccatcgagggcggcacctatggaagcaagctggatcagaaaaaagagactgcatacctgatggagcatctgctggatgccggtgtacatacggggacacagcagtcccatgttcccacttacgagagagaagctttctgctatggcagggatgacatcggagatacctatatcgaagtggatatgacacaacagaaaatgtactattatgaaaagggggaactgcggctggagacggatgtggtgaccggcaacatgcgcagacgtatgggaacaccggagggggtgaatttcgtctataacaagcagaaggacagagtactgcggggaccgggctatgcctcccctgtgaaattctgggtacctgtaaagggcagcatcggtatccacgatgccagctggagaaaagagttcggcggggacatctaccagactgccggttcccatggctgtatcaatacaccgaaggacaaaatggaagaattgtacgacatggtacagatcggtacccctgtcgtaatgttttattaataaaacagacattttctgacaaaatgtgtgcgggatgcgaacattttgaaaataatttaacaatgtagttgactaaagcaaatgaaaagcttattctatacctatgctttttataaaaaatttagaaaatatcgaggaggtctttgaaaatggcaagagtgtataacttttccgcaggccctgcagtactccctgaggaggtattgcaggaagcagccgatgaaatgctggattatagaggaaccggcatgtccgtaatggagatgagccatcgatctaaagcctatgatacgatcattaaggaagcggaagctgatctcagagaactgatgaatatcccggacaactataaggtactgtttttgcagggcggtgcgagtcagcagtttgccatgatccccatgaacctgatgaagaaccgtgtggcagactacatcgtaaccggtcagtgggcgaagaaggcatatcaggaggcttccctgtacggcaaggcaaataagatcgcttcttctgaggataagaccttctcttatattcccgattgctccgatctgcccatcagcgaggatgccgattacgtgtacatatgcgagaataataccatttacggtacgaaattcaagaccctgcccaataccaagggtaagcccctggttgcagatgtatccagctgctttttatccgagccggtagatgtgacaaaatacggtgtgatctatggcggcgtacagaaaaatatcggacctgcaggtgtggttatcgtgatcatccgtgaggatctgatcaccgaggatgtgcttcccggtacaccgaccatgcttcgttataagatccatgcagatgcggattctctgtacaatacgcctcccgcatacggcatctacatctgcggcaaggtatttaaatggctgaagaagatgggcggtctggaagcaatgaaggagcgcaatgagaaaaaggcgaagatcctgtatgactacctggatgaaagtaagctgttcaagggaaccgtccgcaaggaagacagatccctgatgaatgttccattcattaccggtaatgaagagttggatgccaagttcgtaaaagaagcaaaagaagccggtttcgagaacctgaagggtcacagaaccgtaggcggcatgagagcaagtatctacaatgcgatgcccatcgaaggtgtggagaagctggtagagttcatgaagaagtttgaagcggagaacgcttaagggggagaaaaatgtttcagatcaattgcctgaatcccatttccaaagtgggactggatcgtctgacagcagactataaagtaatcgataatatgaatgacgcagagggcgttctggtccgcagtgcttccatgcatgagctggagctgccggaaaatctgctggcagtagcgagagccggtgccggagtcaacaacattcctctggataaatgtgcggaaaagggtatcgtagtattcaatactcccggtgccaacgccaatggcgtaaaggaactggtgatcgctggtatgctgttagctgcccgtgatgtggtaggcggtatcgaatgggtcaaggcatccagggataatgcggatattgccaaatctgcagaaaaagaaaagaagaaattcgccggtacggaagtaatgggcaaaaagttaggtgtcatcggtctgggcgctatcggcgttaaggtggccaatacagcagtaagcctcggtatggaggtctatggctatgatccttatgtatctgtcaatgctgcatggaacttaagccgttctgtcaagcatgtgacgaatgtggaagaaatttatgcagactgtgattacattacgatacatgtaccgcttctggattccacaaagggtatgatcaacaaggaagctatcagcaaaatgaaagatggcgtggtcctgttaaactttgcaagagatctgctggcaaatgaggcagatgtcctggtggcattaaagagtggcaaggtagcccgttatgtatctgatttcccgaatcctacgacagcaggacagcccggctgtatcgtgatccctcatctgggcgcaagcaccgaggaatccgaggataactgtgcgaagatggctgtggaagaactgatggattatctggagaacggcaatatccgcaacagcgtaaattatcctgcctgcgatatgggcgtatgcagccaggccggaagaattgcaattttccataaaaatattgccaatatgttgaatcagtttaccgcagtgatcggtgagaagaacatcaatatctccgatatgaccaataaatcccgcggtgaagtggcatataccatgttggatattgaaaatgcggcaacacaggatctggtagaggctttgcagaagattgacggcgtcttccgtgtacgtgtggtaaaataagacatttgtctgaatagcagaaaaatatgcaggcatcggctataaaagggccggtgcctgctttacgtttccggtgtaatgctaaaaacagcggaaatagtggtaaaatcagtgtaaaatgtcagaaacttacagacattttttcgtaaaatcgttgtatgatatgaggaaatctgttatacttggcatggatcaaagacgtaagccacaagagaaagaaggaacaaaacagatgaaatttgatatgcattgtcatacaaaagaaggatctatggatggaaaggttcctattgaggattttattgcggaattgatccgcaagggttttaacggtatgctggtcagcgatcataattcttataatggctatcgtacgtggaaacgaaatatcaaggatcaaaaatataaagattttgtagtgctgaaggggattgaatacgataccattgatgcaggacatattctggtgatcatgccggagaccattaagctgaaaattctggagcttcgtggattgccggtgcagatcctgatcgatatcgtgcataagaacggtggaatattagggccggcacatccctgcggagagaaaaatttaagcttcaccaataccctgaagaaacggaatcagatggcggtgatgaatcagtttgattttctggaaggcttcaatgcctgtgagagtgtagagagcaaccattgcgcaaaggtactggcggaaatgtacgcactgccaaccttcggtggaagcgatgctcacaaaacggactgtatcggtatggcgtataccgatataccagagaagatcagttgtgaatccgatttgatccgggcagtgaagctgggagaagggatcaaatgcggaggctcctattaccgcggcactaccaaggagaaaatcggaaaagccaataatattctggtacagtccttctggttctacaacagactgggaagcctgtaccggcatcacagaagaaaggcagaaatgcataagatggtataggtcctctgggcctatactttttttatacacatcgtaatctaagttcataa

SEQ ID NO: 5618 - DNA, 9428 bp, Unknown
  gut microbiota DNA sequence
gaagagcgtaaggcgctacctgtaattaagaggagagaaatatatgagaaaaaatttaaggggcagaaaagcaaccgcgatcgcactggcatccgttatggcaatgtcgcttgcagcctgcggcaggcaggatggatcgaatcaggtgggacagacagaacagaaggaatatgtatatgttcccgaatacctggagttggatgataatacgaattccagctacagtaacatgacagtacagggagataagctgtattatacaaattaccaatgggatgaagcttccggtgagagcaaggtcgtgcttggagcttattcgctgacagacggttccagggaggacctgccgatcaccattaatgctgacggcggtgggatctattccatgcaggcagacgcagaaggtaatatttatactgcggaatttgagtggaatgccacagaaggtgatgacgcttatacacagcagacgacggtattgcacaagtacgatgcatccggtacggaactgatggcacaggatatcacggacatcatgcagcaggatgagaacaattcttatgtgggcagcatgtgcctggacgaccagggcagattttatatcagctctgattcactgatccggctgtttggcagtgacggacaatttcagggagctgtgcagacggacagccagtggatccagggcatgggaaaagcaaaagacggcaaggtatacctggcttattatgaccaatccggcaacgtgaagctatcccagatcgactttgacggcaaagcattgggacagacatatgataacttcccgaacacgaacggcaacggaggcttgtgtgccggaatagaaaatgatcttctggtgaatacggatactgccctgtatgattatagtctcgcagaccagaagactaccgaaatactgagctggctggacagtgatattaacggcagttatgttacctatgccgcagccaccgcagatggtaagatcctggcagtagtcaatgactggaacacaggggaaactgacctggtgaagctgaccagaaccaaggccagtgaggtggcacagaagtcccagatcacgatcggaaccctgtatacctcccagagccttcaggcagcagccgtagccttcaacaagcagagtaatgaatatcatgtcaatattaaaacatatatcgatgataataactggaccgaaacttcctgggcggatggcattacagccatgaacaatgatattacctccggagccgggtgcccggatatcttggatctgtccaacctggatgtcaaggaactggcttccaagggtgtattcgaggatatgacaccttatctggagaagagcagtgtattaagcaaggacgatttctttgaaaatattgtagacagttatacctttgacggaaaactggtgggaattccgaagagcttcaccttaaacacgatcgtcggcaagacctccgaagtaggtgataagaagggctggaccattgacgatattatagcctatgcaggccagcacgaaggtgcttccctgtttgagggcatgaccaagagcggtatgctgtacacactgttagcctatgatctggacagctatattgactgggagacgggaaagtgcagctttgattcggaagatttccagaaagtactggaatttgtcaataccttccctgaagagtatgattggcagaatgatgacagatctacaccggcgaagatccagtccggtgaagtactgttgaatatgacaggcatctatcagctgaacagtattcaggaggaggaagctatgttcggtgagccggtaacctatatcggatatcctacctccggcggtggcagcggtacttatatgcaggccagtgagctgtatgcgattaccgccaaatcctccaacaaggacggcgcatgggcatttattgagaactacctgaatcagccgtttgatgatctatattcctatggacttcccgccagaaagtctgcactggatgatatggtggagaaggcactgaatgtgacatatatgacagatgaaaacggtgagcagatcctggatgagaacgggaatccgattccggaggacggtacttccggcatcagttacggagactgggagtacacctatcacactcctaccgaggaagaaatcaatattctgaaggagctgatcagtgtggctgaaccttccagtgcaaccggtaatgatgagatcaccaatatcatcacggaggaagcggaagcattcttcaaaggtcagaagtccgtagcggatgtggcaggtgtcattcagagccgtgtacaggtctatgtgaatgaaaacagataaaggaaaggcttaaaatatcgtgagcagacagcatgtgaaacatacgcgtaagcatcacaaattagatagaagaatgcgaaaactcaagaggagctcggggctttttatagcccccagcttccttggagttcttgcgttcttttttctaccctttctggttgtgatcttttattccctggtggacaatcccatcagtatgaattttgtctttttagacaactttagaaatgtagtgcagaatgccgctttccgtacagcggtacataatactgctgtgttctcggccattgccgtaccgctggcagtggtattgtccctgctgcttgccattgtattggaatccaaacttccgttccggagccagttccgtacgtttttcttaagccccatgatggtaccggtagcctccatcgtgttgatctggcaggtattgtttcattataacggtgcagtcaatgatctgctgggagtcttcggcatagagaagattgactggctgaagtccagctattccatcattgttatcgtaatcctgtttttgtggaagaatcttggatataatatgatcctgttcatggcagccctggccagcattcccaatgagctgctggaggtggcgaggttggagagcgcaacaccgctgcagacctttttttacatcaagatccggtatctgtcctcgacttttttgtttgtgacgatcatgtccctgatcagctcatttaagatcttccgtgagatctatctgctgaccacggattacccttatgactccatctatatgctgcagcatttcatgaacaataagttcaagagtctggattatcagacgctgtctgcagcggccatattgatgtccttagtcatgattgtgatcatcggacttctgttcgcagtggaaaatcatttcggaaaggatgtggaaggctgatggagcagaagatgaaaaaacctgtcccaccggagcttagaagggcaatccggttcaaaaagagaaagaagatatttgagaatgtccgcatcagcatagcaacagtgatcgcagccttttttgccatactgttcctgatgccgatcgttctgacgatcaccaattctttcatgtcatcttcggagatatcagcgaattatggttcggtatttgccacaaatgataagggcggcaaggtctatatttccgaaaaagtgaatttgaaatttattccagatatcgtatccttcagccagtatactacagtgcttttgaaaagcccggaatatctgctgaaattctggaattccgtgatcctggtgggaccgatcgtactgtttcagctgatcgtggcatcgctggcgtcttatggattcgccaggtactcggggaagctgaggtcagtggtatttttttcctatgtgatattgatgctgatgccgtatcaggtaacgctggtacccaattatctggtggcggaaaagctgaatatattaaatacgtactgggccatctggctgcccgggatcttttcaccctttgcagtctatctgctgacgaagttcatgaagagaattcctgtgggggtcatggaggcggcacagattgacggtgccggagagtggcagatctatcggctgatctgtatgccattgtgcaaaggtgcgctgtgttccgcagccatccttgtatttatcgattactggaatatggtggagcagcctctgatcctgttatccgatgcggagatgcatcccttgtccgtattcttaagcaagatcaattccggagagatcggactggcattcgccgtggctacgatctacatggtgcccagtcttctggtatttctctacggagaagaatatctggtagatggaattacctaccagggcggtgtcaaaggctaggatcactgatttttgaggatataccggcatggatccgactgccggaatacagatagaaagtgaaatatagaggagaatcaagatgaacgagaacagtggaaaaaagagaagagaatgggttaaaaatgcagccattatattcttgtctgtaatgttggtgctgacatttttttccaatacatttatgaactattcccttccggaggtggcggcccagtacgtgcagtctggaacgatcacggcaaagatccgcggtaccggtacggtggaaagcggagatccctataatgtgaagatcagtgagacccgtacgatctccagtgttctggtaaagaccggggacaaggtagagaagggtgatccactgtttttgttggaggataaggaaagtaaggaactgaccgatgcccaggctgcattggataaggcaatgctggattttgagctggcattgttatccggtaacatttccaattctaccttccagaatgtacagaacggaaatgtggcttccataaacacttatcagagtcgcattgtggcggcggaagcagagatcgacagatggcagaagcaggtggatgaagccaccaatgcaatcaatcagctgaagaccgcacaggtgaacgtggatgccggaggaacgccggacaccggttcggagcagaataaggtgaacgcagcccaggcagcattaaacagtgatgaagtcaagattgcgaaagacaagatcagcgaatggcaggcagctcaggccacctgtcaggccaccatcgataaatacaatgagaacattgctagttcggtatccggtaatggctttgtcaatcaggtgacagaggacgaataccaactggcactgaagaacagggaacagtatcagtcactgatcaatgaacgacaggcatttatcaataacaatccggacaaagtgaaagcatatgatgagaaggtaaaagcgcttgcagatgccaacaaggcactggcagataaacagaacagcaaggagaacagcaccaattccctgacggtgcagacccagaactggcagaccgaactggataaacgaaatatccagctgaaagcagcacaggataccaaggaacagctgctgaaggatatttccacggaactgaatctggattaccagttagacagtctccagaagcagagagatgatatcgcaaaattacaggagaatgcggtaggtgccagcatcgaagcccccatttcgggtaccattaccagcgtaacagtcaaggcaggagacgaggcacagccggatactgcactggtgaccatgcagccggagggtaagggctttaccatgagcttctccgtgaccaatgatcaggcgaagagactttctgtgggagataaggcagacctggtgaactcctggagatacagtgatatggatattaccctggcaagcatcaaaccggataccacagatcccggacagaagaagctgctcacctttgatatcaccggagatgaagtgacacccggacagtccttaaatgtatccgtaggacagaagagtgccaattacgatctgatcgtacccaacagtgccatccgtgaggacagcaacggtaagtttatcctgatcgtggaatccaagagcagtcctctgggcaatcgttatgttgcaacccgtgtagatgtggaagtgttggcaagtgatgacacccagtccgcagtgagtggggcgttatatggctctgaatttgtcattacgacatctacccagccggtagaggcaggaaagctggtcagactggcaaataattcataaaaggtctttcagacggaaaataatttaacaggaaggaagaaacagatcagatgtttcggattcgaatacagaataaaaagaaatgcatatggtactgcagtgcagtagtatcctttcttctgttcctgcttttgctgggctggaccaaccatctggcaaatacccaggatgcccagcagatggccggacgctggagtgaaaaaaaggatgtggcacagatcagctgctttttctcctccaaagcggaagtgacggaggataccattcaaagctttgaatattcactgaaaaatgtgctgcaggaggcctctattacagagacttcagagaaccccagtgcaagactctgggtggatgcttacagtgcggacggcaagatcactctggtcaacgggaaaaatacgctggatgccaatgccatcggtatcggcggagacttttttatgttccatccgttgaaactgatcaccggcgcctatttttccggtaatgatctgatgcaggattattgtatcatcgatcaggatgcggcctggcagctgttcggctccaatgatgtggtgggaatgacagtatatatcggcaatgtaccccatatcgtcaccggtgtggtgcagcgcccggacagcagaatggataaagcggcgggactgaattccacggtggtttatgtgtcttatgagacactgtctgcttatggtacgaataacgggatcaatcattacgagatcgtgatgccgaaccctgtggatgagttcgcctacggcaaagtaaaagaagggatcggtatagacgagaaaaacgttgagatcgtggaaaacagcagacggtattccctgcccaaccggatcaaaacaatccttgccttcggaacgcgttccatgaacggaaaagccatcatctacccctactgggagaatctggcgagaggctatgaagacattattgcattgcttacggtagttatgctgcttctgttattatatccggtagtgaccgttatctggtgctttgtacactggtggcgccataagggctggaccttgaaggaggtatggcataccggtaaggataaggcagagcgggctgtggaacgccgcagggagaaaaagcacccccacaaggagagggatgtcctggaggaattggaacgggaactggaggaagacccttatgcagacagtgaattctcctggctgacggatgaaccggcggaggaaacagagcctgcggatgcagcttcggaagagccggagaaagcgcagacaatgaacatgcagacagaggaaacgcagacaccggaggagacaaaagaggaacagcagtcgtaaaacaacagacacagacaagaaaaggagagggagaatgaaaaagaaagggaaaaaactgatcagtatcgcgttgaccgtggcaatgatcgcaggtctgactgcctgtggaaagggtaacggcgggaacggaaacggcggcagcagtgcggccgatgccagccttgcaaaacagtatgtatttaaggaacaggccctggatctcaatatggattcagacaatatgaatattgatctgctgaccagaaagggagatacgatttaccttctgtttgagacctatgactattccgataacggcagccagagtaagctgcatcttgctacaatgaaacaggatggtaccgtcattggcaccgtagaactgcctatgtggaaggaaggagaggctccggcgactccggcacctgcacagggaggtgaggcttctggggacggaaatgaagcagtgcctcttacggagcatgagaccagcacccaggatattgcggcagcggatatggatgtggtagatgcaccggcagggaacagcagttatactagcacatcgctcaacaattgtacggtcggttcggatggaaatgtttacggaatacgcaattactattgtgagacatattctgaagacgattacagcagtacgaatgattatgcattgatctgctggagcgcagatgggaccatcgtatgggaagctgatctgaatgatatgaatacagaagaaagctattcctgggtatatagtatcatccccaatgaggatggaaccctgacactgctgttaagcggtgataaaatagagaaatgcactgtgacgcaagagggtatcacagaccggaaggatctgccggaggcagtcgcaacacttttcaacaatgcaagctcgaatatcattacgccggatggcaaggtgcagatcatctattatgatgagagcaattacacggatatgtatatcgcaacctatgatcctgcaacagatgcggtatcagagggaataaagttttcctcgacactgaccaacggcggttattataatatggtgcccggagacggtgacatcctgtactatgccgatagtaacggcctgttcagttataatgtgcagacacaggaatcgaagcagatcatgagttatatcaattcggatctggctgccggcagcctgaacaatttcctggtactggacgaggaacagttcctgggcttttactatgataacaccgaaggtaaaatgtgcggaggtctgttcacccacgtgaagccggaggatatcaaggaccggatcgtccttacactggccggtaactatatcgactatgagctgaagagaaaagtagtagagtataataagtccggtgacacttaccgtattgtagtcaaggaatacaatacctacaatacttcagaggattatactctcggtgtgaagcagttaaataatgatatcatctccggaggaatgccggatattctggtcgtggacagcaatatgtcaatggacagctatattgccaagggactggtggcaaatgtggatgatctcattgcgggggatgaggaattatcgaaaaacgactatctgcagaatgtctgggatgcgtaccgtgtggacggtaaactgtactatgtgattccttccttctatatctctactatggtaggaaaagaatctattttcggtgaccgcacctccattactatggaagagctgcagacgatccgggattccatgccggaaggaaccgcactcttcagtgatattaccagagacagcttcctgtataccatgatgaactattgcggcagtgatttcgtggatgtatccacaggaaaatgtgcatttgatacggataatttcgtggcaatgctggcctatgcaggcgagctgccggtagaatatggagaggattactggggagaggattactggaataattatgaatcccagtaccgcgaggacagaaccctgctggataccatttccatcagcaacatccgtgacctgaacggtacgatcaacggtgtcttcggtgaggatatctcctttgtaggcttcccgaccgatggagat

SEQ ID NO: 5619 - DNA, 6000 bp, Unknown
  gut microbiota DNA sequence
ttcttcagtggcaagcgctgcgtagctatcatagcaggtgtagtatctattctggcatctgttgtactgctgttcgtatggcctttattgttcggcggtctggtagctctcggtgaagctatcataggaatggatgtagtcggcgcaggtatttatgctttcctgaaccgtctgttgatccctaccggattacatcacgcactgaacaacgtattctggttcgataccatcggactgggagatctgcagcgcttctgggcaggtgagacaagcgctgatgtatcctggagccttggaatgtatatgtccggcttcttcccttgtatgatgttcggtatccccggtgcagctctggcaatggtaaaatgtgcaaagcccgccaagaaaaaggcagcgatcggtctggtagcttccgcagcaatctgttccttcatctgcggcgttaccgagccctttgagtttgcattcatgttcttagctcccggactgtatgtgatctatgcagcactgtacggcatcttcaccatgatcactgttgctcttggcttccgtgcaggcttcagcttctccgcaggtgcgatggatctgtttttctcatcctccctgcctgcagcagccagaatctggctgatcatccctctgggtatcgcagcatttgttgtattctacttcgtattcctcttcgctatcaagaaatgggatctgaagacccccggtagagaagatgatgatgtagaagcagagaagaagatcgagctggcaaatgatgatttcgcagcaatcgcagcaaccattctggaaggctgcggcggcaaggacaacattgcaagcattgacaactgcatcacaagactgagactggaagtaaaagacattaccgcagtggatgataaggtgatcaaatctgcaggcgtagccggtgtcatgaaacccggtaagacctccgttcaggtaatcatcggacctaaggttcagttcgtagcagatgcattttccaagctttgcgaataataaagtactgataaaactaaatatatgaacggaagagagacctgcatgggaagaccatgcgggtctttcgttctaaatgggtaaaaaatataggaattcccggaggtctgtgctatactgataacataaatttacaaaacacatgatatctgcagattaggggggatttcttatgacagaacaacaatatgcaagagcaaacaggcggggaatgctggcagcagtcattatatttggttatgtcgcattgacaatggcagcagcactggcagcacagaaggatggaaattcaggaaaaatactgatccagctgatcacatcggtattggtcattataatgtcggttctggggtatctgttccagaagcggacacatatcggagaggtgatgatcgcttcggccatggctgtggggtatgtagttgtcatactgctcaattctgcaaaagagacctgggcatatgcggttccgttggtcattgccgtgatggtatacatgaacatgcggcttatgatgatcgccaatacggtggtactggcagccaatgtgattaggatcctcatgcacatgaaaatgaatggagggcaggcggccggtggagcctttgtaaatgatttccagtctttctttgtattgttccttacagcctatgcttccatcagtattaccaaaatgctgatcatcttcttcaatgagaatatgacggcaatccgggaggctgctgacaggcaggcagacagcaacaggaaaatgactatcgtggcggagaatattacgaagaatttcggagaagccatgggaatgctggaggaactggagaaaagcattgatatcaaccataattccatgaaggatatcgcagacagcactgagagtacagcagacgcaatccagaagcaggcactgatgtgtacagagattcaggagaatactgatgcagccggtaaagaaatcaatgaaatggtggcagcctctgaccagaccggcaggacggtaagcgacagccagaaggtggtgctggaactgaaagcgcaggagcagcgtgtgaaggaagccagtgatgtcattgtacaggtagtgggtaatctgacggagaaggtaggcgaagtacagaatttcatcggttctattctgaatatttccaatcagacgaacctgctggcactgaatgcatccattgaagcggcgagagcaggagaagcgggcaggggatttgctgttgtggcagatgagatcaggcagctttccgagcagacgaaagaggctacggcacgtatcacggagatcatccagtatctgatcgaggatacgcagaaggccaatgaaagcattcaaagctccgtggaagctgtcagcagtcagagtacccttatcgatcagaccagagagcagtttggggatgtcggtaagaatgtggagacattgctggccaatatccatactgcggaacagagtatacaggaaattctgaattccacatctgcgatatcggataatattacccatctgtcagccaccggtgaggaggtggctgcggcatctacggaaggaatgcgtgtgaccgcagagaccgtggaaagcatgaagaagtgtaaggagattctgaataatatttatctgctggcagaggatctgaagagttccgtacaggaataatttcctataatttaataaacagtttattgacatttactttggaaatgataaaatcatgacggagaaaatcagtgggcctgatgcctgcggaatgtattgtaatgtaatggagagaaaagtcatgaaaaaatcaacaggaaagaagggaaacgggggattttcattagtagagctgatcattgtaatagctatcatggcagtgctggtgggagtactggcaccgcagtacctgtcttatatacataaggcaaaggtggcggcagatcaggcgaatctgaagaactattttacggagatccagatggattatattactacaggaaagtataattccatggtacctaccgtacaaaatagccctgcggattatatgcagagggaaattcattttctaaacgggcagaccgtgaaattaaaagcaggatattttgctgtgacagaagataccagaagtcagggaggctacaatctatgctatcattgtgatctgtgcacggctgctgatgcagatgagcagacaaaacaaaagcatctggagacttgtatgattacatttctgtgatggtggctgataggaatatgttatttttccagacataacccgatattatcagaaatgcagcagatgtatccatgcttcccggcgtaggcggctgcctgtctgcggatggcaggaaccgttgcgtattccagggtgtaagcggtacagccgtgtgacatagcaaaatctaaataatcagtatagtattcacgtgtacttttatcgtttatggtatagatatcctttgaaaaatcatacgcagtaaaaacgttctcctggtttaccccatcgatgagaacgtttttttctgttgtaagatatttttttacaaaacagtccccaccgttgatcatgatctttctgccggtatggtccatatagtccagaatcgtaaggattccgtcatagatggattcttgcggatagttatagtatacatccgtgttatcgacaaaaaagccgtccacacccttctgcaccagagagtctactctggaagctgtacatgcctgccattccggagctgagacatcgatccatttttcctccggccagttctcataagcgcccagtgtatatttctcaaagtctgtatcataggatcggaagttttcgatcgatccgatattgatataggagtagatttcacggacaccattttctcttaaacaggcaatgtcattttgggaaaaatattccgcatctatgacaagcagatcaatgtcagaaagtttttctgtgatctcaggatcttcgccgatcaggacaatgtatttttctgcactatcggaggtgctggcggagcaggcactgagcagggctgtagataatatcagaatgagaacatatattatttttatgaatagcttcgttttcctcaattaacggtacctcctttttcgcttgatctgcttcaatatttgtatccagataattatactatagatggctctacatttcatgtatttctgttaactattcagagccatacaaaatactgaattcaggcagataatgtcgaaaaaaatatctgtaaaaatattaaaaagggcgaaaaatattgaaaaatgtggtataattttttatgtaaatataagataataccgggacaaaaagtccccggatttgatgcgttcggcggttaagacaaccgggaaagtaggaagttatatgaagattcaggatttttgtgacatggacaaatttgaacagatcatgaagaactgggcaagcagcacaggcctggcaaccgtggctgtgggtgcagacggaaaatacatcagtgactgttataattttacagaattctgtattgatctgacgagaggaagcgcagaggggaaaaagcgctgcgaacagtgtgacagagaaggtcatggcgtatatccctgtcatgcgggacttgtggatttcggtattccgatcacactggaggatggaaccgtgctgggaagtattatcggaggacaggtgctgccggagaatccggatgaggagaagttccgtcagacagcaagagaacttggcattgatgaggataaatatatcaaggccctgaaaaaggtaaatgtgaagacaagggagcagatcgacgcttcggcaaatctgctgggagatgtgatcaacatgttcgtaagagccagctacgtcaacaggaaaaacgagaatctggtaggtgagctaaagggtggcattacgaaagctgcggaacagatcgaggaagcaacggacaagaccaaggaaatcgatggctacagcaagagacagcagattctggcactgaatgcttcgattgaggctgcaagagccggagatcagggcaagggctttgccgtggtggcaacggaagtacagaagttagcaagagatatggcgacctccagtgcggacattaagaagctgttgggagagctgcatgttacgatcaaccatttgaatcaatagtaatttagaataaagtttacggaaaaccgtttttctgatccacaaaggcgcagaaaggcggtttttttgcacatttttgcatgtttccttttggtgtgtataaaaaagtcggagaagttgtccgatattctcaatagaggaaccaggtaaacaaacggatttggcatttattttcaaggaggaaataattatggcgggaatcggagcaaccggcagcgtaggtgcgtatgctgcgcagagtgattacagcaagagtacgaagacgaagaagcctgaggtattcggaacgccggataagacagccggcacaacaggtacgggaaagacgtccgaaacggcacagaccaggggaaagactgaggattacggcagaaccatcggtctgccggagctgtcggagaaggctgcgaaatactatgagcagctgaagaagaggtacggaaattatgattttattctggtcagcagagatcagaaggagaatgcaaaagccaatgctgcaaaatatgccaatggctataagacggttgttctcattgatgaggacaagatcgaacagatggcaacagacgagaaattccgcaaacagtatgagggaatcttgagtggtgccgctgcacagatacagcagttaaagaccagcctgcagagttccagtgcgcaggtcaagggctttggaatgcaggtaaatgatggaggaacactgtcatttttcgctgtattgaagaaatccagcgccgagcagaagacacggatcgagaaaaaggctgagcagaagagagcagagaaaaaagctgcggagaagaaggctgcaaagaaagaaaaggaagagcagttaaaggagaag

SEQ ID NO: 5620 - DNA, 1903 bp, Unknown
  gut microbiota DNA sequence
taagccagaatatcgtccacctgatggttgtagcggtagctactgtccttgtattcggcgggaactgttacggtttccccggccgccgtctgctctgcactgcggatgaacagcgtgttgagcatgaccatcagctccatgaaagcggcgtattccgtgatgtcatgggcaaagccctccgcggaagtgattttgttgatataatagaggaaacgtttctgctgttccttgttgagcgaaagcttatgggaaaagggggcactgcggtgggtgaagcaaaagctcagatccgtctctttggtggagatcagcttcatgaaatccggcgccaccgacagaacgatacgttcgtggacggagttgtcgatctgggtcagcttgtgactttcgtactggttgatgataaagagatcgcctggggcgatggtgtagaagcagttgtcgatcagaaactgtttgccgccgcagatggaatagtagatctcgtagcagtcatggatgtgcatgtccatggctttttcttctttatataagtgggcaatggcaaaagtcccggaggttttacagttatctatggctgttttacaggaggtaagttcttccatttctttcatccttttcgctttttcttttattaaacaccaaaagttcaaaatttgcaatgtttagattaaaatatgaaaagactttgagaatcttttctagtatacttaactcatacaaaagagaaaagcagttacagccttccaaaatttttataaaaaatagtaaaaatgtgttggaaatggttacaatgatatgttataatgtaagtgctttcataaaaaggtaacattcaatagcggcacgcaggccgcccgttgaggaaagagaggcgtaaggtggaacttagaacagcagtatcaccaagagatgtgaagcattacaccacagagcgtctgagagaagagtttctgatccagaatctgttcgtacccggcgagatcaagctggtgtacagccacatcgacagaatcattacaggagcagcagttcctgtaagccctatcactctgaccgccggagatgaactccgtgcagagtatttctgtcagagaagagaactgggtgtgatcaatatcggcggagcaggtatgattaccgttgatggcaaagtgtacaaggtaggttacaaggaagctatgtacataggaatgggctccaaggagatcattttcgcaagtgaagatgagaaacagcccgctaaattttatctgaattccgctcccgcacataagacttatccgaccgtgctgatcaagccggaaggtactcccgaagagggcgtggtcattgtaaaggatgagaataaagtagaactgggtactctggaggatgccaaccacagagtaatctgcaagtatatccttcccggacaggtagagagctgtcagctggagatgggtatgacgaagttagagcccggcagtgtatggaacaccatgccttgtcatacacatgacagacgtatggaagtatatctgtatttcgatatgcctgaggatgcctttgttatgcactatatgggtgagcccgatgagacccgccacatcgtaatgcgtaacgaagaggcagtcatctcccccagctggtccatccattccggatgcggttccagagcatatacctttatctggggtatggtcggagagaatcaggacttcgatgatatggacggcgttgacaacagagatctgaaataagatcctttggaacatgtaactaaaataacagtttttataaagaaaaggagaaaaaacaatgtctgaattcactaatttctcactggaaggtaaggttgcactggttaccggcgcatcttacggtattggtttcgctatcgcttccgcatacgctgagtgcg

SEQ ID NO: 5621 - DNA, 933 bp, Unknown
  gut microbiota DNA sequence
ttgtaaacacagggtttcaggttctctttcactcccctcccggggtccttttcacctttccttcacagtactctgctctatcggtcactaaggagtatttagccttacggggtggtccccgctcattcccacaaggtttctcgtgtctcgtggtactctggatcctgctctgcttccttccgtttcgcctacggggctctcaccctctctggccggtctttccagaaccgttccgctacagtcagaagtcataaatgcagtccgaaccccggagtgcacgcactccggtttgggctctttccatttcgctcgccgctactttgaaaatcgagttttctttctcttcctccggctacttagatgtttcagttcaccgggttccctccgtacacctatggattcagtgcacggtgactgaggtatgctcagccgggtttccccattcagaaatctacggatcaatggatatgtgctcctccccgtagcttatcgcagcttatcacgtctttcatcggctcttagtgccaaggcatccaccctgcgctctttttagcttgacctaattgcttattcaaagcttttcacgcctagcgtggcgctactttaggttttgtttcgttttgcttgtttgatcttacatctctgcaagatccctcggatgtcttgttatatcgttttgcaaacttgatataatagattttaatttcaatattcggttttcaaggaacaaatttcaacaagtaaaacttgttgagtggagataaagggattcgaacccttgaccccctgcttgcaaggcaggtgctctcccaactgagctatacccccatgggaatctggcagccacctgctctcccataccgtctccagtatagtaccatcggccgcttaggtcttaaccatcgtgttcgggatgagaacgggtgtgtcccc

SEQ ID NO: 5622 - DNA, 1606 bp, Unknown
  gut microbiota DNA sequence
gagacatgtgtatcgcatgctccgggagttcgtggattttgccaatgtatttaactaactttccattttatgcagagatgattaacctaatacaccaaaagtgttgggtatcttttctaattgtcatttgtccggctggtccgaatgtctattgctgtgttcccgtagatgaaaagcattggcggcctgccgacggcgttgttcttccagtgcggcatagtgttttcttgtggtatttacatctttatgacccagaacatctgctaccagatagatatccctggtttctttatagagttcggtaccgtaggtactgcgtagtttatggggcgtgattttctttaaggtggttacccgggaggcatatttttttaccagattctctacggagcggacggccatccggcgactctgcagggacaggaacagagcattctcatgtccttcggctggaatgatatgttccctttgctccagatagtcgagcagagcggtttctacttcatcgccgaagtagacgattgcttcataaccaccttttctccggatcttgatgccgccgttattgaaatccacgtcgttaatatccagacctacacattccgatacacggatgccggttcccaacagaagcgtcaggagggcaacatcccggagctttgttttcttgtggtattccagttcctttttggtcagcttggtgccgtcctccacctgatctaacagaatagccacctcattgggttccagacggatgatctctttttcatgacgcttcggcagaggaaccagtgccgctgtgtttttctcgatacgttcgctctgaaaatagtaattatagaagcttcgaagagcagccagttttcttgcctttccccgttcctcgttcgtaatatttttcccatccttctgatacaggctcatatagtccagatattcttcgatatccgtccgctgtaccatatccagaacggaaaggggaaattcagtaatctccattttatggcaataactgtttttctcatggagaaattcaaagaaaagtcgaatatcataggcataagccagtcttgttctggtggaagtataaggctcaattccacggaaaaaatctctgcagaagctggggagcgtatccagaaccttgcggagttttaagatattgtttttattctgttcatcgtgataattttcttcgttaatgactgccaaagtaatctgaccaaccttccatatttcctcgttggatcgcggtgaaaatacgatccctgacaccgggattttcccgatgaatctgttgtaataattctttgatgtattcccgcttggtatgtccgtctgcgggacagggacttttgaccacgggaacctgatatttgttcacgaagccgatgacctcggcttcccgcatatagattagcggccggatcaccgtcagtccggttttgtccagatgcgttaccggggaaaaggtatgcagacgtccctcgtaaaagagggagagcatcatggtctccacaacatcatcctcgtgatgggcataggcaatcttattgcagcccagatcctttatggcgtcattcagagcgcctttacgcattttggc

SEQ ID NO: 5623 - DNA, 3116 bp, Unknown
  gut microbiota DNA sequence
ataaatgattatttagcgtatcaatcttcaatggtggcttgaccattcatgagcatcggaaggagccagtcacgtaaattggataacctttgaatttcctcataattctttgattttaaaggaaatatagatgcaagcctttctttaaattttaaaatgacagataatggtggtacacatagttctgtttccagaagggtatttatacggatgcctttaaatatacttccagtagagctagatgttgcatgtttaataaaagcatcactcataaaatataaatacaaaaatgctggcgtaataatatcagtgtttgcacgaattgaaaatacagattcgttgatatcccaatccgtaggttctgattgaatgaggtagcaacgtcctaatggggcgatacttgcaaataagatatctcctatttgaatatcagatctgttatgaacgatagttcgtgcagattcatcaatagtgtcacaacctgtaaaatctaaagttccattaggagtcagattttttacagtaatgtattttatatcacctgttcctagtttaaaattatctcttgggttcaaaccagtgcaaatatttgaaataatatcttgtactttacaaaatgtccagccttctggaataatgtgaccattagaatttaccattttaccgccggaggacttatatggtttaccgttttcattcggaaaatcaaactgtacaaaccaatagtcatagatggtctttgccatctcttctaaataatcatttataatagaactattaactcttgaaagtggcgagagcaaaaaaaggaactccacttcatggtggttctcacatataaaggagaaacacatgaaagaaagagtaataacggagattatcaatgaaatgcttccgtcgcttaacaatgaacaattaaaaaaattgaaggatgtactagaggtaaatctgtacaatgttactattgtaaccaaggaagaagagaaggagcaggacacattggattacttggagatatttttatctgcaaagagaatagaagggtgttcagagaagaccttaacatattacaaaaatacaattcatcaaatgatggaaggtatcggaaaaacggtatgtacaattgaaacagaagatttgaggacatatttatctaagtatcaggcagaaaaggaatcaagtaaggtgacaattgataacataagaagaatattttcaagtttttttgcatggctggaagacgaggattacatcatcaaaagtccggtacgcagaatacatagaattaagtctgccagtgttataaaggaaacatatacagatgagcaactggagaccatgagagataattgtgataatcaaagagatttggcattgattgatatacttgcatcaacaggaatgcgagttggagaattagttctgcttaacagagatgatatctcatttgatgaaagggagtgtatagtatttggtaagggtgacaaagaacgaatggtatattttgatgcacgaacaaagctacatttgcagaattatcttgaatcaagaacagacaatgaacaggcgctatttgtttcacttaaagccccgtacaggagaatgaaaataggcgggatagagttacgacttcgtgaaatggggaaaagattgaatatagataaggtgcatcctcataagtttagaagaaccttagcaactgtagcgatagataaggggatgccaatagaacagttgcaaaaattactaggacatcagcggatagacacgacattgcaatatgcaatggttaagcagagtaatgtaaaaattgctcatagaaaatacattggatgatataggagacttgtgtgcatgaagattaaagatataggacatgtcgttactggaaaaacgccgtctactgaaatagatgaatattatggcggaaatataatgtttatttcaccttctgatttacatggagattatttaatagaagaatctgaaaagaccattactgaagaaggattgaattcaatagaaaccaattctattggtggattaagcgtgcttacaggctgtataggttgggatatgggaaatatagccatgtgtaatagtagatgtgctacaaatcagcagattaatacaataacaaggtttaatgagagtatagcagatcctagatatgtttattattggctcaaggggaaaaaagattatttgttttcaatagcatctgtaaccagaactccgattcttagtaagagtgtttttgaggatatagatattcctataccatgtctggggttacagaaaaaagtagccaatttattgagcagtatagatgaaaaaataagaataaataacaagataaatgattatttagaagagatggcaaagaccatctatgactattggtttgtacagtttgattttcctgatgaaaatggaaatccatataaatcttttggtggaaaaatgacttggaatgataaattaaaaacacaaattcctcaatattggcaatccggaactttatcagcatacggaatgattctttctgggggcacaccatttacaggaaacttaaatttttatgcagaagaaggaattgcctggattacaccaaatgatttatcaaataatactagtaatatgtttatttcacatggtgaaagggatatatcattacaagggcttaatagcagttctgcaactcttataccaccagaatccatacttcttagtacaagagcacctattggctacatagcaatatcaatgaatgaattgactacaaatcaaggttttaaaacacttgttccaaacaataccgacaacacctgttttttatattatttgcttaaacgcaacattccatatcttgaacagatggggacaggaaccacctttaaagaggtttcaaaagactcaatggaacatcttttagtgatacttccaccggacaatatactaactcagttcactcaaaaaataaagccatatatgatattgcgtaaaacaattgagcaggaaacaaaatggcttatttctgtaagagattggttactcccaatgctaatgaacggtcaaaccattatcggagattgatatgctaaataatcatttat

SEQ ID NO: 5624 - DNA, 3607 bp, Unknown
  gut microbiota DNA sequence
ctttcatcttctccagcttttttgcactctttgctgaatttttcctgataatatcatcaaaatccatcttatcaatgtgtttgttaataacgatctgctggatacttctaacaacactacctgctacccagtaaagaccaagaccggatggtaatgtgaagcagaaccatgcagacatcaaaggcatgatcatattcatggtcttcatggaagaagccattgctgcagcctgatcattaccattattagaagaagtatcctgctgaggcatcagctttacgttgatccactgtgtcaatgcagacaaaaccggaatagcgattgcaccgattaccagcagccatgctccgttagcccatgcttccttcaacacataagaaggagagttgccaatattcagtcctaaaaaattattatactcttccagcttgcttaccgtattggtcacatctgctgcaagagaaggaaacttctcactgatactggcaaaatcagcggtagatgctttgttcagacagtcaatgatcgtattctgtacatattcactgtgagtgccggctacaaagcctgaattcgtgaactgcttactgtacatagcggaattactcagattctgaaccagctctgttgcaccggctgtatcaataatattatctaccagagggaagaaggcttccttaactctgcctacataggccggaattgcataaattacacgatacagagcaaacagaataggcatctggatcagcatatacagacagctgcctgtaggagatactccatacttggcataaactgcctgaatttcctgattctgtgccagctgtgcatcctgatccttacgattcttgtattttgcctgaattgcctgaatctcgggattcattttagcagaaagtttggagaatttctgctgtttgatggtaagaggcatcatcaacaggttcacaacaattgtaaaaaggatgattgcgagaccgatattaggaataccgatcatgttcagaacttcgaagattccttccattatcttaccaagcagccaggctacctgtccaataatgaatgtggaattctgtgtcaaaagaataccgttcatttatcctcctaatatttgccaccttctatcggatattctcaaggtacaggatcatatcctcctttagagaaaggattacatcgaagaattctccatgcagccagaagtcctcccttgatcacaccatatttttcaatggcttccagaccatattgagaacaactgggaacataaggacacttcgtacctttgtacggtgagatatatttctgatagaacctaatcatggctataactaattttttcatatacaaattttatttaatcctgataaaaatagatttttatcagatgatgaagttttgcaagatgcagcagcgcactttccgcttcttcatatcctatagaagctgcggccggtcttgcaatgattaccatatccaaaccactattgaatacactttcatgtaatctgtaactttctctgaccagtcgggtaattctatgtcttacgacactattaccgacttttttacttacactgattccgattctgttcttatcaaggccattttccttcacatacatgataaagtacttgttggcataagatctgccattcttgtacacaaaacggaactgctgattattttttaatgattccgaaaactgcatgcactcctccaaccgtgaaagttaagagaaaaaaaggtcacattgctgtgacctatgcggataatttctttcttccttttgcacgtcttgctgctaaaacttttcttccaccaggagtactcattctggctctgaaaccgtgaaccttggaatgggaacgctttttaggctgaaatgtcatcttcatggaaaggcacctccttctctaaaccttcttatataaaaaggtaaacatatttttcaacatttgggcgcataaaaaatgcgccttcctttcggaaaatagcatattgattgtaatgtaaaagcccgtcaatgtcaagcaaaattcaataaaaatgctgaaaaatcaagagaaatagggctttctgaaattcataaaattttttaaatcgagttatccacatagatatacaccatatttacccacaaacgagttatccacagcctgttgattatttgtggatatttattttttcacatggatattctgtgtaaatccggtgtaaaagtggacaagtttaccgtaattgtggatatctcgaaatttgtcggatttatccacatatacacatcactatccacatcccctgttaatattcccagttatgaacaactttatcaacaatatgtggataactttatccatgacctgttcataacttgcatttgaattatttttaattctattatacaatgaaatggagtttcgcacagtgggactcttagcgggaggaaatcaatggacgcaatcaaagaaaactggacaactgtcaaagaagctgtcagaagagaatacagtctttctgacatttcttatcatacatgggtggagcctttggagtttcataatgtagtgaatgatgtagtgagcattatcattccctcggaccaggcccatgccctgaattacatttcatcaaaatataagagcttttttcaggtaactattaccgaaatgttcgatcatccttatgatatcaactttatcctggagaaggatgtcaaggcagaagaacctgctgagaatgaaatggctgttcccaatcagatctatggtattaattatgaagatgcccatctgaaccctaagtacaaatttgatacctttgtcgtgggaagtaataacaaatttgctcattccgcatcccttgcggtagcggaatctccgggagaagtctacaatcctctctatttatatggaggtcccggtctgggcaagactcacctgatgcattccatcggacattttattttagaacaggatccggacaaaaaggttctctacgttaccagtgaggaattcacaaacgaagtaatcgaatccattcgtagtggtaatgcggcttccatgaccaagctgcgtgagaaataccgtaacgtggatgttctcatggtcgatgacgtacaatttattataggtaaggaaagtacccaggaggaattcttccatactttcaatgccttgcatgctgcccataaacagatcattctgtcttccgataaaccgcccaaggaaatggaaactctggatgaaagattccgttcccgtttcgaatggggcctgattgctgatatccagccgcccgattatgagacccgaatggcaattttacggaaaaatgcagagacctacgatcgtcagattgatgaagagatcatcaaatacattgccacaaatattaaatccaatattcgtgaactggaaggcgcgtttaacaagatcattgcttttgcaaaattaaataaggtagatctgacactctctctggccgaagaagccctgaaggatgtcatctaccccaacaagccaaaggagatcactcctactctcattattaatgtagtggcagagcattttggcgtaaagccggaagatattacttccaa

SEQ ID NO: 5625 - DNA, 1699 bp, Unknown
  gut microbiota DNA sequence
aaaagaccatacaacgatcattcacggcgtaaataaagtgtctgcagagatccagacgaacgaagaacttcgtaataaaatcgatattatcacaaagaagataaatccttcttagaagatatctgttaataatttttcttattctgaggacaagttgtgtatatctttagaataaacggtgttcacctgttgataacttgttttaaggttccggaacagaatctggacggtgtgaataatctgagagttattcttaggttattctgccaaatccactaagatttccattccattttgccttgaaaaatagtataataagactggttatgcacatatcaacaccccttattaaggtgactacgaaattcttttaatatttttatacaacgcgtatctgcgcgtacgcaaatcaaccagaaaggaagttatgcacacatgaaattagtctgttcgaaagccaatcttttaaatggcgtacaaactgtatcaaaagctgttcccagtaagactaccatgtctattctggaatgtattttagtagatgctaccaatggagagatcaagttaactgccaacgatatggaacttggtatcgagactaccatagaaggacagatcgtagaaaaaggtatcattgctctggatgcaaaaatgttcctggaaatcgtacgtaaacttcctgacagtgacattaccattgagactgatgcttccttcaaggtagttattacctgtgaaaaagcaaaattcacgatcatcggtaaatctggtgaagatttctcttatttaccggcagtagaaaaagatgacagtattgtcatgagtcagtttacactgaaagaggttgtaagacagaccatcttctctatctctgacaatgataacaataagctgatgacaggtgaactttttgatattaacggagaagagttcaagatcgtgtccctggacggacaccgtatctccattcgtaagatccagctgaagaacagctattctccgaaaaaggtagttgttcccggcaagactctgaacgaggtaagtaagattttacccggagatgcagacagtgatgtaacgatttcctttacggaaaaacatattgtatttgaatttgataagaccgttgtagtatcccgtctgatcgagggagaatattttaagatcgaccagatgctttccagcgattatgagaccaaggtaagagtcaacaagaaagagttcttaagctgtatcgatcgtgctactcttctggtaaaggaaggcgataagaaacctattatcgtaaatatcacagacagtggaatggaacttaaaatcaattccgctctgggaagcatgaacgaagaaatcgatattcagaaacagggtaaggatctgatgattggattcaatcccaagttcctgatcgatgctctccgtgtcatcgatgatgaggaagtggatctgtatatggtaaatcccaaggcaccctgctttatcaagaatgcagaggaaagctatatttacctgatccttcccgtgaactttacaacagttgcttaaacttaagaacagaggttaaatcaatgcatacgatccgtttaaaagatgattatattaagcttggtcaggcattaaaggcagccggtgtggtagaatccggcgtggatgccaagttcgccgtacaggatggcctggtaaaggtgaacggacagac

SEQ ID NO: 5626 - DNA, 10333 bp, Unknown
  gut microbiota DNA sequence
ttgtcctgcagtttgaccgggggacaaatatcctctacggagacaatgcgcagggcaagaccaatattctggaagcaatctatgtagctgccaccacaaaatcgcataagggaagcaaggacagagaaatcgttaatttcgacaaggaagaggcacatatcagaacttatctcgagaaagacggtaaagaaatccgtgtggatatgcatctgagaaagtccaaatccaaaggaattgccatagatggccagaagatcaagaaagcagcggatcttctggggctttgtaatgttgtgtttttttctccggaagacttgggaatcattaaaaatggtccctctgagcggagaagatttgtagatatggaactgtgccagctggacaatttctatctctacaatctcaatcattacaacaaaattgtcaatcagcgtaacaagcttctcaaagatatgtatatgaatccggatctgaaggaaactctgactatctgggatatgcagctggtatcttacggaagtaagatcatagagagaagaaagctgttcgtggaacagctcaatgagatcatttatgagattcataaaaaattgtccggtgggcgggaagaaatccgtatccagtatgagccggatgtggaactggatgaatttgaaagtaagctgagaaacagtcaggaccgggatatgcgggcaaagatgacatccgtgggaccccacagagatgatttttcttttctggtaggggacgtggatatccgtaaattcggatcccaggggcaacagcgtactgctgctctctctctgaaattatccgagatcgagctggtaaaaaggattacaaaagatacgccggtattattacttgacgatgtattgtctgaactggacagtaaccggcaaaactatctgttgaacagtatcggagatattcagactatcattacctgtaccggtctggaggaatttgtaaataaccggtttgaaatcaaccgggtattcaaagtatctgccggaactgtcacctgtgtaaatgaaaatatgggactgaaatccgaaccggaagaaactccggaagatgcgtataattttggcagcctgtagggcagaatgtgaggaatcatgagcgaagaaaataggaacaataccgcagtagaacatgaatatggcgcggatcagattcagatattggaaggtctggaagctgtaagaaagcgtccgggaatgtatattggtaccacatccagcagaggactgcatcatctggtatatgagatcgtagacaatgcggtggatgaagcactggcaggattctgtgataccattgatgtaaccatcaatgaagacaattccatcaccgttattgataacggacgaggaattccggtaggcatcaatcacaaagcaggtatccctgcagtagaagtcgtatttacgattctgcatgccggcggtaagtttggcggtgggggatacaaggtatccggtggtctgcacggtgtaggtgcctctgttgtaaatgccctctccaactggctggaagtagaaatttgccagggtggcaaggtatataagcagcgttatgagagaggtcatgtatgctatgctctgaaagaaatcggcacctgccctatggaaaagtccggaacgaaagttactttcctgccagatgatacgatttttactgagacaacggtatatgattttgatgtattgaagagaagactcagagagatggcattcctgaccaaggggctgcgcatcattttaagagataatcgtacggaagaggaaacttctctggaaagtggttctgtcgttgacagtgcagctgcggaagctatgtctacagagcacgaaaagaagcagatcagtgaactgttacagagggcacaggaagatgccatggaagcaggagcatccacagaagcaatgacttccgaagaaacttcagcttctgcggatacagcaaatgactctgaagcatttgcagacgcttttgctacgtccgaggaatccaccaaagcccataccggcggcaagatcggtaagatacataccattactctggaaaatggtaagaagcagaaagtcgttgagttctactatgaaggtggtatcaaggaatttgttgcttacctgaacaaaagtaaggagcctttatacgaaaacattctgtattttgagggtgagaagaataatgtgtacgtggaagtatccttccagcacaatgattcttataacgagagcgtattcagctttgtaaataacatcaatactcctgagggaggtactcatttacagggcttccgtaatgccattacgaagacatttaacgattacgcaagaagcgcaaagctgttaaaagacagtgagccgaatctgtccggtgaagatatccgtgagggcctgactgccattgtcagtgtcaagatcgaggatcctcagttcgaaggacagaccaagcagaaactgggtaacagtgaggcaagaggcgctgttgacaatattgtcagtgagcagctgacttatttcttagagcagaatccgcagattgcaaagtccatctgtgagaagtcgattctggcacagcgtgccagagaggcagccagaaaggcaagagacctcaccaggagaaagaccgctctggataccatggctctgcccggtaagctggcagactgttccgataaggatccgaagaactgcgagatttacatcgtagagggagactccgcaggaggaagtgcgaagacagcacgttcccgtgcaacacaggctatcctgcccctgcgtggtaagatactgaatgtagaaaaggcaagactggataagatttatgccaatgctgagatcaaggcaatgatcactgcttttggtaccggaatccatgaggattttgatatttccaagcttcgttacaacaagatcattctgatgaccgatgccgatgtagacggtgcgcatatcagtactcttctgctgactttcatctatcggtttatgccggagctgatcaagcagggacatgtattcctggcgaagccgcctctgtataagctggagaagaacaagaaggtatggtatgcctacagtgatgaagaactggacagcattctctctgaagtaggtcgtgaccagaacaacaagatccagcgttacaaaggtctgggtgagatggatgcggaacagctctgggagaccaccatggatccggagagacgtattctgctcagagtaaactacgatgaagagactgaatccgaactggatctgacctttaccacactgatgggtgacaaggtagaacccagaagagaattcatcgaagaaaatgctcagtttgttaagaatctggacatctaataactattcagagccgttatcaggctctgaatagttacggtatttaataatagagagtcgtattttacgacagattgtgaggaaacatgaacgacgatatttttgataagccttcggaggctgagattgataaaatccatgaagtcgatctgaaagaaaaaatggaaactttctatatcgactatgccatgagtgttatcgcatcccgtgcgcttccggatgtgagggatggtctgaagccggtacagagacgtgtactctattccatgatcgaactgaacaatggtcccgacaagccgcatcgtaagagtgcccgcattgtcggtgataccatgggtaaatatcatcctcatggtgacagctccatctacggtgcattggttaatatggcacaggactggtctacccgttatcctctggtagatggccacggtaacttcggttccatggatggtgacggtgctgcagcaatgcgttataccgaggcaagactttccaagatttccatggagcttctggcagatatcggtaagaataccgtagattttgtaccgaactttgatgatactgaaaaagaacctgtcgtactgcccagccgttatccaaacctgctagtcaacggtactaccggtattgccgtaggtatggctaccaatattccgcctcacaaccttcgtgaagtggtacaggctgttgttaaaattattgataatcgtgtagaagaagacagagatactacgatcgatgagattcttcccattgtgaaagctcccgattttcctaccggaggactgattctgggtaccagaggctgtgaggaagcttaccgtaccggccgtggtaagatcagagtccgtgcagtgaccaatatcgagacactacctaacggtaagagccagatcattgccaccgaactgccatatatggtcaataaggccaatctgatcatcaagattgctgagctggtaaaactgaaaaagatcgacggtatcacagatatccgtgatgaatccaaccgtgaaggtgtccgcgtggttattgagcttcgtaaggatgccaatgccaatgttattctgaatcagctgtacaagcatacacagcttcaggatacttttggtgtgatcatgctggcgctgatcaacaatcagcctaaggtcatgaatctgctggatatgctgacttattacctgaaacatcaggaggatgtggttaccagaagaaccaaatatgatctgaacaaggctgaggaaagagatcatattttacagggattgttaaaggctctggacttcattgacgaagttattactattatccgtggcagtcagaatgcccagattgcaaaagaacgtttgatggagagatttgaactttctgatgtacaggcacaggctattgtggatatgcgtctgcgtgctctgacaggtctggaaagagagaaactggaaaacgagcatcaggatctggtagcaaaaattgcggagttgaaggctattttggcagatgaaaagctgttattaggtgttattaagacagaaatgagtgctatcgctgagaaatacggcgatgacagacgcagtaagatcggttatgacgaactggatatctccatggaggatctgattccgagggaaaatactattattgccatgaccagtctcggttatatcaaacgtatgaccgtagataatttcaaagcacagaaccgcggcggccgaggtatcaagggaatgcagaccatcgatgaggattacattgaggatctgttgatgacgacgactcatcattatctgaacttcttcaccaatatgggaagagtatacagattaaaagcatatgagatcccggaggcaggccgtaccgcaagaggtactgctatcgtgaacctcttgcagctggcacccggtgaaaagatcactgctatgattcctattcatgaatacagtgatgataagaatctgttcatggtaactaagaccggtattgtgaagaagacccctctgatggagttctccaatgtcagaaagaacggactgacagcgattaacttacgagaagaggatgagctgatcgaggtgaaaatcactgactgcagcagtgaaatcttcctggtaaccaaacagggtatgtgcatccgcttccaggagacggatgtccgggctacgggcagagcttccatgggtgtcatcggtatgaacttatctcccggggatgagatcatcggtatgcagttacagacccagggcagcgatctgctgatcgtatccgagaacggtatgggcaaacgtaccaatatggatgaatttaccgtacagaaacgtggcggtaagggtgtaaaatgctacaagatcgtagaaaagaccggtgatgtggtaggtgccaaggctgtaaatgatgataacgagatcatgatgatcactaccgaaggaattattattcagctgcgtgtgcaggatatctccactttgagcagaattacatcaggtgtaaagctgatcaatctggatgagggtgttaaggttgcacagattgccaaggtacgtgagaagctttccaacggagaccatgaattcgacaatcttgaggaagccatggaagaagtagcacaggaagctgtttctgaggatgaggaagaagcagaagaaaatctgattttccctaccgaggattctgaagatgatgaataaataagagttaatgattaagttgagcacttttcatattgcagaaaaagatatatatgtgatataacaaaagtgctcaatttagtgagacacagataaaagcaagcggctgcgaagcagatatttgtttttataggctcacaagtgaacgaatatcccgcaaagcaggatgtaaaatgcaatagcacgaattcgtgaagttataatgtaataacttaaatgaaaaagaggggtatgaaaaatggaatcttatagtattttcagagatttggcaattattattgtatttgccaaggtgtttggtatcattgcgagaaaatgtaaggcaccacaggtggtaggtgagatcattgccggtctgttgatcggacccagcgtactgggactggtacagcagtcagattttctgatccagatggcggagatcggtgttatcctgctgatgttctccgcaggtctggagacgaatctgaaggacctgatgaagacgggatttgtggcatttctgatcgcatgcatgggtgtatttgttcctttggtaggaggaacattgttgtacatgggattttacggagtggcaccctggggctctgagaaattctatgaagctgtatttatcggtgtcattatgacggctaccagtgtaagtattactgtgcagtctctgaaagaactgggaaaactgaaaggtaaagtcggcacaacaatcatgagtgccgctattatcgatgatgtcattggtattattgtacttacttttgtcatcggatttaaaaatccggattccaatccaggaagtgtagtaatttctactcttctgttcttcctttttgcaattggtgtgggatttgtattgttcaaggtattccagtatctggataacaaatatccgcatacaagacgtattcctattttaggtctggcgctctgttttatttttgcttatgtagcggaagtattcttcggtattgcggatattacaggtgcttacgtggcaggtattatcctgtgttctattcaggattcggaatacatagccgagaagatggatatcaattcttatatgatcttcggaccgatcttttttgcaagtatcggacttaagaccagctttgaccatttgaacggagaatttgtactgttctctatcggatttgttattgttgctctgctgtgcaagatcatcggttgcggtctaatggcgagaatctgcagattcaaaggaccggatgccttgaaaatcggtgtcggtatgatgaccagaggcgaggttgccctgatcgtagcacagaagggattgtctgtgggaatgatcggtgcggaatactttacagcagtcattctgctgatcattgtatccagtatctccactcctatcctgcttaagattctgtatacgaagcatgccgagattgattaaaaaatatggatcatatggatcagaagcgttttgaagaagctaagagaaaaataataggcgtggaccgtcagagactgggaatcggaactctctcagagaagacggttcatgctatttttaaggactattatgagtcggacgaggatcatcaggagattcccatagagaattatgtagcggatatttatagggatggagaaatcatagagattcagacgagacagtttaaccggatgcggggaaaattgcagacctttcttcctttatatcctgtgactattgtctatccgatcccttatgaaaaatggctaatctggatcgatgaagacagcggagaactgagtaaaaaacggaaatcaccgaaaaaaggctgcacctatcaggcttttaaggaactatataagatcaaaatgttcctgaaggatccgaatatccgatttaagttcgtattggtaaatatggaggaataccggctgttgaacggctggagccatgataagaaaaagggctccacacggtatgacaggattccaacggatctggtcgaagaggtggaaatcagacaaccggaggattatctgcaatttgtgccctatgagctggaagaaccttttcacagtaaagattttgcaaaagccgcccacatccctctctcactggctcagaccgtattgaatattctgtttgaaatgggaacagtggaacgggtaggaaaacagggaaacagttatctatatcgtgtcgtggatgtataaaaagaggactaagctgtaagcttagtcctcttcgtcttcctgatgggatttcggcagggagaaaataaattcacttcccacgccgggagtactgatcacattgatatgctcatcatgtgcattgatgatctcttttacaatggaaagtcccaggccggttccttttttatctttgccacgggataagtccgatttgtaaaaccgatcccagatcagcttcagatcttctttcgggataccaattcctgtgtcttttacggagacaaacaatttatttttcttctccgaggtctcaatgtggatcacagaattatggtggctgaacttaatggcgttgtccatgagattatagagtacctgctggatttttcccatatctgcatggacatacatttcattgccggtcaggatcatctcaatagcaatggatttgttatgacaggtgccctcaaaggtacttgcagtattacggatcacttgattgatatcaaaatctgttttatctaagagcattcctttggtgttcagattattcagagtcagcaggctgttggtcagcttcgtcagtcgttctgtttcattcaatacgatagtaatgtatttttcgtgcatttccggtggaatcgtgccatccagcatggcttccagatatcctcttatagaggtcagaggggaacggaaatcgtgggatacattggctacaaactttttctgatcatcctcggaacgggcaatttcgcttgccatataattcagacaggaagccagataaccgatttcatcctcactgtccacctgaaattcataatgcatattaccggcagcatactgctctgtggcatgagtgatcttcctcagaggaatatatacgatctcagtgaaaaagatcagaatgatcagggatagcaggaacaggattgccagggtgatataggaaatattcagcaggctgttacaggatttctgaatatcattcatatcggtatggatgactacatagccttttaccttgtagttggaggtaatgggagcaaatacagtaagtacatccgaatcaaaattaccgaagaaatcaccaacaatgtaataggagccgctggtcacggtcgaatcaaaattctcaatgactatcacattctccacatctaagggactattggtatccagtaccagtcgtccggagggattgatgatgcgaatctcggaattcaggtagaccgccagggagtccagctgcattttaacagtctccaaagttgtttcacttgtgtacaatccgccggcataggttccggcgatcagggttgcttcggaatagagactttctgccttttcccggatcaggtgttctttggtcatattgggaacaaaagttgtaacaatgatgaaaccaaatacaccaaaaataaaatatgcaagtataaattttagataaagtgtttttttcataacaggtcctgcttttggtatgacttaattacgtacttcgaatttatagccgatgccccagatggtgctgatcttccagttggcatgatccttgatcttctcacggagacgtttgatgtgcacatccacggtacgggtatcaccgatatattcatagccccagatctgatccaggagctgttctctggtgaatacatgattcggtgaggatgctaaaaagtagagaagttccagttctttcggcggcatttccacagtatgtcccatatagatgacggaataattggtcagattaatggtcaggtctgcatattccacacacttgtcgttgggattctccgtgggggtattggagggcttgtaacgcctgagaactgctttggcgcgggccaccagttcctttgaatcaaaaggtttttccatataatcatccgcacccagctccagtcccaataccttgtcgaagacttcaccttttgcggaaagcatgatgatgggaacggagtattgtgcccggacttctctgcacacctgataaccgtcaatgccgggaagcatcagatccaacagaatcagattcggagcaaaggtctccatagccggcatcacggattctccgtcattgacgatcatggtatcaaaacattccttcgtcagata

SEQ ID NO: 5627 - DNA, 5395 bp, Unknown
  gut microbiota DNA sequence
ccttcccactaccgggcggattcgggactttaacccgttagaaacgtgcgccgctaggcgcacacgcataaaaaaacgcagaagccgttatggtttctgcgtttttcagttatattgcttatttcagtatttcttatttcgccatttctaaacctctttcgacacggtctccttcagctgctcagtggcgggttcttccggcttatggtattccgggaaatccaatataatcttaaacagatctccatccagctgaatctggaattctccgtgctgtgccttggtcagatttttcgcaatatacagacccagaccacttccctcggtagtacgggaagcatctccccggataaatctctctgacagttcctcacccttgagattcatgggccggtcggaaatatttttcagagaagcgatgactcttccgtcctttacctgcatctccagatagactctggttccctccagggcatacttgcagatattctgaaacagattttcaatgattctccacatcctgcggctgtcggcatagatcatgccggccacatcatttccgtcaaagatcacctgcagctttttctcttccattctgtcggagaattctcccactgcctgattcagcagttccgtcaggttcaactgttccagattcagcacaatgttaccggaggagattttcgaagcctccaccagatcatccgtcaactgtttcagtctctgggatttgctgtccagcacctcaatatagctcctggccggttcttccgtgatctttaggcgtttcagcagatccacataattgataatggaagtcagcggtgtcttaatatcatgggagacattggtgatcagatccgatttcatctgctcatccttcatgctggtgcttaccgccttgcggataccctctccgatgttattgactgcatccgccatctcacggttgtccccatgaagagattccacatccagcttataatccacttctccatcacggatcctgcggattccttccacgatatcgatctgctccgctttttgcttgaaccttagtacccccacaatgccgtccaacacaatagcccccagtgccggaagcacccacagagcgctttttccccgtagcagataagctccgaaaattcctgccagattcaccagtagaaacagattatacgggatcagtgagctgatggcggaatttctgtgggaaaccacaaaatgtaccgccttaccgaagcttgtgacgatccagtgcaggaaactgtcactccacatattgtgggatttgatcctgcggatcaggctgtaccagaaaacattgattcccatgcttacgcagaagccatacagcgcaaagacaccgtaggctgtcagccgtgtgatctcccgcccctggatctcggaatggctgagatataccttattggccacattcatcagataatcgtatccgattcttccgccatagataaatcccaccagcaaaagcgccatgaactcgatccagacatgatcgataccgttcaggtacagaaccggctcatcctcctcatcgtaagccacgccggccgttacggtaagataaatacccaccagcagccacaatactgccagcaggatccctccgccgatcagataccagatattcggaacgattctctggaacaccacattggcattgtaaaaggaatctccctccaccggataattggtatccactgcgatccagatatgagtcatatccggatgcacataaccatactctttcagatactgatagatctggccctcagtcattcctgtgttgccggtaaattccagactgtccggataatagatcagataccgtctgtactccgaaaaataatccgtaatatcattatcggaactgttctcaaactccgatacattcgtataggttctgctaactccatctgttgtcatcatacggaccacatatttcagattgcccgcatcttctttatacagatcattacagttctgatactgctcatagttggctgacaacgtctggatcgtcatctccagattgctctgcagcgcaatatattcgatccagttgtccgcacaggctgtcagctgcttctctccgtctacggtggcataacggttcaccagcatcgggaaatataccgtcagcgtaccatcgtcttctctggatacccggatatcctgtacactctctttcacaatgtatgtgaaagccaggtcttccagccgatcggttctctggctctccggaattgcctcgattgcctgtgcgactgcttccttctgctcctccgtctgctctccgcctgccacgaacaccagctgtccgtccgcatccacgcggaagttcgactccaggtctatcggtccgaaataattcacgaagtccgacatactcataatacgatctgtatattccgcaccgtattttccccatttgatcagatcttccagctcataaactgctgttacagggcaatctgcaccgccggttttccctgaagcaaattccgtgatatcaacatgcttatgcggatcaaagcttccattggtctccatctgtcctttgatcaccataagctggataatatccgataccgagctctggaacagatcatggaaaatcacggaatcttcaaattgcgtttccgcatccagaggggataattcatatacttttgtgccatccgctgtgtctaccgccagataggaattgaacaaaaccgccgcgattgccaccagcaaaagcaaagccgccgtctgctgcaccagtcccagcatcagccgtttcaatgtaggtcgtctcatgcctgctccttgtcgatcttatagcctactccccataccactttcagataccggggttccttgggattgatctcgattttttcacggatatgccggatgtgtaccgccacggtattgtccgctccgatggcatcctcattccagatgctttcatagatctgattgatggaaaataccctgccctggttcttcatcaaaagtaataaaatattatattcgataggtgtcatttttactggttcatcgtccactgtcacctgtttgatatcatcattgaggatcagtccacccacctgatagattgctttgttctcaccggtcaggctccccagggaagtatatctgcgcaagttggatttgactctcgccactagttccagcggattaaaaggcttgcagatataatcatccgcaccgatattcagccccaggatcttgtccgtgtcttccgatttggccgacaggataataatgggaatgctgctgtattcccggatcttcaatgtagcccgtatgccatccagccggggcatcatgatatccatgatcaacagatggatatcctccttgtccaggatctgaattgcctgttccccatcatacgctttatatattttatagccatcctgactcagatagatctcgatggcatccacgatctctctgtcatcatcacatacaagaatatttgccatactttcctcatttctccgttacttcccggttccccatcattttcgttatttctatttaaacataatatttttaaatattttcgtgttttttcttaaattttcttaattcccgtcaggcactcaggaactcaggactccttcagcattaaaaatgccgccagatttcccctctgtccgtgacttgcccggtgggaaaacagatactccggattgtggcaggtacagacgttcgttaccgccatatgttccggcgggatccccacccttaacagaatgctctgattggctttccacagatcaagctgatatttacccggtgctttgcccggctgcagcacatcctccggaaagccttcccggaactgttccgccacttcttcactcacttcataacaatccacacagatggacggtccgatggccgccaccagctcctccgggcggctgttaaaatgttcctgcatatatcgtaccatacaagctcccattcccgctaccgttcctctccagccggaatgcgccagtccgatggccctgtgtaccggatccacgaaatacagaggaacacagtctgcataaaaagtcaccagtgcgattccggggatatccgtagccagaccgtctatatcgtcatagaccgatggtctggtgatcccatttccggcatctgctttcgtcaccagatgaatattcgtggtatgggtctgtttcgatgccaccatatgttccgggtctgttcccagtacttcaccaatccgtctgtaattctctctgacacattccaggtcatctcctctggaaaaactcaggttcatagtggaatagattccgttgctgacaccaccggtccttgtggtaaacagatgttccaccacaccggtctcttccagcttcgggaataccagatactccagttcccctttttgtctctgctgtatactgtctgtgtctctgctgtctgttctgctcaatggatacatgtttctaactccttgcactataatgatgcggaaaagcatttggaatccagtgaagtgcctccccctggattgccaccacatcatagcgcacccaggtatcctccccataatgatgcagataacggtaataatccgcaactctgcaaatggttctctgtttcgccgttgtcacggcctccgccgcatttcccttttcatcaccggaacggtatttcacttccacaaacacaagatattttccgtctctgccgataatgtcgatctcaccgttcctgcctctgcggaaattccgttccaggatacgcattccctgtttctccagatagtccgcagccatctgctcatatacattccccgtctgtctggtattcaacccttatgttttcccccgtttgccacactttcctttaccatgcggtgatccacagcatccacaaataccagaatctccgccaccacttcatacaactccggcgggatcatctcgccgatgtccagccgggacagtgtatccgccagcttgtcatcccgatggatcggcacactgctctcctgggccttctctatgatcttctccgccagaattcccttgccgctggctatgactctgggtgcctcatccgagggatcgtattccagtgctacggcctgttttactttctttttctcgtcattcattctgttgtcctctatgctcttctaacatatacgttttctccgtgctacgcactctcgaaatcgtaacaatcactcgtattccggactatcgtcctgcatactcatgtttgtccgctcctctcataggaaacatccgctgcctgccagcagtcacgtctgttcttcattgaccttacaaaacatatacgttttctccgtgctgcgcactctcga

SEQ ID NO: 5628 - DNA, 9684 bp, Unknown
  gut microbiota DNA sequence
cttcattgaccttacaaaacatatacgttttctccgtgctacgcactctcgaaatcgtaacaaacattcgtattccggactatcgtcctgcatactcatgtttgtccgctcctctcataggaaacatccgctgcctgctagcagtcacgtctgtttcctatggatgagctatgttctcacatcaaaggcatattgtgctaccggaacacttccttctgtcttaagaagcggtgccatggcctgcgccgtctgctgtaattcggtacgcagtgttgtctcacatttacaatcatagcctcttttttgcaaccgctctgtcagcacatccatattagcctccaggtaatccaggattgcatcattctgtacataaaatttggtgctgactttggtatccttcagagtcacatacacatcaagcggtcccagatgttccatatccagatgcagcagtgcgctgacctgtccgtcttttctggcaagatttttcttgttggtatatacaaacagttcccccgtcttatgctctccctgccgtagatgcagcggcagctggatataggcataggtctggttgatctgttgcaggaaatccacgttctgacttaaattcgtcacgttctgataagcacttgaaccacgctgtccgttttcttccaaaagattactcaaccccttcaactgttttcccagcttctggtaaagttcctccaccttctccggagattccacatcctctggttttatgctccaccgatccgccaggagttttgccggaagctctgccactttggaattatggagaatactgcgcagcaagggaatatctttcgtctccagcccctgctttaacagtttctgcagattctgcagctgtggtgcctcctgtgttttttctgcaccgggattttcttttatcgtctgaccgttgcccggtgccgtctccgtcggttcctctatgatggtcttctgccccggcacagcttccggtgctgttgccgaagactgtactggcatctgttctgcctcttccggggtcactgtcacatccacgccaggctccggcagaggtccctcggtctgttgttgtcctgttaccgtctctccgtccgcatcttcgaaagccaacagttccagaacctcactgtagattgtggcggcctgctctatgtctccgctctctaccagcccctgcagcatatttgtcagactttctccggtctctgcgattcctgctgtcagctgatgtgtcagattgcgataggatgccatctgtgtgatattttcctccgtcaccggaagttccactctgtgaagattcacgagatccagaatctccgcatccgggaacgcattactttcatgccagatctgctgcaacgtattcttatcaataggaagccccgcatccatcagttgttttgtcatggctaccgtattctcgttcaccggcagcgatgccatatccaacgctttcagtacggttccttctgttgccatattggtaaaaagaggactcagattcagtgtctgcccgttattttttacctgaaaggtaatgttctgccccagttccagacggatatccgcatccacttttgcatccaccaggacatcctgcagcagacggatctgcgcattattgccctccctggagaccacctctcctctgagggtctgcccgggaaccagtgcacggatctgccggtttacctgttcggtattcgcattatttggagtctgtactctgctgttatccgctattttatcctgtgagaaccatcctgtcagcttcatattttctctcccggcacgctaaaatgccttaaaatccgaaatttttgataaagctgtgtctgtggatcggagtcggtccatactccttcagtgccgcaatatgtgccgcactgccgtaccctttgttggatgcaaaatcatactccggaaacacatcagcatactgctccatcagacggtccctggtcaccttggccacaatactggccgcaccgatagaaatgctcttggcatcgcccttgatgatcggcacctgtcggatttccactccgggaatcgtcacagcatcgttcaacaacagatccggtgccggatccagtttgccgacagcctcccgcatggcctcataggttgcctgtaaaatattgatctcatcgatccgctccggagaagcatagcccactgcccaggccaccgcttccttcgtgatcacatcgtacagctcttctctctttttttcggataactgcttggaatcattaatgtataaaatatcacaatccttcggcagaatgacagcacctgccactaccggtcccgccagaggacctcttcccacttcgtcaattccgcagatataggtatattgtgcgtattctttctcgtattttttcagattctcgatccgctgacgttccttttccagagcatctatctttttcagtgcgccagacaccagcttctgcacaccgcttctgggatcattctcatattctgctataaattcaggcagcttttccattgaagctgcctgtaatatttccttgatctttgctgcactttccatttgtttatccccatttatggttattgatgttgtaatacaccgaaatcagaaaccggccagatccggagccaggcttttccgatgatattttctctttttatgttacccaccatatccgtacgactgtcgctggaattgttgcggttgtctcccatgacaaaatattcatcatcccccagttcaatgggttccgccgcccggccgatggtctccggttttatgacttccatgccgtagttctcttccagcttttccccgttgatgtagatactgccatcatccatgatctgtaccgtctctcccggcagtccgatgatacgcttgatataataggtgttgtcctggaattgaaacgggaagacaatgatgtcaaagcgttccggatcatgaaaacgatagcttaacttatccacgatcagattatccccgttgtgcagggtattctccatggaggctccctccacttccgtacgctgtcctacaaaggtgatcaccagccataccgctcccagtacacagagcaggtagatcgctgtgtttaataattctctcatgattctgttcatctgtctatatcctctccagtgttattcgtcccagcttgccgctccggaaatcatcgatcaggatgccggcggctttccccagatccagttgttctccctttgcatagcatttgcggctctctgccactgcttccagtatctctatgggctttcccgcaggatctgcctcgtagcgttcctgcaaagccttcggataaagttctttgatggctccgatcagatcacaggccagttcatccggaattaggatctcatcgttcatggatccgataaatgccagacgcattcctacctgctggtcctcgaatttgggccacaggataccgggggtatccagaagttccagtcctttattcagacggatccactgttttcccttggtcacaccgggtttatttcccgtcttggcgcaggcttttcccgcgaaggaattgataaaagtggattttcccacattggggattcccactaccatagcacgtaccggtcgatttacgatgcctcgctttctgtcacgttcaatcttctccttgcagacttcctgtaccagcccctgaatcgacttgattcccataccggtacgggaattgatttccagtacacccattccctgatttgaaaaatactcgacccatttcttattccacactggatctgccagatctgatttattcaacaaaatgatacgggatttaccttttcccagttcatcgatatccggatttctgctgctgatggggattctggcatctacaagttcaatcaccagatcgatcagcttgatattttcctgcatcatacgccttgctttggtcatatgaccgggataccactgataattcatttttctattctcctaccatactttctatttgataaagccgatgccatccgtcccggattttaagtggaaccaggctttgccgatcatatcgccctcctccaccggtccgatattggcggatctgctgtcttcgctgttattcgggttgtccccgatgcagaaatactccttgttcccaaggataatctcgttttccgctatacccgcatccaggatccgttccgtcacccatttgctttcctgcccgttgacatacagagttccgtccgcgatccttaccttgtctcccggccctgccacaacacgcttgacataataatgggaattttcattgccattcggcagaaatgctactacgtctcccgccttcggagaagataaaacatacagaaaacggtcaataaatatctgctgtccattctccagtgtcggttccatggacatgcccacaactctggtggactttcccagaaagataaccaccactgcagccagaaagactgacagtgcaatgccgaagatccagctgaaaatttccctgagcagttcctgactgatctttttcttttttttataaaaacttagtcccttatttctcaatgttctgtcctatctcgcatagtgtttacaagtctcagtgtaccatatccgtattcctttttcaaataaatataaaaggcagctgtcagaaacagctgcccctcttcggtcaatgtaattatttaactaattccttaacctttgccttcttaccaacacgatctcttaagtaattcagcttagcacgtcttactttaccttttcttacaacttcgatcttctctacgttgggagaatgtaaaggccaagtcttctctacgccgataccgttggaagtctttctaacagtgaaagtctctctgttgctgccgccctgtctcttcagtacaacgccttcgaatacctggattctctcacggttaccctctttgatcttgccgtataccttaacggtatcgccgacttcaaactgatcaacggttgcttttaactgttctgcttcgatctctttgataatgttactcataatgagcctccttcataaaatggatgttcttaatacccttattggtagcagaggaccatctcgttttcacaacattcagattttaccataaggccatataaaaagcaagctttttttaattatatagccaccagatcgcgggatccgacagattcagccccaaccgttcctgcagttgtatggacgcttcatttccattcacaatatgggcgtaggggatcatcccctgttctctctgtttgttgatcagataaccttccagggatgctgcaagtccttgtctgcggtatgcatcctccacatacagcattcccatgctgccgtcattgtggcatccgataaaaccacagagttttccctcgatatagatgccgaagacatctcctgctgtaatcctctcccggacataaatctcgtctcccaggtgataatgctccgccacataaggaacctcttccactgtcagctgccggatgtccttgtgcctcaccggaagtggttcccctctggtatagcacgcctgggaacatagcatactgccatgataccctaaaatttcactgacacgttcattccaccggtctgtcacggtcacgatactatgccccgacacggctttcggaatgagcggcagcattttctccaaatgctcctcatcctccgcattcagcatggcattgccgatctccggcagatagatcagtacatttttcccctccgcatagagaacttctcccaatcctctggacagtgtctccatcatatgaataaaaatacgtttcttcgcggaaagtttttttatgactttctgtttttcctgatatttcgcatagagatccgggcggcgttcttccgtccgtctctcggactgttccagccgccaggcattgatctttttatgattgcccgacagaagtacctccggtactttctttccgtgccattcctccgggcgggaatactggggatattccagcagatcgttatggaagctctctgtctcggcagattcgtcgttattgagtaccccgggcaccagtctggccaccgcgtccaccacgaccatggctgccagttccccaccggtgaggacataatcgccgatagaaatataatccgtcacgacctcttccagaactctctcatcgattccctcataatgtccgcagagcaataccagttcctcttccccggacagttctcttgcttttttctgggtaaaaggggctccctgtggtgtcagatagacgcagcgtacctttctgtctcctgccaccacccggtaggcatcatagaccggctgtgcctgcatcagcattccggccccgccgccataggtgtaatcatccacttttccgtgcttatcctgtgtgtaatcccggatattcaccgcatctatggaaatcagattcttctccgctgcccggcctaaaatactggttgccagcccctgctgcaccatttcggggaacagggtcagaatatgaaacttcatcataagtcaagcagtccttccagtacatgtacctgcattgtgccattttccacgtccacattcaggatacactgtttgatagcgggcagaagcaggctcttaccgtctgccatttccacctcgtagacatcattggcaccggtctcgatcacatcttttaccgtgcccagttccttaccgtcttcatcctgcactttcagtccgatcagatcggcgatgaaatactcgtccctttgcagacgcactgcatttttgcgggtcacgtacaggctcttctgacgatatttttctatatcattaatgttgtccagccctttaaatttcaaaatcacaaactgcttaaagaacttgacaccctcaatttccagattcattttttccttgccggtatccagaacgacttcctttaatctgcggaatcttctgggatcatccgtggtaggatatacctttacttctcctctcaccccgtgggtggaagtgataatgccgacctgcaacagatcttccatatagttttactccattccggctttagccaaaaaacggagaaacacacgcctgtatgtttctccgctcaacgtcagggatctctcaattcgaaattaaacgatctcaacgtccactcttgtgttgtctttggatgatgctgctttcacaacggagcggattgcttttgcaatacgtccctgcttaccgatcaccttacccatatcggacgcagctacatgaagttcaaggacgatattttttccttctgtcttctcagttacaactacttcatccggattatcaacgagtgcctttgcaactacttctactagttccttcataatccacctccgatgaatagatatttagaacttatttctcgattcctgcaaccttgaaaagcttagcaacctgctcggtaggctgagcaccgttctgtaaccacttcttagccagctcttcattgatcttgaaagtggaaggatcggtggaaggatcgtaggtaccgatctcctcgatgaatctaccgtctctgggggaacgggaatctgctacgataattctgtaaaaaggagccttcttctgtcccattcttcttaatctgatctttactgccatttctttttcctccattaattaaaaataaaataatttatatgataagaactgattgttcatatcggacttaagttaagtaaacagtgctagaaaaatctgccgccaataccgggaaattttccgccgccgaacataccacccatgccgccgcggccctttttgccgccgccaaactgcttcatcatcttctgtgtctgctcgaactgtttgataaaacgattcaccgttgcaatatccacaccggcaccttttgcaatacggtgttttctctgaggggtcaggatcttgggattcctgcgttcctcttttgtcatggataatacgatggcttccgtacgcttcatctgcgtctcatcaatggcaccttccagatccgatgccttgatccccattccgggaagcatccctaagatgctggacagaccgcccagattacgcatctgcttcatgctctccaggtaatcctcaaaatcgaacttacctttcttcatgcggccggccatatcacggctcttctcctcgtcaatatcgatgttggcctgtgccttgtcaatgagggataacacatcacccataccaaggatacggcttgccatacgatcgggatagaactgctctaaatcggacaatttctctcccatacttacaaaaaggatcggcttgccggtgactgctttgatggaaagtgccgcaccgcctctggtatcaccgtccatcttggacaggattacgccatcgacgcctaccttttcatcaaattcttttgccacatttacggcatcctgaccggtcatggcatcgactaccaaaagtgtctgatgcacggtcacggtctccttgatctcctgtaattccgccatcatgtcttcatccacatgaagtcgtccggcagtatcgaggatcactacattatgaccgtttttctccgcatacgcaatggctttcttcgcaatctcggcaggtttatgatccgttcccatggagaacacatcaacttcctgcttcttaccattgatctgtaactgttcaatggctgcgggacggtaaatatcgcaggctaccaacaagggcttcttgcccttgagtttcagcttaccggcgatcttggccgttgcggtggtcttacctgcaccctgaagacctgccatcatgataacggtaatggctttgccgggctgcatggcaatctctgtggtctcactgcccatgagatttaccatctcttcatttacgatcttgatcaccatctgtccgggattcagaccgttcatgacgtcctggccaatggcacgttcctccactgccttcacgaactgcttgactaccttgaagttaacatctgcctccaggagcgccatcttgacttccttcagtgcggacttaacatcctcttccgtcaggcggcccttgcttcttaagtttttaaaaacattctggagtttgtctgttaaactttcaaatgccatttgctgctccttaccattcctttaaaagggatctggataattcccggatgcgttccatccgttctccgggatccgtatcattctctgccgtcagctgttcgatctcaccgatcttctccttggccgccatgaaacgttccaccagatgaagcttgctctcgtaatcctgcaggatccggtcacagcgcttgatcagatcatggacgccctgtctgctgatgccctgttctcccgcgatctcactgagagacatatcattatatactgcatcctcatacactctctgctgatgctcggtgagaagttcaccgtagaaatcatataacagattctgttccaaaatcctgtccatcttatccagtgcctttctataggtcatgcgatatgcaccttggctatcatactatagaaaagtataggtgtcaagtattttttctttacacctttgctatataaattgagagttagtgaagaaatgctatcaaatccccgtagcccttggcagggtataagaaacgcggcacgctcgcgctctgtcgcagagcgtagcggt

SEQ ID NO: 5629 - DNA, 301 bp, Unknown
  gut microbiota DNA sequence
tgcagaacgcccatggcggacggaatgtccttccgaggatgtttgtcgggaggtggtgatattttctcgaaaagtgtagaaaaacagggtggagcgaacaggacgttcgcgacaggcggacgttgccatggatggcaactggagccgtgcccgtgcggtttagaaccgctactcacttttcgtcagaaaattcccaccgggagaccttacatcgaggaaggacattccatccgccatgggcgttcgtggatttgtttcactaactctcaatttatcatacttttagtacacacggataatg

SEQ ID NO: 5630 - DNA, 64306 bp, Unknown
  gut microbiota DNA sequence
gctgtgtcagctgccagcatcttcggtgcccagtatttcggaaagggcaatcataagggacatatgtattcctttcggtttaagctgtatgccacgctgttggtgacaggcggagcgatccttctgttcctgacgaaaggttccgcactgatctccctgtatctgacggatacggtggggaacggggccacggacttggcactgcagtacggactggaatatctggccatcatgatggtgggactgatcccttttgcggtgaaccagtcctacgcgacaaatataaaagagaccgggcagacctttatcccgatgctggccagctttgtggcggtgggtactaatgcgattctggactatctgatgatcttcggcatcggtcctttcccggagctgggagtgcagggggcggcgctggctaccgttattgcccgttacattgaggcactgatcgtggtgatctgggcacacatccatcggggaaaaaaccgctatctggagggagcttacaccggctttggtattccgcttgcggaattgaaggcgatcctgatcaagggatttccgctgatgatgaacgaggtgctgtgggcagcgggcatgacaacggtgacccagtgctattctgtcagaggtctggacgtggtggcgggactgaacattgcctccaccatcacgaatctgttcaatattgtctatcttcagctgggttcctgtatcagtattgtggtgggacagtatctgggtgcaggtaaattggaggatgccaaggatgcagacaacaagatgatcgtattcagcgtcttctgctgtgtgatcatggcggcattgatgttcgtggtaggaggatttttcccgggtatttacaataccacggaggagatcagggaactggctaccagttttattgcggtatcggccatcatcatgcccttctgcgccttcagccatgcgtcgtattttaccctgcgttccggtggtaagacggtggtgactttcctgtttgattccgtatttacctgggtgatcgtggtgccggcggcatatctgctggcgcatttcaccggcctggggatcgtgagcatctattttctggtgcagggcacggaactgatcaaggtgatcattggttacctcatggtgaagagtaatgtctgggtggtccagatggtataaattactatttgtgccgccagccgaaggctgctgaatggagattggcatgaaaaataggagaagggcgggaaactgacatgaaaatgaacatggctcagaaagttttactgatcataggaggcgcatttgcggggatcggcgcagtgctgacaatgatattcggaggcatcggcatggtgttccggcccatgagggcatttctggcattgccgctgtttttcctgatactgggcatttgttttatcgcagcagtattattcgggcagcataaaaagtcactcatcgtaaaaaacggaatcagatatgccgccaagatctacggttacgtggagaatacggcgtatatggtaaacggcagattcccggtgaatgtgatcgtgcattattttgacaagaatcagatcgagcgggaggcagtgattcccaccgcgtttgaaaagggcgcttcgacctatcccatcggtatgaccatggatatctacgaatatcagggaaaatacggctgggatccggattccgtccgggatgagattctgccgggagagcaggaactgatggacgataagcccgtggatccttccaagcttcgcatgaccgccgtgcagtgtccgaactgcggtgcttcctatcaggcggcagcaggatataccggacgctgcccgtattgcggaagctatcataatgtagaatagcagaatagttgagctggggtggatcagtggatcgtttcctgcaaataccgcagcatcgtctgtgacaccacggagttggcggtcttggagaaagccagtcccagcgtacggtgacaactgggagataagggtctggagaccacaccccgtgcgaaagcttttaataccagttcctgagagatggtgacaccgagaccgttccggacgaaggacatgatcagggtatcgtcccggaagctgtaagagatctttgggcggacagggcatttggtcagcagatgctggatgtcgttgtcacagccgggggtctcgatgatcagaggatattcgaacagttctggcagggtgacgctgtttttggcagccagcggatgtccctcggggaaaacagcgcacagcggatcattcaacagtggataaaaggtcagatcatccgccacgatggaggataaaaatccacaatccacctgcccgtgaatgatccagtcccggatctcatcataattgccgtcaaaaatttctacatccactttcggataattttcccggaaaaaatgaaccacatccggcatccacagagcggtgatgctggaaaaactaccgacccgtagttttccctcaatcttattgttgatattgaaggcggcctggcgcagcttgtctttctggttgaccatttcctgaatgtaagggatgaggcgggcaccgttgtcggtgaggctgacaccccgtttaacccgggcaaaaagctgcacacccagttcttcctccagtcccgccatcatctggctgatgccggactgggtataattcagtgcttccgccgccttggagaagcttcccgtttcacatacttttaaaaatatctcgtaacggtctttttgttctttcatgatcttcaccctgtaaatttatgaatttcaaattcatcgttcaccaattatgcgagcagattggctttcttgtactcattatagtataagctcacgaatttttacatcctgcttcgcaggatattcgtgagctgatgagtccaaaaaacaaatgtctgctttgcagccacttattttctcttgagacttatcacattacaaaaacttatgtataccaataaaaacattcgttttactgatagtatagcatatgctatcctcatgtcacaagtgttttaaggagcgtgaatcatatggaaaagaaagcaagtaatttctccgggcagatcggtttcgtgctggcggcggccggaaacgcggtgggtgtgggcaatctgtggagattcccttatctggcggccaaggatggcggctgtcgtgagacaaggatgtgattctttcggtaagattagagtatcctacgatgcgggggctctgaaatctgcatccagctcaatacagttggactgcctttgttccaacaggggcagtttctcctgagttgcaggttgagtttgttctggcaggatcagaatatcctgagtcacaggtgcaccgaaatccgtatccagctcgatacagttggactgtctttcttccaacaagggcaacttgtcttggggagcgaactgcgtttcttctggcaagggcagaatgtctggagtcgttgactgcgtttcttccggcaagatcagaatatcctgcgtcacaggagcttcgaaacttgtatattgaagctggatggtttcgaggatgcggttgaaatctgtttccagagtgtaccagtctgttaacggaatagtggcttccagctgtagggtatttccctgtaaagggacatcgggattggataatgtaatgtaaatccagtatttttgttctgtctggtagatctcggtatttttccagccgtttaagttgctgttgggcagagtgatctcctcgctggtgacgccggtgccgcagattcccgggacgggagcatagataagcgtaaaggtatcctccgggtacgcgatgttccagaagatgatagcatcggtcgtggtggtacctgcgaaagttaaattgcggatctcatagtcccaggtctccggaagggacagggagaactgcaccggtcccagatcacagatagcttcattccccatggatatcgccagatcgtcggcaggcccgttttccgggcattctgtaggaacgaggctttccgcgatgaccggggcgattggcccggtgggggccgtggaattttgcacccctacagaatcctccaggcccccggtagaaccacatcctgccaaggaaagcgtaagaatcgttgtcagtgttgatagtaaaatagtcttcttcataaagataccctcccaaaatcgtgaagtgttatggtgatcacattataataagacgaatattgggcggggaagtttcggtaaatagaaagtttggtgtaaaaagccccaaaacaacgaattccgtacaaaaaagttccgaaatcaggattttttgtacggaatttctttattttgcttgtgtagcgaaaatagagactttttacatagcaaaatcttatgtttttgtatttttttcttagaaattggcgttttgaatacaaacagaacgccctcaggcagatgtctgtcggagagtgttgatattttcttaacctgtggtaaaaagtcagggtggaacaaacacgatgtttgcgacaggcggtcggcgacatggatgtcgcctggagccgtgcccgtttggatgagaaatacttgatccacgggtttagaaaattcacactcggagaccgatatctgcctgagggccttctgccgctctgggagtgcgtccgataaggcgggacgcacggtataaaaatagagtgaaccagcctcgcttgcgcacaagcgaggtgttccactctatttttgcatggctcgtagctatgctacatataaatacatgaaaatgaaatgacatacgcttccgcccatgacgaagaggtggaacacttcgtgggagccgaagaacttatgtttcgcattgaagatcggcagcttcagggcatagatgacaccgcccacggtgtagatgatgccgccggccaacagccagagaaaagcgggcgtggacagagttttcagcagaggcccgaataccaggacacatacccagcccatggcaatgtagatcacagaggaaaaccacttgggacaggtgatccagcaggcttttacgatcatgccgacagcggcaatgccccagacaagagccagcagtgtatatcccagcttaccgcccaacacaatgagacacaccggtgtgtaagaaccagcgattaatacaaagatcatcatatgatccagcttccggaagacccggagacttttaccggtgaggtccacggaatgataagtggcgctggcaccgtataacaggatcatgctgcccatgaaaatggccatggccaggaaattctcctgcccggactgtacaccggctttcactaacagtggcacagctgcgaacactgccatcatcatggcaatgaaatgggtaatggcacttcccggctctcttatggtaatctgcataataactcctccttttcccgacagcagctgccgtctgcaaatcgaatctatttaagatcattttatccgacaatagtatttactattcaaaataacaacacgtattctgaaatacttttatatatagttttcaaaactacatctgacaatgcaaatactaccgcacaaaaaaggaaaagtcaatagtcattcagatatttgggagaaaagtatcaataaggattggcaggaagtctgtagatcaacagcccttcatcatcaaccagtaactccgcattctctaccagacgggcatttacttccggatttgttgcaatgtagccttcagaacctttatcccatacaatatattcaggcactttgtccggatagagcgtccagtattggaataagcgctcatcgatggtcggagtgctgatggtggaatagttgcagatcacgtaatcctcctgaagatacataatgctcttatggctggcaatcagtactttgctgccccggggaatgaattcgtctaacagacgtcctcggatattatactcgtagccatcggaataccggccgtagattcctgccatggggccctcttccgctttctgccgtgtgacgaaaatggtgtcgtgaccgtaaatattatacaacagaaatcctttgtgaatgacggcaagtcccacaaacagcaggacaaaagttttccagaaaacgggagattccgatgtttcccgctctgcatagcataaagaaaccaacataccgatagccatataatcggcagactcgtagagcattgtattgctggctgtaaaagcggcaaggagcaaaaacagagaagtaatacttccaaaccagaacaatgccttataaacaggggccaattcgccagaagactttttacagtggaaataacaataaatgccccacagcgggaaccgaagatagacgaacccgggatactcgatatgcttttgcaaccgataccatacaaaaagctgttccagaatcagggaaataatcaacaacaggaagaaacggtagtttttccggcatatgaatcggaaaaaacaccagaataccaaagcaatcaccagagcgaccagcagataaggaaaggtttcgccgaggcaggaaaggttatcttttaatttcccaggcagtccgacatcgtgggagccgtcggtcagcatttctgacaagccatccagaaactgccggaaagacatatgacacaaaaagtaagccaaccaacccagaccgcagacaccacaggtcccgagataaatcagaagatttttcagacggtttccggcagcagataacagccagataccgatacatccgggaagtaccacgaaaatacaggtgggataagaaagcacaagaagggaagtgcttactccggcggcaatcaggaaaaaggcagggcggcgtgcggaggtaccgcgattcagactaaattccagaaagcttaagaagaccagagtactgaaccacagaagcatattggaaaaatcgggaacggtactgttcttgggaatgatattgtagtaaaaaacagcaatgacaaaagcagtattctcagttacaaacttacggaaagtccggtaggtcagaatactgatgagcaactgtgtaacgacacctacgattcgcagaaagagacggagtattttaaggtgtgaaacaactgcatatacagccataaaaaggtagcagaaaagaacgcggaagtctgatgaggctcccacatttccagaaacattctgtctccctgtaccagacggtaagccatagatacggcatactgctcgtcaatgtcgaatccgaagaaaataatcttgacggtagcaactatagatgcggcaagcaacagatatttccacagattatgcagcaatgcggttgcaaaatttttctcttgtgcggaataattgctgttcatcttaatcctcctcaatgatctggatctccagatagtcaaaatcgatggactctacaaaactgtcctgggtaaaacgggtcttgttgtgacgtttaaagtctgcaatattcatatccagccagatgggcgtaccgagatcaaactgatggcagacttcgtccagagagtgaaaaactttatgggtacgggtatcgtcactgccgtcctcgatgcaggtgtctttcagcatatgattatttttaaaaattttggcccacatacggaacatagaaaatctccttacgcaaaaaatcagacatattggtcgttaataataaattataataggaagaggtttcccctgcaagcaaaaaaagtcacacaaccatcagatccatcttacattgtatatgggatagctttcgtccgccgaatcggcacgtttgcgaaagcgtactataaaactgcccaatcaatcttaaaaaataataaaggttttgttaaaattatacatttttaaaaggaggtatgctataattatcataaatatcaacgtacgaatgcagaatttccgtaacgaaaaagcgtctacggaaataacaaatatgaaaaatggtcgcagagccttctgtgacagaagagattgagaggtaatatggagtttaaggtagaaaacggggatggaatcgacagctggaaggaggtcacgctggtatacagcgccgcactgcgtcagatggagacaaagatgcagattctgaacgacgagtttcagcatgtacaccagtacaatcccatcgaacacatcaaggcacggatcaagaccccggaaagcattgtgaaaaagctcaaacgctacgggcaggaatccaccatagataacatggtaaaatacataaacgatattgctggcatccgcatcatctgttcctttacatcggacatttaccgcattgcggatatgatccgggatcagaaggatattcaggtgatcgctgtgaaggattacattacgtatcccaaagccagtggctataaaagctatcatatgatcgtcagtattccggtctatctgtcggaccgcacggtggatacgaaggtggagatacagatccggacggttgccatggacttctgggccagcctggagcataagatccattacaaattcgagggcgatgctccggagagcattaaaaatgaactggtggagtgtgcgagaatggtgtctgatctggatgcgaggatgctgtctctgaacgaagagatactagccatcagccaaaagagagaagaggaaaaacaattaaatagcgtaacatccaaataatccaaaagcttctgtcggtgtaatacaaacgacagaagcatttttaattcataggaaatttcttcctatgaattaaaaatgctccgcagggatcgcactgcggcggttatgaaatatgtcgcaaaagcgacccgccgcaggcggagaatctcgcaagcgagattcttttttatggtcaaaacagtaatgggatgacaggaaaatccccataaaatgaggagtgcccagacacctttcggcgcctgggctattatgaaaaaatttatcttatatgctttgttatccggaagtcttatctcttccttgactgtatttaaagtataccaaccaattatgaacaaattatgaacatgatgtgaaaacttggtgaattttacgaaaaagtacagaaaccaaaaaagaaactgtacaaattgcataaaaatgcgcaaaccatgaaaacacagtattcatggggttttggttgtaaccggggaataaacatggtaaaatagggacagttgaaaagggaaactgttcacatgagggacgaaatatgtttggaggaagatggatggatacttttatggataaacttgcacaaaagctgaatgcccaggaaatgatcaaggcgaattccgcggctgatgccgaagagatggatcagctgaaaagccagctgcgggaatacgacgagtgcctggcacagatgcagcaggtcaataaggaactgaaagcgatcaatcaggagatggagaagctgatgtccgagaccattgctccggaagtgacgaagctttccgaggaaggcgtggctgccctgcagaagctgcagcaggagaacacagagaagctggaagctctgggacagcagtatactgccaaactggaagaactgcagcagagtaccgaggtgttggacgagcttcagaagcatgtggatgagaaactgagcactacggaagagaatgtacataaggaatgcgtaaaggtataccgtaatgtacaggcggttgtggtagaagagaacgagaagcagaccgaagccatcgcagcaaaagtaaaggaaaaccttggcggtaaattgaacggtgtgctgggagtatccattgcggcagtagttctgacggttgcggatattgttcttcatgtattgagcattttgcacattttctgaaaaggcagataaagtattcatttaagaatgctgaaattgataagaaagtaacggaaatgaggttttacggaaatgggaaaacaactttggaagccgggaaatatgctgtatcccctgccggtggtcatggtgagcctggctgaccgggacggccgccccaatattatcacgctggcctgggtaggaaccgtatgtaccaatccgcccatggtgtcgatctccgtacgccccgagagatattcctatccgatcctaaaggagagcggagaattcgtgatcaatctgaccacgaaggagctggcatttgccacagattactgtggcgtgaaaagcggacgggacgtggataaattcaaagaaatgggactgactcccattccggcatctgaggtgaaagcaccgatgataaaagagagtccggtgaacattgaatgtaaggtgcgacagatcctgccgctgggatcccatgatatgttcctggcggatgtggtggcagtacatgccgatgaaaaatatatggatgagaagcacaaattccacctggagcaggcggaacccatcatctattcccacggttcctatttcggctgtggcgaattgctgggaaccttcggatatagtgtaaagaagcgatgagtaacaccggtaaaaaattacttgacgtttgccctccgtttcggtatcataagtcataaataagaacatggtaaattttactacgaagaagtagcatcagacgggagtctgatgctttttttatgcggtggcgggaaaatatctgccgggtaccgcaatcatgggaaagtccgggtgaagcatatgacacagatcgataaaaacatagcattcaatctgaaaagaatccgcaaatccaaaaatatgagtctggatatgctggcggagcgtaccggtgtcagcaaaagcatgctgggacagatcgagagaggagaatccaatcccacggtgtccactatcgggaagatcgtggagggattgaaggtaccttttgaacagttgatttataataggaaagaaatcatggtggtgccgtctccggaagaggctccggtatgcaaggcaaaggaaggggaataccggatctatgtgatgctgccctacgatgccggaagaaatttcgagatatatcagggcgagctgaccagaaatgcccggatggaaagcgaatcccacggggagcagacctgggaatacctgacggtggtatccggggaggtcgaactgattctggaagattccagttttctggtgaagacaggtggttctctctattttgcctgtgacaggaaacatgtctatcacaatgtgggtgagaccaaggcggtactcaacatgatcattaccacgcagcgttagagaaaacgcccccgcttgatggcatccttgccatattttgcccggatattatccagtgcggcatccagcttctgctgtttctcggaacggggagccggaaaatcaaacaggctgagctgaaccggttcgtcttccggcaccagcttggaagtgcggatccccagaagccgtatgggagtggaatcccataattcgtcgaataatgcacaggcatcttcgtacaggagattcacggaagccgtgggaatgtctatcggcatttggtgagaaacgttccggaaatcactgtaccggatctccgtgcagatctgtcctgccaactggtgggaggcccgtagacgcctgcccacggattcacacagagacagcaatactttacaggcttcctctttggtggtggcatcgctgcttaaagtggtggagttgccgatcccttttgccttggaaggagccaggactactgtggaatcgtcgatgccgttggcatactgccacagacaacgaccgtgactttttaaatgtgcttccaggatcgcaggatccgtctttgccagatccccgatcgtgagaatacctaatttgtggagagtctccgcactggaatgtccgcaggtgaacagggcggaaacaggcagcggccacattttctgcgctatttcccgctgatacaaggtgtgagtcttatccggtttctcaaaatcagaggccatcttggccagaacctttcgatccgaaattcccacatttaccgtaaatttaaatttttcaaaaacagagtgacgaatgaaagcagcggcttcctcgggagagacgtagttcgccgcaatgggcgtatagtccatataacattcatcgatgctgacctgttcgatgtcggggcagatacccgccagatgttccataagcatctggcttttcagacggtacatattatgatccggagaagccatgaccagatgcggatatttgcgcagggcattaaccaccggttcaccggtagtgatgccgaaagccttggcgggaatggatttggccagaaccacaccgtgtctggtggaggtgtcaccgcctacgatggaagggatcgtgcgcagatccacaggatccccctgttccagacgggccagcgccgtccagcttaaaaaagcggaattgacatcaatatgaaaaatgaccggttccctcatggcgtctcctttccggatcagaccgttttatttacctccagtatagcatagatcggttcgggagaaaacaaaaaaatcgaacagacattctttctttacaaggcatataaatgctgatagaatctatatgttacaaagttattacagtaagacaggtatacagaatgcccgaagggggcatactgttttcagatacgatagatcgagaaggaattcatgaagaaactgacatcttactcgaaaagagtaaaatatacatatgtgaaaacaacgctggccactctttttgtgagcctctttttcctcaaagggtatgcagcgtttgaaaagaccggagagaattacttccacgtgttcctgaacggcaatgagatcggaacggtgggcgaagcagacagagcggagcagcttctgcaggaagccagaaggaatatcgcttcccagagtgatgatatgatctttgtggacgcagatttaaagctggtcggtgaagaagtgctgtggggaacactggacaatgaggacaatctgctggcagccatggaacgggaactggagagcagtattcgtgagacttcccacagatcctatacaatgaaagtaaatgaatatatggtcaacctgtccagcgtggaggatgtggagtctctgctgcaggcagcagtggacaaatacgacagtgaagacaaattcagcgtggaactgactcacgatgcacagaaggaattcaatgttcttaccaccgaggtagtcaataaacaggaactgaccgctcaggaagaacagaaggaagaatccatctatgcaggcggtgtacagtccgtactggatcaggcgggctcccaggcagaccagcagggggaaaaagatttcgaagactatgatcttgggctgatgaccatggactttgcggaaaaggtggaaatcgtagagacctatcttccggaaagcatgttgactccgctggatcaggcaatcgaggatgtgatcaaggatcaggagacccccggagaatatgaagtagtcagcggagataccctgtcggagatttcgattaaagtaaatattccgatggatcagatcatcgccatgaacagcgagacactgaccgatgaaaattctacgatccgcgtaggggacaagctgatcattaccgtgccgcagccggagctgtccgtggagcgcatggagcagaattattatgaagaaatctatgatgcagatgtaatttatgtggacaacgattcctggtatacgacccagaccaagattttgcagcagccctccgccggtttccgtcgggtagtggcggatgtatcttatctgaatgacagagaggtcaccagggatattctgaaggaagaagtggtcatggaggcagttcccaagattgtggaacgaggcaccaagattcctccgacctatatcaagcctatttccggtggacgtctgagttccaatttcggacgcagaaagtcacctaccaagggtgccagcagctaccataagggtgtggactggtcggttcctaccggaactgcggtatttgcatcctgcggcggtacagtggccagagccggatggggaagtggatacggttattgtgtctatatcaaccatgaagacggcagacagacccgatacggacatctgagcaaggtgctcgtcaaggtcggccagacggtaaaacagggagaacgtattgcactgagcggtaataccggcgtaagtacgggacctcatcttcactttgagatcctcattaatggtagccaggtgaacccgttgaagtacctgaattagggcgttgtatttacaaatgtgcgaaaatgtggtataagtgcataagaaggtttttctgatctgagaatgacagaggtaagaaacaatggaacaatacgcaattaaaggcggtaatccattagtcggtgaagttgaaataggaggtgccaagaatgcggcacttcctattcttgctgcttccgtgatgacggatgagactgtttatatagaaaatatgccggatgtaagagatacgaatgtccttttgagcgccatggagaacatcggcgtgatcgtaaagagaaccgaccgtcacaaagtgactctcaatgcatccaacatcagtgaacttgtagtagaagatgaaaatatcaagaagatcagagcgtcctactatctgatcggtgctttgttaggtaaatacaagcatgcggaagtggcacttcccggtggatgtgatatcggctgccgtgccatcgaccagcatattaagggcttccgtgctctgggcgcggacgtgaagatcgagcatggcctgatcaagacacaggcggagcatctgcgcggcagccatatttatatggatgtggtcagtgtcggcgctaccatcaatatcatgatggctgcggtaatggcggaaggcaccacgattatcgagaactctgccaaggagcctcatgtggtggatctggcgaacttcctgaacagcatgggagcaaatatcaagggtgccggtacggatgtgatccgtatcaagggtgtttcccatctgcatggcacagagtatgccgtgattcccgatcagatcgaagccggtacgtttatgttcgcagcggcagtgaccaagggcgatgtgacggtgaaaaatgtgattccgaagcacctggagtctattacggcaaaacttctggagattggctgtgaagtagaggaggcggatgactgtatccgtgtggtagcgtccaagcctctgaagcatacccaggtgaagaccctgccttatcccggatttcctacggatatgcagccccagatcacagtggcgctgggactttccaaaggaaccagcatcgtgacggagagtattttcgagaaccgtttcaaatatgtggatgagctgacccgtatgggcgccagcatcaaagtagaaggcaacaccgctatcatcgacggtgtatccagatataccggagccaatatttccgcaccggatctgcgggcgggagcagcactggtactggctgccatgtctgcagaaggattctctactgtggatgatatccgctatattgagagaggttatgaggatttccacctgaaattacagggactgggagcccagatcgagttgatcgagacggagcgggacctgcagaagttcaagctgaagatcggttaatgagtggatttctcataaaccacaacagaatgacattttgaaaaaaatgtctgttgacaaaacaggtaactcatagtaagttaattagcgtagaaaagttcatatagactttcccttattcagagtggtggagatacataggatcgatgaagccacggcaaccccgcagaatgcggaaggtgcccacctgagcgaataactgtcgaacaataagaggatttgatcgcacaataaatcagtccgcttatgaaagcggacttttttgcatcattcagagctgtcggcattgaaaatttgattttacgaatgaggctctgaatgacaggactttagcaactcatacactagaccctcttcccacagggaagcagaatggaggacaaatggaaaaacgtttatttacatcggagtccgtaaccgaaggacatcccgacaaaatctgtgatgccgtatctgatgcggtactggatgcgctgatggagcaggatccgttcagccgtgtagcatgtgagacctgcaccaataccggtttcgtactggtaatgggtgagatcaccaccaaggcaaatattgatattcccgctattgttcgtaagaccgtgaccgagatcggctatgattcttccgagaagggattcgacggcaacacctgtgccgttatggtatctctggacaagcagtccactgatatcgccatgggcgtagacaaggccctggaagcaaaagaaagccacatgaccgatgaacagctggatgccatcggtgccggagatcagggtatgatgttcggctatgctacggatgagactccggaatatatgccgtatcccatctctctggcacacaagctgaccagacagctgaccaaggttcgtaaggatggtacactttcctatttaagacccgacggaaagagtcaggtatccgtagagtatgatgagaatggcaagccttttcgtctggaggcagtcgttctgtctacccagcatgacgaacatgtatctcaggagcagatccatgaggatatcaggaagtatgtattcgatcctgttttgcccgcagacatgatcgatgcagacaccaagttcttcatcaatcctaccggacgtttcgtaatcggcggacctaacggcgacagcggactgactggccgtaagatcatcgtagacacctacggtggatatgcacgtcacggcggcggagcattctccggcaaggactgcaccaaggtggacagaagtgcggcatacgcagcacgttacgttgccaagaatatcgtagcggcaggactggctgaaaagtgtgagatccagctgtcttacgctatcggtgtggcacatcctacttccatcatggtagataccttcggtacgggcaaactgcatgatgataagctggtggagatcattcgtgagaacttcgacttaagacccgcaggcatcatcaagatgctggatctgcgcagacctatctacaagcagaccgcttcctatggccactttggacgtaccgatgtggatctgccctgggagaagctggacaaggtggatttattgaagaaatacctggcatagttacgagccatgcaaaaatgaaacaggaactgttcccgggagtttactcacagggaacagttcctgttttgatttttatgcggcacatgtatgaatgaagcatggcgttttatttggtttcttctgtctcctcggtctcgtccgtctcttcctgtccatactctccgatatggaacagctgctgttctccggaggtagtgacatgcacacctttttcttccagcttcagatccttgacatacatggtcttcgtagtctggggcagagcggccagatcaatctcaatgggatccaacagatgtgcggggtctgctttgtaatgtacttccgacaactccgcttcgaagataccctgtaccttgtcttcatttacatatacaatgggaacagtagcggatacgatttcgccggctaccagagcctgaaagtccagagccatatatttcttggtcagaggatcaaaatcaatattttttaccagaacatctacattcttaccatccagttccagataagcctgggtaccttcttttgcattcttgataaaagcggatgcatccttctctgtgaatttcagggaaacattctctttcatttcttttccgtacaaaacaccggtgataaaaccgtctcttcttaatttctttgctttttcgtcaggatttcttttttcagcttttaatgtcaacataatgatgacctcctcgatctctacgtttgtttcgtgtagatgagagcttgtagaagttctttttgcactatggttattatagcacatatagaacaaagtaaacagtgaaaatgtcacaaaaataacagaaaaaaagtgggatttacaagcaaatttcagaaaacaaagtgaagcggcactctttggcatctatgacatgaaacgaaaatatgtaaaacacatggaaatattcgtttcaaaattgtgtgcgtatgatgatatatctgagaaaaatttacaactgcattacaagaacacggtacaacaataaagcaaatggttgcgcgaagaaacaaaataaggtatacttgtcacgaatacatttgaacacacagggaggacataaggatggatatgaatattgtatgcctggatctggaaggagtactggtgccggagatctggatcgcttttgcggaggccagcggaatcccggaactgaagagaaccaccagagacgagccggattacgataaattaatgaaatggagacttggtattctgaaggaacacggtctgggactgaaggagattcaggagacgatcgcaaagatcgaccccatccccggggcgaaggagtttctggatgagctgcgttccattacccaggtcatcattatcagtgacaccttttcacagtttgcgggccctctgatgaaaaaactgggttaccccaccatcttctgtaattccctggaggtagctgacaacggtgaaatcaccggttttaagatgcgtgtggagaattccaagtacactacggtgaaggcattgcagtctatcggcttccagaccatcgccagcggtgacagccacaacgatctgggcatgatccaggccagcaaggcagggttcctgttcaagagtaccgaacagatcaaaaaagatcatccggagcttccagcctatgagacctatgacgaactgatggcagccatcaaaaaagcattataatctcctatattactattactatgaaaaactctccggacagatgttattctgttgaggagagttttctgtgtatacagtgaatgcgtttaatggagaatattgatccgccacacacggaaaacagggaaaagacaaataaaatataaaaatataatcgaaattaaaaaagttatttacatatttttacaaaatgttacaatattataatatgacttgttatcaccaatagtaaggagaggaaaatgttcgaaaatttgaaaatcaggcagcgcctgaaaaaagcttttgccattattgtagttatatcatctattgcaggagtgctcggagcactggcaatgatcgttaccatgaaccgctatcagcatgcattgaccaattacggtttttcacagggagatatcggtaaggccatgactgtattcacggatgtaagatccgcaacccgtggaatcataggatataacgacccggatctggtggacggtctgatcacgactcacgatgagaagaagcaggcttttcttgaatactgggaagttgtcggcgagactgttgtttcttcaaaggagaaggaactgtatgatcaggtaaatgagcagattcagcagtactgggagctggatcagcaggccattaataccggtaaggtggatatggaagagaagcgtatgcaggcacaggagctgatgcagaatcaggtagcaccgctttataatgaaatttatgataccatgcgtgaacttatgaacgagaatgtccgtgaaggagattccctttcttccatactgaatatcatgggatttatcttcctgcttatcattgttggtgtgatcgtgctagcaattatcattgcaacgagaatggaacatgcaatctctcagggaatcgcagcaccgctggatgcattggcaaagcgtctggagacttttgcacagggtaacctgtccgatccgttcccgacactgaacagtaaggatgagatcgctgacatgattcattctgcaaatgaaatggcagaaaagctgagttttgtcattgccgacaccggagaagttatgagccagatggcaaacggcaattacaacatcacttccaagaacccggatatgtatcagggtgattttgaacagttgtttctgtctatccgtaacatgaagacacagatggttcagacactgcgttccatcgaggagtcttccaggcaggtatccgcaggtgcagctaacctggcagatgcttcccagaatctggcagagggcgctaccgagcaggcaggtgccgtagaagaactgcaggctaccattaccaacattacttccaatattgagcaggctgctgaacaggcacaggagtcctatgagcaggccagaaaatatgcgaacgaagcagataacagcagagcagagatgaaggctatggtggatgctatggccagaatcagtgatacttccaacaagatcggcaatatcatttctgaaatcgaggatattgcatcccagaccaacctgttgtccctgaatgcttccatcgaggcagccagagcaggtgaggcaggccgtggattcgctgtggttgctgaccagatccgtcagctggcagagcagagtaccaagtctgctgtagataccagagacctgattgaaggttccatgcaggagatcaaggaaggcaaccaggctgcagacagcgctgctgcttccatcgagatcgtagtagacggtatcggcaagattgcagagtcttcccgcagtatcagcgagatctccaaggaccaggccaatgccatggatcaggcagagcagggtgtcaaccagatctccgaggtagtacagtccaactccgctaccgcagaagaatcttccgctaccagccaggaattgtctgcacaggcaatctctctggatgagctgatcagcaagtttattcttcctcaggaataagaacggctgagacattgagaaaaatatagtacagctggaaaagcaggtatcggcaacgatgcctgcttttttctctgacaggaagtggacaaggctgcccggaatgggatataattacagggaaacagaattgcggacacagagaatgaaataatgaaatgaggtaagcataggaatggatcaggagcagacaccccacaagcgccgggtgcgttataaaggaaaatatcccagaaaattcgaggaaaaatataaagaattacagccggaaaaatacggggataccatagcccatgtgattcagaagggaaacactcccgcaggcatgcatatctccattatggtaaaggagattctggatttcctgaagatccagccgggagagaccggatttgatgcaacactgggctacggtgggcatacgaaagccatgttggatcagctgcaggggcgtgggcatatctatgccacagacgtagatccggaggagtctgccaagacgaagaaacgactggcagaggccggttacggagaagagattctgaccatcaaattacagaatttctgcactatagatgagattgcaaaagaggtcggaggatttgattttattctggcagatctgggagtatcttccatgcagatcgataatcccagcagaggattttctttcaaggtggacggtccgctagatctcagactgaatcagcagcaaggaatcagtgcagcagagcgcctggataccatcagcagagaagaactggcgggaatgctttatgagaattccgacgagccctactgcgaggagctggcgagggccattaccgatgagatacgtaagggacatcggatcgataccacgacgaaactgcgggaagtcattgagaagactctggattttctcccggaaaaggagaaaaaagataccatcaagaagacctgtcagaggacgttccaggctctgcgtattgatgtgaaccgtgaatttgaagtattgtatgagttcatggaaaagctgccgggagccttgaaacccggcggaagagtagctatcctgactttccattccggcgaagacaagctggtgaagcaggcattgaaggaaggctaccggaacggcatttatgccgattatgcgaaagacgtgatccgcccttctgcggaagaatgcgtacagaacggcagggcccgttccacgaagatgcgctgggcaatccgggcagaagcatagactgacagatggaacaaaggaggtgtgggaatgactgttatggaatttatcaatgcacacagggaggatatggaaccctgtgagtgtgtgatcctgccggacggcagtgtggaagagccacagccttctcatatcaaaaagctggaggaaatctccggcgaagataaactgacactgaacagccgtatggagaaaaatatggagcctatatttttcatggtggagtataccggctgtatgttaatatggagtacccgtgtagtggtgccgtcacacccgacaccggcacaggaagagacgttggagacattgcattttgcggcaatgctggcccccggttatcatagagaacaggtgggaccggtctacgaggaatgcgtcagaagagcaaaagaactgcactagaaagggaacgacaaaatggcatttacacatcttcatgttcatacagaatattcgctgctggatggatccaataagatcaaagagtatgtggccagagtcaaagagctgggaatgaacagtgcggcaattaccgaccatggtgtcatgtacggtgtaatcgatttttaccgtgccgcgagggaagccggcatcaagccaatcctgggctgcgaggtgtatgtggcgccgaattcccgttttgacaaagaactgaccggcggagaggatcgctatcatcatctggtgctgctggcagagaataataccggttatgcgaatctgatgaaaatcgtcagccgtggctttacggaaggatattattataaaccccgtgtggacatggaagtgctgcaggagttccacgagggaattatcgcattgtcagcctgccttgcaggtgaagtgccccggtttattctgaagggaatgaaggacgaagcgagaaaagcggctcgcaaatacgaggcctgcttcggcaagggcaattattttctggaactgcaggatcacggtatcccggagcagcgtacggtgaacatggaactgctccagatgagcagagaactggacattccgctggtaaccaccaacgatgtgcattacacctatgctgaggatgcgattccccacgatattctgctgtgtctgcagaccggcaaaaagctggcggacgaggatcgcatgcgttatgagggcggtcagtattacgtcaagagcgaagaggaaatgaagggactgttcccctatgcatgggaggccgtggagaatacccagaggattgcagaccgttgtaatgtggagatagagtttggcgtgacgaagctgccgaaatacgatgtgccggaggggtacgattcctggagctacctgaataagctctgcgatgacggactggcagagcgttacggtgacggtgaccagcctgccggggagaccggacagaccctgcgggaacgtctggattacgagctgggtgtcatccgcagaatgggatatgtggactatttcctgatcgtatgggatttcatcaactatgcgaaagagcacgggattccagtgggaccgggacgaggttccgctgcgggaagtatcgtggcatattgcctgaagatcaccaacattgatcccattcattataatctgctgtttgaacgtttcctgaatccggaacgtgtgtccatgcccgatattgatgtggacttctgcttcgaacggagacaggaagtcatcgattatgtgggcagaaaatacggcaacgacaaggtggtgcagatcgttacgttcggtactctggcagccaagggtgtcatccgtgatgtgggacgtgttatggatctgccctatgcgttcgtggattccattgccaagatggtacccaacgaactgaatattactttgaacaaggcattggaaatgaatccggaattccgcaagctttatcaggaggatgagcaggtgcatcatctgatcgatatgtgtaagcgcctggaaggactgcccagacatacctccatgcacgcggcgggggtggtcatctgtcagaaggcggcggatgaattcgtgccgctgtccagaggctccgacggttccatcgtcacccagtttaccatgacgacattggaagaactgggactgctgaaaatggatttcctgggactgcgtacactgactgtgatccatgatgcggtaaaattcatcgagaataccaccggcagacacattgatgtggatgtcattgactataacgatccgaaagtactggcttccatcggcaccggcagaacggaaggtgtgttccagctggaaagtgccgggatgaagagcttcatgaaggaactgcgcccccagaatctggaagatgtggtggctggtatttccctgtatcgtccgggtcctatggattttatcccgaagtatattcagggtaaaaatcatccggatgcggtaacttatgcctgtccccagctggagccgatcttaaagcccacctacggctgtattgtatatcaggaacaggtaatgcagatcgttcgtgatctggcgggctatacactgggacgaagcgatctggtgcgccgtgccatgagtaagaagaaacagtccgtcatggaaaaagagcgggccaacttcatctacggcaacccggaggaaaatgtccccggctgtattgccaacggcattgacgagcagacagcagggcagatctacgatatgatgatggattttgccaaatatgcgttcaacaagtcccatgcggcctgttatgcggtagtggcttaccagacagcgtatttgaaatactattatcccgtagaattcatggcggcgttgatgacttccgtcatcgataacccgaaaaaagtatcggagtatattttgaactgccggaacatgaatatcgccattctgccgccggatgtaaatgcgggagaagccggattctctgtgacagacggcaagatccgctatgccctgacagctatcaagggtgtgggacgtcccatcattgacagcctggtacaggagcgtaaggaaagaggccctttcacgaatctgaaggactttattacccgcatgtccgataaaaaagagatgaataagcgggctattgagaacctgatcaaagcaggagccatggacggactgggcggtacgagaaaacagttcatgagtgtctatgtgcagatcgcggaccatattgcccatgataaaaagaacaatctggccggacagatctccctgtttgacattgcaggggaagaagataaggaagaattcgatatccggatgccggatgtgggcgaatacaataaggagatgctgttgggcttcgaaaaagaggtgctgggtgtctacgtcagcggtcatcccctggaggaatatcaggagctgtggcagaactgcatcagcaatactgccggggattttgccctggatgaagagaccggagaggtgcagttagtcagggaccaggccaatgcagtcatcggaggattgatcgcggacaagacagtaaaatacaccaagaatgacaagatcatggcatttttgaatgtggaggatctgatcggtaatgtggaagtcgtggtatttccacaggtgtacgagcgctacagtaccttgcttgtggaggatgcgaaggtgtttatccggggcagagtatccctggaagaagacaaggacggcaagctgatctgcgaccagatcatcagtttcgaggatgcgcaggctgcgagagcggcgaaccagcccctgttccccagaaattacggaggccggggcggcagcagccgcggcggatcctacggaaacggaagtggaaatggcggtgccggtggataccggaatgccgggaacggctacggacaataccaaaatgacggtatgaacagcagcagtatgtcggtgggacagaccggtcaggcagcaggacaaatgcagtccgggcagcgtacacaggcaaatggaacccctcagaaaaaaggcatgccggcgggagcctggatccagttccccaatatggaggcctataagaccagagagcaggaactgctgcaggccattgcggattccgacggggatgacgatgtggtgatctatctgcgggacattaaaaatattaagatcctgccccaaaatctccaggtaaaagctgacggggcattaatggaaaagcttacagtgctgttcggaaaagaaaatgttaaatttataacgaaacctattgaaaaccgctcaaaaatagattaaaataaggaatcgagaagagaaaactattcgttcgtttacttaggaggtaacagtcatggcaaaagagattaagacgatcggcgtattgaccagcggcggtgatgcaccgggaatgaacgctgctattcgtgcagttgttcgtacagccattgcaagaggactgaaggttaagggaatcaaaaaaggctatcagggtcttttgaatgaagagatcatagatatggaagccaaggacgtatccgatatcattcagcgcggtggtacgatcttaggaaccgcacgttgtctggagttcaaggaagcggaaggacagaagaagggtgctgagatctgcagaaagcacggtatcgacggtatcgttgtcatcggcggtgacggttcttaccgtggtgcacaggcactgtccagacttggtattaatactatcggtcttcccggaaccatcgacctggatattgcatgtaccgagtacacaatcggtttcgatactgctgtcaacacagcaatgcaggcaatcgacaaggttaaggatacttcttcctctcatgagagatgcagtatcatcgaggtaatgggcagaaatgccggttatatcgctctgtggtgcggtattgccaacggtgccgaggatatcctgcttcccgagaagtacgattacaacgaacagaatattatcaataatatcattaccaaccgtaagcatggtaagacccatcatatcatcatcaatgccgagggaatcggacattccacttccatggcccggcgtatcgaggctgctaccggtattgagacccgtgctacgatcttaggttacatgcagcgtggcggaagccctactgccaaggatcgttactatgcatctatcatgggtgcttacgcagtagatatcatgctggaaggcaagaccaaccgtgtcgtaggttatcagcacggtgagttcatcgatttcgatatcgaagaggctttgcagatgcagaagggcatcaatgagtaccagttcgaggtatctcatctgctgtccatctaatttaatttaacagttcagactgcgaagcaggcacttttataaataagagtgtctgaacggatatgaagacaaaggcgtttcccattgcgtggaaacgcctttttgactataataaactcatccatagaatgcatcccgactgcttgcaggcaggggatcattctatgagaggagtaaacaaacataagtaagtagggtgattagcccggattacgcatgtttgttatggtttcgaaagtttgcagaacggagaaaccatattattatgatgtttaggagcggttagcagacagatatgatcacaagcaacaacaatgcaaaagtaaaacaggtggtgcagtggcagaccaaggcaaaggagcgccgcaaggatcacgtatttctggcagaaggtatcagaatgtgtgaggaggctccggtaaaaaacgtgcgggaggtctatcttacggaagaactggagcaaaagatccggcagaatgcccagaacggagacacagcattctgggacaaattgcagcagaccggttacgagaccgtatccccggaagtttttgccaaaatggcggatacccagaccccccagggcattctgacagtgctggaacagccggtctatgacctgacacagctgttggaacagccggatcctttatttctgatgctggaaaatctgcaggatccgggcaatctgggaaccatgatccgtaccggagaaggagcaggaataacgggtgttatcatgaacaaccagacggttgatatctttaatcccaagaccatccgtgccaccatggggtctattttccgggtacccattgtctacgtgccggatctggcaccggtgctggaacagatgcatgcaaaaggtatctacacctatgcggcacacttgaaaggacaggaatactacgattccttttctttccgggagcctacggcgttcctcatcggcaacgaaggaaacggcttatccaaggaaatctccgaccaggcgggacagtatctcaagatccccatggagggcagggtggaatccctgaatgcctccattgcagcggcccttctgatgtacgaggcccacagacagcgaagcgcaagactgtaactatcccggacccatttgctttatagatattatcaaatgccaggcattcgatgcgcagccgataatatttacatggctctgaataattatgatgtcggggtcaaaagcccacgacacaataataatagaagaaagacagaacaggaggaaagatatcatgaagatcggatttatcggactgggaaatatggccactgccatgatcggaggaatgttgcaaaaaggaattgcagctccggaggacatcattggttcagccagaacagaaacaacagtagaaaaagttaaaacaaaatttaatattaacacaacaacggataacaaaatcgtagcggcacaggcagacattctgttcctggcagtgaaacccatctttttcccggaggtgatcgaccagatcaaagatgtcgtggcagaggataccctgatcgtcagcattgcggcaggaagaactctggactatctgaaagaggctttcggcagaccggaattgaagctgatccgctgcatgcccaatactccggcactggtactggaaggctgcaccggcgtctgtgcggaagaaaacgtcacggaggaagacatggagcaggtactggcactgttacgttccttcggcattgccagtgtggtaccggaacggctgatggatgtagtcgtaggtgtcagcggtagctccccggcctatgtgttcatgttcattgaagccatggcagacgaggcagtagccgccggaatgcccagaaaacaggcttatgaattcgcggcacaatccgtccttggcagtgccaggatggtgctggagaccggcagacatcccggagaactgaaggacatggtgtgctcccccggtggaaccacgatccaggcagtcaaggtactggaggaaaaaggcatgcgcgccgctgtcatggatgccatggatgcctgcattgagaagtccaaaagcatgtagtgacagctcgactctgttcatgagttgagctgtcatggctaaatagcgcccaaagtcccaaaacttgacaaaaattttgtcatctgttatgatatctcgcgtaacaaatttaatatttttgtaacaaaccagtgaaaatcttaataatttcagcatatactattcactggtgagatccacaggtatcacacccatcggggaatcttcctgtgggaaaggcgtgtatcaagatgacaaaaagcagaagaatgctggttgtatgcgtaggactgctctgttctctcttcctgagcatgcagatgagcatgaccgcacaggcgggcaatacaaaaaattatgtaaatgatctgaacggtggtatcgcatccatcctggatcccggttccaggaacagcactgaggtgatcaacgctacagtgaaggaactgaacctggccttcccggcagaggaagagatcagttccggtctggtcatggcgaacgtaagggatgccgtgaatgtaagaagcgatgccagcgaggaagcatccaaggtcggtaaactctacaaggactgtggaggtaccatcctggagcgtaaggacggttggaccaagatccagtcaggcactctgatcggctgggcaaaggacgaatatctcctgttcggagatgacgccagagcactggccaacgatgtaggcaggatgatcgcacagatcaatacggagaccctccgtgtgagaacggaagcggatcaggaagccggtgtcctgggacttcttcccaagggagacatcgcagatgtagtagacaacagcaacccggaatgggtctgtattgactacgaaggcgcagacggttatgtggctgcggaatatgtaactgtagatttccagatcgactccggtgagacactggaggagatcaaggcaagagaagccgcagagcgtgaagcaaagcgtcacgtcaactacggcgaatataccaccgatgcggataccacgcagctgctggccgcactggtacagtgtgaagcaggctgtgaaagctacgaaggccagctggcggtagcgtccgtagttatgaaccgtgtaagaagcggagcatatcccaatagtattcacggtgttatctatgcctccggacagtttactccagcactgaacggtaaggtaaataccgtatacgaatccggcaggatctccgcaagctgtgttcaggcagcccaggaagccatctccggtgtctccaatgtaggagacatgacccacttcagacgtaacaatggccgtgacggactggtcatcggtaaccacgtcttctactaagtggcacacaaaagaacagcgcatacaacagagacggtatcccggaacaggggtaccgtcttttaacgtacaggcaggagccgatccgccggatggaatgaggaatgagaagagcacaatagaatcctgtatcgtgcaccaatagaggttgtcacagaagactatttgtagtacactggatacaactacaaaaccaaaggagtgatcacatgagtgaaatggtaaccttgtggcttgtggtattgatcgtatcgatcggtgtggaggtcgccactctgggactgacgagcatctggttcgccggaggcgccgttgtggcagtgattgccgccgcattgcaggcaccgatctggttgcagatcctgctattttttgcagtgtctctgctgctgttatttttcaccagacctgtcgcagtcagatatttcaacaaagaccgcgtaaggacgaatgtggaaagtatgatcggcagacaggcgatcgtgaccagtgagatcgacaatctgcagggcatcggacaggtaacggtgggcggccaggagtggagcgccagaaccgaaaaagacggactgaatctacagcccggaacggtggtagacatcgtggcagtcagtggtgtcaagctgatcgtcaaggtggatccgcagatgacgaaggtcatcggggaagtaccgcagtcacagaattaagaatcgtgtaacacggatacatgagggaaaagcgcgtacagaggtacgcagcgtacacgaatgtacgcagaaggaggaaaaatggtagcattaatcattattgtcgttttagtattatggatctgtgtatcctgtatcaagatcgtgcctcaggcacaggcctacgtgatcgaacgtctgggtgcttatcagtccacctggaatgtaggattcaatctgaagatcccgttcatcgataaggtagccagaaaagtcaatttaaaagagcaggtagcggatttcccaccccagcccgtaatcaccaaggataacgtaaccatgcggatcgataccgtagtcttttaccagatcacagatcccaagctgttcacctacggtgtagagaatcccatgatggctattgagaatctgaccgccaccaccctgcgtaatatcatcggtgacctggaactggaccagaccctgacttcccgtgagaccatcaacaccaagatgcgtgcggcactggatatcgccaccgatccttggggtatcaaggtcaaccgtgtggagctgaagaacatcatccctcccgcagagatccagaatgccatggagaagcagatgaaggcagagcgcgagagacgtgaagccgttacccgtgcagaaggtgagaagaaggctaagatcctggaggcagaaggtgccaaggagtccgcaattcttcgtgcagaagcagataagcaggcagccatccttcgtgcggaagctgagaaggagaagatgatccgcgaggcagaaggtgaagccgaagccatcctcaaggtacagcaggcaaatgccgacggtatcaagatgctgaaggaagcaggcgcagatgcagcagtcctgaagttaaagagcctggaagctttcgaaaaggtagctgacggccaggccaccaccatcctgctgcccgcagagctgcagggcattgccagcgtggcagagaccttcaaggcagccgcaggcaaaaaggcagaataagtaaactaaaaaacgataaaccaaagccactttccgggaaataaggagggtggcttttttatgtcggattcacaaaaaacaatgacgggggataaacgcgaggggttgaaaaacacagaataatgaagtatattgattacatatagcttgttacaggcaacgtttgtaacagggatatcaatggacaaaatcagaaaacagaggctgcgggcgcaaggccggaaagcttcggaaaagaggagtattatggatttaaagggacgcgattttttgaaattactggactttacaccggaagagatcgaatatctgctggatctggcggcagacctgaaggataagaagaaaaaaggaatccccgtagatactctccgaggcaagaatgtagcgctggtctttgagaagaccagtacccgtaccagatgtgcttttgaagtggcagcccatgatctgggaatgggaacgacttatctggatcccaccggatcccagatcggcaaaaaggaaagcattgccgatactgccagagtactggcaggcatgttcgagggtatcgaatatcgtggcttcggacaggatattgtggaggaactggcaaaatattccaaggtgcccgtatggaacggcctgaccaacgaattccatcccacccagatgctggcagaccttctgaccatccgtgaacatttcggacatctgaagggaatccgcatgacctacatgggagacgcccgttacaacatgggtaactctctgatggtagcctgcgcgaagatgggcatgcactttaccgcatgtaccaccgcaaaatatttcccggcgaaggagctggtagcggagtgtgaggccattgcggcacagaccggcggcagtattaccctgaccgaggatgtgaaggcgggcacgaaggatgtggacgtgatctacactgacgtgtgggtatccatgggcgagcccgacgaagtatggaccgagcgtattaaggagctgtctccttatcaggtgaataaagcagtcatggacaatgccggcgagcaggccattttcatgcactgtcttcctgcattccatgatctgaagaccaagatcggtgcccagatgggtgagcgtttcggcatcaccgagatggaagtgaccgatgaagtatttgaatccggccagtcgctggtgtttgaagaggctgagaaccgtatgcatacgattaaggcagtgatggcggcgactttatgagtatgaaagcaaagattttagagcttcttcgggaaaagaaggatcgggtggcagcaggagcaccggaaagcgaggcctatgtctccgggcaggagctctgcgagcagttcggtgtatcgagaactgcggtatggaaagccatcggacaactgaaaaaagaaggctatgtcattgaagcggtacagaaccgcggctaccgtctgctggatcagacggaggaagtctacaaccaggcggatatccagagcagattaaagacgaaatgggtggcacatcctttacagttttttgacagtatcgattccaccaatatccgtgccaaactggaagcggaacagggcgcggagagcggcctgttggtggtgtcggatatgcagagcgccggacgcggcagaagaggccggggctgggagagccccgcagggataaatatttattacaccctgatgttaaaaccggatttttcatcggactgtgcaccgatgctgacgttagtcatggcactggcggtggcgaagggcatccggcagacactgcgccgcgacagcgaagaggcagcagccaaggtcggcatcaagtggcccaacgatattgtagtggacggtaaaaaggtctgcggcattctcacggagatgagtatggagcaggggtacatccagcacatcgtcatcggtgtgggcatcaatgtgcgtaagcaggaatttcccgaggagatccgggaccgggcagcagccattgatgaacaatgcggcttccgcatttcccgcagtcagctgattgcggatattatggaagccttcgaggaagattatgagatctttttacagacccatgacctgaaaggtctgcgggcctcctatgcggaacttctggtaaatcaggacagggaagtctgcgtgctggatcccaagggcgaataccgtggcattgccagaggcatcaacgaccagggagagcttctggtggagagaccggacggcaccgtggagaaagtctatgccggagaggtatcggtccgcggaatctatgggtatgtgtaggcaggtacagcattttccgggatggcagaaggcagggcggacagccggatggaaagaccggaataaaaagaccggaataaaaagaccggaataaaaagaccggaacagatagtccgtgacagaattgagacagaacaggatatagaactatggacgagaacaagatcgtactctgcggcgccaacgcctatgagaagaaatattattttaacgaagaacaatttaagatgattccggattccatcaagcaggagctgcatgtgatctgcgtgctcttcaccgaggaagtgggcggtgtctttaccattgcctttgaggaggatggaaatgtggtcatggagaccaatgcggatgatgatgacatctattatgatgagatatcttccggactgttgatctctgagatccgtaggaacagacaggagcttttcgagtccctgagtctgtattaccgtgtgtttatcaaaaaagaagatgtatccgcattgctggatgaggaggacgatgaatgatttttgtcattgatgtaggcaacacgaatatgaccatgggtgtctttcaggggaaaaagctggaagccaccttccggatcatgacgaagacccccagaacctcagatgaatacgggatcatgatcacccagctgctaaaaaataacggtatcgaagtgacggacattgagggagtcatcattgccagcgtagtgccggatgtgatgcattccctgaccagttccatcatccgttatctcaagacaaaaccactgatcgtgggccccggtgtgaagagcggcatcaaggtcgctaccgaggatccccgggccatcggtgcggaccgtatcgtggatgcggtggcagcttatgtgaaatacggcggaccggtgctggtactggatttcggtacggcgaccacctatgatctgatcacggaggacggacgttttactgcaggaatcactgctcccggtatccggatcagttcggaggctctgtggaaagagacggcgaagctgccgaatattgagatccgtaagccgaagaccatcctggcacaggagaccattaccagtatgcaggcaggactcatgtacggtcagatcggccagacggaatacattatccgcaaggtaaaggaagagagcgggcttgcggagctgaaggtcgtggccaccggaggcttaggccgtgccattgcggacgagaccgacagcattgatatctatgacagttctctgacactggatggactgcggatcatctacgataagaatagacgttgataggggaatgacatgataaagctggaaaaagcagcaacaaagattatggcagccatcggaacagcagtaatgctgttcctgctgttttattcctggaaatatacgaagaggctggtggaaccggaatattatctggatgaaaaagacagtatcctctggaatgctcttgtcggcatagtgctggtggcggtatgcggggctctgtccggagtgatgaaaaagatcccggcgtgggcactgcatctgctggcagttctgggagctgtgacagcagtgattctggggataaggcttgcgagggccgccggagcggagagcattgcggaccagtattatgtgcaaagagcagctatggcactggcggacggtgatgcggaatgggtgctggcacaggattactatggtatctatccgttccagctgggactggcggagatcttcgccttaatcttccgtgtggcaggctcaacggaacggctcgtgatccaacaggtacaggcggtctgcggaggcatcacgctgtatgtgggatttaggatcgtgcgggaactgtcgggaagccgggcagcggaactgctgtatcttgtggcggagcttttgttcctgccggtgtattgctatgctttgtttatctatggtgagagtatcggaacctgcagcgtcctgtgtgccatctggtgttacctgatggccaaccggccggagggaaaggtgtggcagaagggactgctgtggagtgccgtcgcgttattcatgggactggcgtatgcgaccagaaatgtattgctggtggtatggatcgccatggtcatcatgcagatcctggtgctgcttcgcagtaaaaaatggcagggactgccggcgctctgcgtggtgctggcagtcatgctgctggggaaaacgactctctgtcacatggcggaaggacagcttgaccgggaatatggttccggtgctccgtatgtgctgtgggttgccatgggaatgcaggagaatcccgacgccctgaaggggccgggaacctacaatgactataatctggacacttatctgcaggccgggtatgacagcatagaggcagcagaagtggccaaaggagatatcaggcagtgtctggcaaaatggcaggaggatcccgtggcagccgttacgtttctcaaggagaaactgctgatccagtggatcgagcctacttattgcagctttaaccagaccagataccagtaccggccgcaaggctgggtggaagacctctataccggacaggccaatgaaagagcactggcattcctgaaccgttttcagggaatggtatatctggcggttttcggatattatttgaggatcctgctgggaaaactgaaaggtgtacaggtacttccggggattatttttctgggcggctttttcattacgatcctctgggaggccaagagccgttatgtgtatccctatatcgtcatgatccttcccagcgcggcatgcagtatggagtattacggccgtctgctggcgggtggcatcgggaggatcgcaggcggtattgtgagtagtagggaaaggaaacagaaacaaaaagaaataggaaggacagcatgaaaaaattacagattggtaatgtgaccctggacaacccggtgatcctggcacccatggcgggagtatccgacctgccgttccgcctgctttgcagggagatgggagcggcgctggtgtgcatggaaatggtcagtgccaaagccatatattataacaataaaaatacggacagtctcatggagatccatcccgaggaagtgccggcttccctgcagctgttcggctcagatccccagatccttgcggagatggcaaaacggatcgaggaacgtcctttttccatactggatctgaatatgggctgcccggtgccgaaggtcgtgaacaatggggaaggttcggcactgatgaaggatccgaagctggtggagcagattctgacggcactggtaaaggccatcaacaaaccggtgacggtaaagatccgcaagggctttgatgatgaccatgtcaatgccgtggagatcgcgaagatcgcggaagcctgcggtgtggcggcagtggcggtgcacggacggactagagcccagtactacagcggacaggcagactgggatattatcgcacaggtgaaggatgcagtgaagattccagtgatcggcaacggggatgtggacagtccggaaaaagcaaaagccattctggaacagaccggctgcgatggtgtcatgatcggccgggcggcagagggcaatccctggattttccgggaggtagtgtcgtatcttgcgaacggcacgatcccggcaagacccacgaaccgggagaagcgggaaatgatcctgcgccatgcggcattgcagctggaatacaagggagaatacaccggtgtccgggagatgcgcaagcacctgtcctggtatacggtgggaatgccccattccgctcatttccgccagaccatcaataccatggagaaaatggacgaactgatccggggagtgcaggaaatctttccggacgaagtgtagtgcggattttggatacagcaatgcattatgaggcagaccttgcatgatatgatgttgtgcgcggtgtggtgcatataattgggatgactgcatacaatgaagcatggacactattttgtatctctatccggcgcgacggacagcgatgtgcgggacaccgccggaggaaaaagcggaactgcgccggggaaaactgaagaaatttttgcccttcctgtggaaaaagggagaagaccggcatcctgtggtgactgtgagccggacggaatattttttcccggactatcatctggtcagagtgtcggtagccagaacggaaggcatggataaagaacaggcggagctggcactcacggagctaaagctcacggagctaaagctccgggaacaattacaggaactgacagaggatccggatcacacctatgtggtgtgccgtgagcctctttctttttatttcggaagggaattccgggattatctgcaacaggagtggatcgaacatctgctgcgctacggggagagaccgggcggctatccggcgtggccggatctggttctgctggggagaaatccgtatctgccttatgtcgtgctccgctatgctgccagattgcagagcatgaaatggtatcttacggaaagagaataccgggaggaggaagagtggctgactggggaactggaggatgagtacggtctgatcccggagatccggctgcttgcggaaactgcggactacggacgagtacggctgcaggggacgaaaccctgcgtggtactggatttttgcgacaatgaaaaggtctacggcggcggactggcagcaggcagtatctggctggattttccggcatcggaggacaaggagcaccgggccctggtacaatgtccgcagatccgttatttttccatgaaaaaagagtggaaagaccctcgaaaagcccaggaataccttgacaccatcagcaaaaatgggtataataactcggttgattaggctagtatagttgccgggagtgtcggcagtacaaaatatagaaaacaggaaggtgcggtatcatgcaggaaaagaaaaacattttgacctacgaaggcctcagaaaatatgaggaagagttacacgatctgaaggtggtaaagcgtcaggaagtagcccagaagatcaaggaagcaagagagcagggagacctgtccgagaatgctgagtacgatgcagcgaaggatgagcagagagacatcgaagcccgtatcgaagaactggagaagatcctgaagaacgcagaagtcgttgtagaggatgaggtagatctggacaagatcaacatcggatgtatcgttaagattctggatgtggagtatagtgaagaactggagtacaagatcgtaggttccaccgaggccaacagcttaaagggtaagatttccaacgaaagccccgtaggtaaggcactgatcggtcataaggtcggcgataccgtagaagtagagacacccgcaggtgtattcgcatataagattctggagatccagagaagtaatgttgactaagtaagatagagtaaggagtggaaaaaagtggcagatacacagaacacaaaggtacaggaacaggacattcaccagctgttgaaggtaaagcgtgagaagctggcgaacctgcaggaagcaggtaaggatccttttcagatcaccaaatatgatgtgacccatcacagcaccgatatcaagaacaatttcgaggaactggaaggcaagaccgtccgcatcgccggacgtgtgatgtccaaacgtgtcatgggtaaggcatccttctgtaatgtacaggatctgcccggcaatatccaggtatatgtggctagagacagcatcggcgaagagtcctatgcggatttcaagaagtacgatgtgggcgatatcgtaggtatcgagggtgaagtcttcaagaccaagaccggcgagacctccatacatgcggcaaaggtaacactgctgtccaagagcttacagatcctgcctgagaagttccacggcctgaccaataccgatatccgttatcgtcagcgttataccgacctgatcatgaatcaggacgttaaggatactttcgtaaagcgttccagaattatcagtgccatccgccgttatctggacggacagggcttcctggaggtagagacccccatgctggtatccaatgccggcggtgcggcagcaagacctttcgagacccactacaatgcactggatgaggacgtaaagctgcgtatttccctggaactgtatctgaagagactgatcgtcggcggcatggagcgtgtcttcgagatcggccgtgtattccgtaacgaaggtctggacaccagacacaatccggagttcactctgatggagttgtaccaggcatacaccgactactacggaatgatggatctgaccgagaacatgttccgctatgtggcacaggaagtatgcggtaccaccgtaattccttacgcagaagagaccattgatctcggcaagcctttcgagagactgaccatggtagatgccgtcaagaaatatgcaggcgttgatttcgatcagatccccgacaccgctgctgcgaagaagctggcagacgagaagggtgtacattacgaagagcgtcatgccaagggcgatatcctgaacctgttcttcgaagagttcgtagaagagcatctgatccagcccgtattcattatggaccatccggtagagatctctcctctgaccaagagaaagccggataagcccgattatgtagagcgtttcgaactgttcatctatggacgtgagatgtgtaacgcttattccgaattaaatgatcccatcgaccagagagagcgtttcaaggcgcaggaagctgcactggcagccggcgatgaggaagccaacaccaccgatgaagatttcatgaacgcactggagatcggtatgcctcctaccggcggtatcggatacggtatcgaccgtctggtaatgctgctgaccaactcccctgccatccgtgatgttctgctgttcccgacaatgaagaccctggaaccaaagcgggctgaaaacaaagccgaaaaagcagcggtaaatggttctgcagaggctgcaaccgtgtccgcaccaagcgtacagattgatctttccaaggtgaaaatcgagcctttgtttgcagatgatgtagactttgagacattcagcaagtctgatttcagagtggttaagatcgaagcctgtgaggcagtgccgaagtccaagaagctcctgaaattcacactgaatgacggaacagaccggaaacgcaccattttaagcggtattcacgagtattacgagccggaagagctggttggtaagacctgtgtggcaatcacaaacctgccgccgagaaagatgatgggtattgattccgagggtatgctgatttccgcagtgtacgagtatgacggacgggaaggcttaaatcttttgatgctggatgacagtattccggcaggagcaaagctgtactaaagaggtcatttactacaaaaaatcgcgttactacaacttttctacaacttttgcgcgagaccctacgaaaccggatgaagcaatatgaaaggcggatctgcttataaaatgcagattcgcctttctttttacatcagcttcatgttcacactaatgttttttgccttctcctgcatattctcttgtgtgatatgggtgtagatgtccattgtagtagagaaatcggcatgccccatgacttgctgaatgaatttaacatcgttggtgctttcgcagagccgggtacagaaggtgtgccgcaagttgtgaacactaaaatgagggagcagatccggttcacggtcttccagttcagcctgatccatttcctccatgttgtaagttacgctgattctctcaatcgcccgattgatattgtgggcgctcatgaatgagccggttcggttgcggaaaacaaaaccgtgaactcctcctaacaccagttgatcgtctggatacaatgcgtcgatggtttcaatctggaggcgaagctgctcggccacctctggatagaggatagggataattcgtgtaccgctctcagttttgggagtggtaatgtgaaatccggcttttccgtcaatgacccggtagattaagttgtggttgaccgagattgtgttttcgctcaagttaatatcgcttttggtaatgccggtacattctgctacacgcattcctgttccaaggagcacagtcatgatggggagccaatggctgtatgtaggggacttggcaataaaacgcaggaaattctgctgttgcgttttagtgagtgcgatccgccgtttaggctttggagcgctgccgtccgtcttgagcttgcggtaaatgcccttgctgggatttttgcggatgtaatcgtcgtccacggccatttcaagcgtagggtgaacaatggtgttgatgctctccagtgagttgatagcaaaaccgtgtttcagcagtttggtataaaacgcgagaatatcacttctgtggatttgtggcagaggcatgttagcgaaaggctcttctttcacatagaagtcccacaggtaaagataatttgctctggtggagggcttcagtttgatgttgttattcatgtagaccttgaacatatcattcagggtaagcttcatggcttcctgagtacggatgccatcatccttatctttgttgatctgcttttctttgacacgaagacttgcgagatcggagtcgtaaagatatttctttttagtgcctaatttgtagacatacatatagctgccatctgcccgttgtgtttctccgggccgaagatttcgtcctttgttgtcttttctcacttttgccattactggtacctcctgattataaaagtgtagtgcgccttactggcatggttatttagccggaaatatcataaagatattctttgatacgctggacactccataggacacgggtgttcatggtaatgcgtgcattggcaagatccccaatctgtaccgcagtgtgtcttccacagcacaacagtttgcaaagggtatcggtatcaacagccaagcactgctccggcggtaggtcattcggttttcttttctccataatcgtcctccttttttcgattacaatgatcccttacgatttgtagaagaaggttttcaacaaaaacaatgaaaacggtcttgaggtcaggaggtattgaaaaacaaaagaactctaatggggccatttcctacgccagaacggttctgccgtgtatttcaggctgctgctgtgcagcatttcgattatgggcgcgcttctgtggtcatcgcacactgtccagaattcctgtataactccccatagaggttatgaacttgtcaaggtactaaaagagcgtagggatcatccggtattaccaaatgatccgatacatcctataaataggctgggaagaaagaacttctgcaaagaggaaagaaaatttaaagaaaatccaaaaatcaatatatagaatgttggaattgacaaacactatatattgtgttaaaattgcaatgtaattgatttttgtgcgttgcccgtcagggtacacaggctttagggcttgtgttgcggagtaatgactgcattgcacacgctgttaagtttgtacttgtgtcagtagtatcactgcgccttttcaggccggtatattactggcttttttattttacgggatttacccgccattgcgagaatgacaccggttcataggcaactatggacaccaggctttatgccgtctgtcattctcgcttttttattgcctgtaagcctgaaagggctttaaggataaatcaaaactgagaaaggcaggtcatgtacatgaatgtgaagcagaaaagaaagcagaatggtcggcgggtcaagtcggcacactccacggactggaagatgaagagacaggcagtatcttcgctccggctacgaaatgttgcaccaatgacgagggcggttattttgccccgaagatcacgaagggggatttgatatgtctggcagcaatagtgctgaacgaaagcggtatgaaccgctggtgctggtagaaacggcagatctttcagaagaagactggctggattaccggcgccgtggaatcggcggcagcgatgtatcggcgatttttggcacttctccattccggacagccagggatctgtactacgacaaactgaacatagcgtcagtggaagatgatgagggcaactgggttgccatggaaatggggcatttgctggagcctctggtagcaaagatattcgagcggaaaactggatatcgggtctaccagatcaaaaagatgttccagcacccacagtatccttggatgctggctgatgtggactactttgtggaactgccggatggcaccacagcaatccttgagatcaagaccacaaactataatgccagagataactggtggatgaatgggaaggagacggttccagtctactatgaatctcaggggcgtcattatatggcggtaacggatcttgaccgatgtttcttttgctgcctgtatggtaacaacgaggaagaagttattatccgggaggtcaaacgtgatttcgagtacgaggctgagatggtctttttggagcagtatttctgggaaaaccatgtgcagcgccatgtgccgccgccctatacagaaagtggggccttgatcattgagagcgcacgcaaacactttggttcggcagataaaaatgctccggccgttgcactcgacctggatatgactgcaaaactcatgcagtatttgcgtcttctggatgaaaagaaaaatgcagaggtgtactccaaagaaatcgacaaggatattcagcgtctgaaggccctgttgattgcggaaatgggtaccagctgtactgcgatctgtgagcaggagggcgtgaactatacggttacctatacccctgttcgcaagtccatcatcgacaaggataacctgcttcggttgaaactggagcatccggatatttacgagcagtttgttacagtatccgaatccagacggttcagcgttagagcctcaattatggaggccgcttagtgaggtgaaaaaaggatgaattgtattggaacctacgacgggacgattttttataatcctgccaataagttttgtatcgtcagtgtaaagaccgcagaccagagcgtgcctgccgaggccaggtcaaacagacggtacaaagaccatttgatccgctttacagctgtggggtatgagattccacggacagatgcggtagagctggaactggatggtgaatggacaaagggcaagtatggtgtccaactccaggtggagcagtggcgtgaaattgtgcccagaacaaaaaacggtgtagagggctatcttgcctccgggcttatcaaagggattggtcctaaaactgccgcagacattgtggagcggttcggtgtggccacactggatattctggaacaccagccggagcggctgttggagatccggggtattacggaaaataaattggaggacatcagagcctcttatgcagaaaaccgtatgctccaaggaattatgactttgctggcgccatttaagattactcccaagacagcattgaaaatatatcaatatttcggcccaaccagcgtagagattttggaaaagagcccatttgagctttgccagatctccggctttggatttcggcgggtagatgcaatcgtacaaaagagcgggggtgatctccatgaccctatgcgtatcaaaggggctgtcttttgtgcgttagatgaaggcaagagtaaacgaggccatctgtacatcagttctgaagaactggagaaatcagcgctgaagctgctcaatgagaagatacctgtaccggagcttcgcctgcatcagcaggaagtcagggatatgatgcaggaaatgatcctgaatggagcattcgtttctgtgaaggataatatctatcttcccagagtgtttgcccaagaggacgaaacggcgcgccggatcgcccagcgtctggtcacccagatgccagtagagcatattgcgccggtgctggaacaggtcaaggttgaaatggggctgcgcctgtctgcacagcaggaggctgcggtctatgcagcatttaggcatggcttgtcagtgattacgggttctcctggtactggtaaaacaacagtgctgcggacgatacttgaggtttaccggcggctgcaccctgatggcaaaattgctcttatggcgcctaccggtcgggcaagccgcaggatgtcggagagcaccggctttgaggatgcccggacattacacagtggtctgggactgaccagtgaagaggatgagggtagccggaacagaaagtcagagccactgtcggccgatttaatcattgtggatgagttttccatggtggatatgtggcttgccgagaaattctttgagcgcatgaaggcaaatgccagaatcgtgctggtaggcgacccagatcagcttcccagcgtaggagccggaaatgttttccgtgagatcatcgagacccaaatcgtcccggtaacggtgctggatcagattttccgtcagtcgaaggacagtctgattgcctataacgccaaatttatcaacgagggcaataccaaactgttttatggaccggattttgttttcgtgtctggtgatagtcaggaagacaccgctgaaaagattacagaacggtattgtttggagatacaggagagtggcattgagaatgtgcagattctttcacctttccgttcagaaggcgccgcgtcgtcggaacagctgaatgaaaccattcgtgaattggtcaacccattccgctctgcggaggaagaaatcaagtttggccccaggatcttccgggtcaatgaccgcatcatgcagaccaagaacacagaaaaggtctctaatggagatctgggcttcatccggtatattaaggacactgaccagggtaaaaaaatcggcatggattttggcgctggcagaacactggaatacggcgtagatgatttgagcaatgtggatctggcgtatgccactacaatccacaaggctatgggctctgagtatgagaccgtcattatgccgctgctcaaagcgcacaccatcatgatgtaccgtaatctgctctacaccggaatcacgcgtgccaaaaagcgggtggtgctgattgggcagaaacaggtattgtttatggcaatccatcgtaatgagatcggcaagcgaaatacgctactgggtatgcgcatccagatgtatttcaaagcctacgcaaagaaagccggcatccccattccggctgcgttggaagagcaattaaagaacgcaagttaaaaaagagaggtcaggtgcagaaatggcacttggcgtctcctatttttatgtcagaaaggagtttccaacatgaatgaaaaaagtaatccgatgcctatgatgtacaaaacaattccggcagtggcagaactgaacaaggtacctggctttgatccgctcaaatttctgcgccataaggtgtccagaaagaccaatgaggaaatgctgcagttggagttgccctatcagaaactgtggttccgtctgcgccacccccagggccgcatgaaactgactaccctgaggatcacggaacagcttgcgattatggaggccagagtttatctggaccgcagtgatgcagagcctatcagcagttacatctcgcagcacagtgcggaagaaggtaccgattatgtgcaggctgcccaggatgaggcattgagtgctgcgctgtcggatgccggtttcggtttgcagtttgccgatgttgctgttgacagtacgggcaaggtgtttggaagtagtattccgctttccggggcggctcctatccagcagccaatgccggatgcggcacagaggcccgtagaagcctctggagcggcgttgcggcaatctggcggggaagttcatgcccgactggaaagagcgcctcagagcgtcgtagagcgccgtaatgcgcctgcgcgtccgacctctatccagaaacctgcggcaaagccggttcagaatgaacagcccccggtttctccggtacagcccactgtccagcagatggctgcagaagagaaggagaatatggatacgctgcctgtcggcaaggtagaggagaatgctcccaatatggagctgccggtacccaaccgtgaggttacattggatagcagtccaaaacaggatgatgtgtctgagcagccggccgcacccgtattccaatcggatgaaccggaagaactgcctgtggcgcctgttgttcagcaggaagcacctaatcagcccctggcgccttcttatacggagagcactccggtagaagatatcttgaaggtaatgacctttgaagaagcgcagaatgtggtggtggatagcggtctgagcaaaggaaaaaccatggcaacagttgccaaggagcgtccggtgagtctgaaattctatctcacccctggtaacaagagtaccaacaatatcgttcgtgctgcggcgcagatcatgctcgatggtatggccgcacagaaagccggatgataagcagccccatctatggggccaagaagggagggagaacagatggactcatatccaggagattttccgttcggtattatggatgtagtggaacttctacatctgcgaatcagacgccgacaggcaaacagtgtatatgtggattgcccgttttgtggtgaccgccgcggcaagatgaatgtgaatttcgtcaaaaatgtctggcggtgcaattattgtgatgagcatggcggtatgcttgcgctttatgcgcggctaaacaatacgactacatccgatgcgtattgggagataggagaagccctgtgcaacgattttcacagggaacggccgaactctggatatgagatggcaggaaaccagcaggctggtactgggtccccggtttcggggactcagaccgaccttgccggatatgagaggaggggcgaactaaaaacagtgcagcaagcagaacgggccagcggacaggaaatccatcaaacgctttcgctgctgctcgctatgctgcctcttcagcctgcccaccgcaaccatctgcactccccaaaacggggactgtcggatgaacagattgataggatcgggttcaagagcactccacccccattcctttgccgctccattaccgagcggctgatgaaacagggatgcaaggtggagggagtgcccggcttttatctggatgacagcgggcgctggaccatgaacttctaccgaaaaaacgcagggattttgattccggctgtgggatacgacggtatgatacacggcctgcagatccttttggatattccgctcaagcaaaaagatgatccgccgaataaggcaggagccaaatacatctggttttcgtcctcgtccaaaaatatgggtgttacatccgggagtccggtacattttataggagatccatctgcccgggtggtctatgtcattgaaggactgctgaaagcagacatctcacactgcctgacaaaccggacttttgtggcgattgccggtgcaaacaacaccagccagttggatacgctgtttgcactgttggcacagaatggcactgaggagatcattgaggctcatgatatggataagtacagtaaccaaatgacctctaatggggcatctaagatctatctgatggcccgaaaaaatggaatggcatgtcgtcggctgacctggaatccgaattataaagggtttgatgattggcagcttgcccttcgggagaaagaacagaaggaaaaggaggtgcagagaatgaattttaagcagcaatatctgtgcggtaagtgtgattttacctatatagatggctgcgtcgagctttggcacaccagagcggagaaagatttggacctgacagagtatctggggctgacaaaggaagagtatcagatatttcttgctcaaggcaatcaggcgctgaaggatattctggacagccagagagttttccggagattttgcatttaccagctttgcctgggtgagacacagacggtacctttcgcgttcaagcaactggatgcactgcgtaaggctggatatgaacagccgcctgccgccgcctatcagacggtatggagcgcagaggtctgttgcccaaagggtcagaatgacatggaagtgctggggcgtctgttcctggactacaatgaacatttgccggaagattacagaggtcgtccgttggctccatctgatgtggtggaactggactgccaaggcaaacgcacatacttctatgtgaatgactgccgggattttgcaccggtacgcttctccccattcttgtgtaaaagacttccggagcctgctcaaaaacaggaatgaagggataggggtcagatgcgtattgcagaaaagaagaaaagtcagattgcagcactgtatgagcagtgttccggccttccggcagatgtcagaagttgtctggagaatggctactttaccgtaacggtacctccgccatggaatatgagcaatcaaaaggttgcgcaggaggtgcaggacaaaatcaaggaatggtcaaggcagtatactggcgtggtctgctactgttttgacagcttcagcacacttttatatgtgctgtgagcaacacacaatggcatggaaaggatcataacggcctgctccatgccttttttgcgaaaggagattttacaatgggtgttttttcagaaatagcaatggagcagcaaaacggtatgttcgattcgtctgcagcctttgaggatgatgaagcctttgagctggaggagatggaatctttgcctgtgccgcctgtaggtacagacactgtcccagtatcggcggcttcggtttgtgccggtgagactgctttggctgatgcagaggaggaacctacggatgaagtagcgcctgctggggaagagaagtctgctgaggaggggaattcggcacaaccgcccgccgcagaagatgaagaaaaaaagcgtgcggagcatgaggcggctgaagcccagcgcaaagcggaatttgacgccaaacagcaggcgaagaaagccgcagagcaggagcagatcgcccgtctggaagcgatgagtgatgaagaagtaatcgcggcctctacccagcgggtaagtactgatgtggaaaaactgacgcggcgcaatatgaaggagtgtgtgtccgagcatattcagatgctctgtatggaagatacggcgtttgcccgtctgacaatgcatccgaaaaagaacatgattcgctgtttccagtacatcaaccggagagcctgggattatgtacaggatgaactaaaagcaagcggaacccgccctggtcccggacagcaggcgtatggctgcgatgtgccggatgatctgtgctatcagtgggcggaagattatttccgtgaccctgatgccaaggaagaccatgaggatgaggaaaagtttgttcccaagccgtatgctgggaagtcctctgcaaagaacaaacccaagaaggcggcagagaagaaaaagacggaacccaagtcggcacccaagcaggaggaaaaaaagccttctcaggatgggcagatgtcgctgctggattttggtatggcaaaggcaggctgaaccggcaaaggaggaaaaatgcagaatgattgcttataagggctttcgccccgggctgatatgccgtggctatcagtttgtgatggggctcaatacgactgaaaaagcaaattgcagggaaaatggatttcactgcgcggaggacccgcttgactgccttagttattattccagcctggagcattcggaatattatatcgtcaacgccggcggcgacatcgatgaagatgagcatgactccaaaatcgcctgtacggagctgactgtgattaagcggctaaccaaagaggagttgtttttacatggtttggcatacatggtagatcatccgcgcagggtgtggagctcccatgtggcagccaaccgggcaatggcgaactgcggttatgcggtggtacggggcaaagaccccgttgctaccggaagactgggagacatccttgcttttgcgaaggaagctccggattcggaaagtatcgtacaggttgcagtgggccggattgacggcgttacattactgcctgatgtgtggtatggcgtagatttgacaaagaggatggtgaattgagatgaaaaaaagagccctgatggcacttcccaatctgacagcgacggatgaaatgaagaaaatcgcgacttcagacctgccaagaaaggaaaaaactgactacggatatgttcgggaagtctgtgagtattatacctatctgagatgtatcaaacaggatggaatattgaaggtggctttctttttcccagagcatcttcgcttggatgggagtaatccggcctatgaagtgtatctggataaagaaaagcggcagtttattacctataacagcctgatacagaaatggtgcgaatccaagttggacagactggactggaagcggcaatactggtataccaaagcctactggatcagcgaggaagatgagacatctatacagacatatctgaacattgataaaaaagcggtagaggccatcctgcagtttcagcgggatgtgcgcgatgaacagctcgaacagcggcaccggcgggaaactgatccatgggataaagatatggaacaggtgccggaacttccgaaggactggagtcgatgggtggataaggttgccatccggcaaaattacatttactaccactacaaaaagggcggcgccaaaacaggttattgtacctactgcgaaaaggaagtaccgatcaaggtacatccacatcacaatcaaaaaggccgctgtagttgttgccgccattcggtggtattcaaagcctatggacgagcggggtatatgcagacagaaaaacattttgcctacctgatccagcgatgcaaagttggctttgtagttcgtgaatttcaggctgaccggacatacagaaaagaaagccttccaaactccagactttattgccaggaaatccggcgcacgatttatgacaaggaaaggaagccaagaacctactattgggggttgtataagcagcgcaatatgcgttggatttccggatccccctgttcttacaactggtctggttcgcataatggacgggtctatggcaaaacgctgccaactctggaacagaaggaacttcgatgcacagggctggtcaactggattcggaagcagaaaagcgttgatccggaaaaatatctggctgtgctcgaacggataccgcaaatggaacagatcagcaaggcgagcctgccgaagcttaccagagaatgtttcagttcctgcggaacggtcagtgaacttatcaaaaaccgtagtacagggagcctgatcaaagccttgggacttgacagcagaaggtttcagcgccttcggctccataatggaggctgtgatctgctgcggtggctgcaatatgaaaagggcaccggcagggaaatcccggataatgtccttttgtggatgtatcagcaggatattaagcccagggatgtccagttcattgccgaccgcatgagcatggtgcaggtctataactatgtgcggcgtcagatgccatctttccggcgaaacagccatgaggtactgcgtacatgggaggattatctttccatggcaaagaaactgcacatggatgtttatgatgagatcgtatatcgcaccagaaagctgcggcggcgccatgatgatctggtgctcaaatgccaggagaaggatattgaactgcaggccgaggagatggaggagaaattcccccatgttaatgccatctgtcaggaaatcaaaacgaaatatgagtacgccgatgcggattatatggtagtggtgccaagcggtattctggatattattaccgaggggcgtgcgctccatcactgtgtaggaagcagcgaccgctactgggatcggattgagcggcgagaaagctttgtgatgtttctgcgtaaaacggatgatcctttccatgcctattacacgctggaagtggagccggatggaacagtgcggcagaaacggacggaatatgaccggcagaagaaggacattgagcaggcaacagagttcctgcagaagtggcagcgggtggttaccgccaggctgacagaaagcgacaaggcgctggctgcagagagccgtgtccttcgtgagaaggagtttatccagttgaagaaggatcgggtcatcatccataccggccatttggcaggaaaacttttggtggatgtgctgatggcagatctgatggagaacacggatagcatccagtctccggcgctggctgctgcagcgtgacaaatgagaatggccgggcatcctttgggtgtccggctattgatgaacaaggaaggagcagagcatgaaacaaattggaaatctggcagtggtttgcgccaggcgacaggatgtgctgctgcaggttggcagtgaaaaggtatgtgtccatgtgggagccggaccagagcggaatacgcttcacgcagcgtgggacgatgatgacgccattcagcgtattgtccatgaattgaattttggcaggtatgcagccggcagaaatgggctgcataccgcacagcaggattgccctgtggggcggggaaaggagaaaagcgcatgatcaaaaacctgaatcagctgcgcaggacacttcgggaagggacgcagttggagatattggatcactgccggccggaatgtattggacagatacggaacattacgctggtaaacacgcagggcttttatagtaccgtagcgaatcagccagatgcgtctgccaacagagggaacggcggccgcggcccaatcctttggtggggcagagccgcccactggcagtttacagacggtgtttgcagtgttttcgacagtgaacagaagcatacggaagaagaactggttatgtccttccgggtacttgaaaaggaggcagcataatggaacggaatatttttgaaaagcagagagaattgaatgaccggctcaaccgttatcgggatgagtattataaccgcaatgcgcccagtgtgtcagatgaggtctatgacagactctttgacgagttgaaagagctggaacaggaaacgggaatccaaatggcaaattcgccaacccagacagtaggctatcctgcggtaagcagactggagaaaaccagacatgagatcccgctgttgtctttggataagactaagagcagtatggttcttctgaatttcatgggtgagcagcaggtgatgctgatgctcaaactggatggcctgactgtaaagctgacctatgagaatggagaacttctggaggcggctacccgtggcgatggtgacgaaggggagatcattacccataacacccgagccatcagcggtattccttcccacattacctacaaagagagactggttgtgacgggtgagggctttatcagacccagtgattttgaggaactgaagaccagcctgcaggacagcagcggtaagccctataaaaacggccgcaatctggctgctggttccatccgtctgatggatgccaagacatgccaggagcgtcggctggttttcatgccgtttggtgtgctggagggctttccgcacctgacccggaaatcagataagctgcgggaattgcgtgcgctggggttccagccctgcaagtatctggtcacaaagcagaaactgacattggaaaatgtggaagccggtatttatcagctgaggcaatatgccactgacaaagatatccccattgacggtatcgtggtttcgtttaacgacatcgcctatgcccagagctgcggccacaccggacatcactataaggacggtctggcctataaatttgaagatgacctgcatgagagcctgctgcagtacattgaatggacaccgggcagaactggagagattgctccggtagctgtgtttacaccggtggaaatcgatggctgcgaggtcagccgggccagtctgcacaacttgtcctttattgaggatctggaactgatggctggaaaccggattctggtaagcaagcgaaatatgatcatccctcatgtggaggaaaatttggacagaggcggtttctctatggcggatacgattccccatgtttgcccctgctgcggacagcctacccgcatccatgaatcaagcggaaagggcgaaaagagcgaggatcgcatcatcaagacgctgtactgcgataatcctgactgtgaaacacgccggctgaagaagttcgttcattttgtcagccagaaggcgatggacattgaagggctgtcggaggctacactggaaaaattcattggtcagggatttatccatagttatctggacatttaccgtctggaccgctaccgggctgaaatcgtccgcatggatgggtttggtgaaaagtcctggcagcgcctttgggacgctatccagcagagccggaataccacctttgaacggtatctgatttctatggacatccctatgatcggcaacactgccagcaaggtattgggtcgtgtgttccactatgatttggatgagtttcgggatgcggtctatggaggctatgattttcggcagcttccggatttcggggagacattgcataacaatatccacgactggttctgtgtagaagataatttctgtatttgggaggagttacagactatgatgaatattcaaaagcctgctgtggcagaacacagcgaagacagggtgcaggataatccctttgtaggaaagactatcgtagttaccggcaaggtggaaccctacacccgggacggaatcaatgacctgatcgaatcactgggcgcccatgccggcagctcggtgtccaagaagacggattatctggtctgcggcgaaaatgccggcagcaagttatccaaggccagggatttgggcgttacagtgctgtcgcctgcggagtttttcagtatggctggtgctgagtaagataatatagcataccatcggtgtgctgtcagttaatcaatggggagagagccgaaacagggctctctccccatatcttttatggaagatttcaagtaggagggattttaatgcatatcgacaggataccggtttaccgggtatatcagagggctattgatttggagctttaccattcctttgccgaattggtagtacagacttctcaggacgatacggcgagaaggacttaccgacaaacaagggcgatgcagatatggcaggtggaaacggatgtgtccggctattttgaaccataccatttgcgttaccctggcgaggtgttggagcggtttgaggaaaaactgggcgatgatgtccaggtgttccgcgctctggccctggcgctgggaaatacctgtgcgatccagtctgacaatatgtttgtgggtaaccagcgtggagcattcctccagaaattgcgacggtctgccggagaagatgtgtacctgcagggcgctctgtatcttttggaaacagatgcggcacagcgccatgccctgttggagaaactggcagaaagagagtatatgagaacggaagaagccctgtttgtactgtcgctatttgatgatacggaacgcggctatgaggcgatgcatacccagctgagccgcctgtttacacaaaatcgaacactttctctggtatatgattttggtgtgctggaatggttcatccggttctatgcagagcaggcaaagaaataccgcgggaaagccgacctggtgctgcgcacgctgatgaaactgccgtatatgaatgtgaagcccgacagccgcgaattttcggttttgactaaagcagggtatcgctgcgatgaaatcattttggcaaactctctcgctgtatgggcggacaggctgccggatcggttgagttccaagagcatcactgccgagaaaatcgcagcggcgtgtgggcggatgcttctgaatgctccaaaggatctttcggaagaattttatgagtatcttggctggctgtttcggttctatgacagctttacggtcaagtacgaaggatttcagggactctgggaagcggttcaatatggtttgaaccccacagcgccgaaaacactgttatggatgaatcaaacgatacagaaagattttccgtaccgatttgatgtgtttgatcctcagtacgatgatctcgcgaaggaactggagcgggataactatatggagttgtttaccttgcaaatgctgcattccaggcaggcgatccctttgaaacagtggctttccagataccaagaactaaccggagccgattatggagaatatttcagaagttgccataagaacagtgggcgggcgtttgcctttctggtggaaaggaaagaaatcgatttatgggagttttttgagcagcacagggatggtggcgaatacgcgccacaactgaaactgctgcgggagtatgccctaagaatttcgagctggagatgtttccggtttgtagagaggttgctggctgagtatacttttccccatcttcaaacgatttttggtgagcggttttactttcacgaatgctttgtcagaagtgaggggtattacagcagaagagaatataaaacatacatcagccggccattcctaactgcagagcagcagcgacagctttatgactgggtggagctttcatttttccaaactgagccggaaaaatatgaggacttcgttttaagtgccttaaaagcaccggagatccaacgcctttatgataaaaaagcgctggcagcggtgttgcggcagttttttctccacagcgagtataacggctatgaaatcaaccggctgaaggaaacattctattccaaggaagagttggaggatgagcgcagagtcgaagctgagagaaaggagcaggaaaaacgactggagcaggaaaaacgaaccatacagaaacgggaaaagctgcagcagctttataacggcagcgccgaatctctggttaaattcattgggggatattatcatcaggacgagaagaacgaggtgctgaatatggcgtttgacaagctggtggaatggcctgtcggttgtgtacggacgatggaagccaaaggcgcacatgccttttttgaactgtgtggtgaactggtaaagtctgaaccccggccaaggcatgagattttgaatatggtactgacactgatcggaggtgaagcagcatgagaaatacattaaaacatctgaccctattgaccagaatgaaagatgacggattgctcccggcgcttacaggcagcttttcagaggatgccatagcgcaggcatgtggacaggtggagacacttcaattacaggaacggctgcacatccgaaagacaaagcggatacaggaagaactggttcgggtgccgaactttgcagcactctatggtgcgttgtgcaggcaggagattggtgatgaagaaattgcttcggtcttagagtcggcagacgggtatggagagagactgacagcgtatccccaagagcaggtgctggcagtcatggaattggaactgttgccttccctgcggtttgaatacctgaaatactattttccctctgtgatgtatgaagaagaggagcaggtcatattggataacctgcagacttttcccattgcggagtggaagggactttccatgctgacggagcaccagcgggatatgatgcggcagccgtttcttggttcgtatctgttttgctggcatcaaaatgagcggaaagctctggaactgttggaacagaatcgtccgctccagagagtctgcatcttgctttatcggcaaggtgtgcggctgtttctgtcagtagagcgcctgaaagatctccggtggatgaaaatgaccgatgtgggaaaattccgccggctgttggctgtatttgaatatgatgcagaggatttgtctgctttttttgacctctggctggacaaccatgccggacaatacgacctcaactggtttatctcccagccacatcctttaagcaaggaacgaaggaaagaaattttatgcaaccaactgagttatttgaatgctctgtatgccggcaggctccatttggattttaatgcaatccgacaattccagttttcaattctcatttatgcagtggagcatagaaaaaagcattttctggatttggtggatcagaacagtgaagtgttcctgtccttggggagatactcacttttgtttgagccaggcttttgtgagcattgcaacatcaattctctgacgctgaagaatttgaaagccagcgattctgtgaaccgcaatgacagcttttttacgcttctggaagaagggcagcagtacaccttcgaggaaatgtatcagctctggcatcagaaagaggtttacgttcggctatacaccatgctgacacctcttcctgtggatcagcgtttgctgacacttcggcagctgataaagcgggagctggtcagccagtatacaggagatacagagctggagcagcttggaaaatgtctgttggaaaggccatttagcgaatggtaccggagttcatttggacatatccgtggactgacccggaggactgccatggaactgttacaacactatacgaagctgcagacattcataccggctttcactgcggagccggatgcggtatttgccctcaacaatatgacggctcttttggaaaggacggattggaagcaggtacgcaaagatattctgacaacagatgcagactggctggaactaaaagacaagctggtcttctcggatgattttgtggagcagaacagggagactgtcacggagtttttactgcggggtgacgcggctatggtacgcgctctctatggggaactggacgggcaggagttggctgttgaagcgctgcgacggatcgtacaggctgaattgatgggccagttctataaactcaaatattttgccggtgacctgcagcgtgagatccgctaccctgtcagcgagatgcaggagagcctctggaagaaaaatctttctttggcccgaggtgcatttctggcagaagaggtggatgatttttaccacactctgcggcttggggagcttcctcatggtacctgcctgtcttaccgtactggaagccagagagagtgcctgttagccgcctttgactctaacaagaagattattcttgtgaaaaaggatgaaacagtggtggctcgcgcctgcctccgtctgacaaaaggtgcatttcaaaaaccacctgccatcgatttttcttttgctgatttgtcgcaggagaacacggctaccggaaagtctgccgcaggtgagaaggctgtgttattcctggagagtgtttatacttccagactcaatgatattgaaaaagaggaagtaatgaaactggcagtttccctgacaacacagaaagcggcagagttgggtgttgtggcggtacttgcaagaaagtatcttggttgctatgaacgggatgagtatgtgcttgcaccgttctatgtgtacatctcaaaatccaaaaacggatggcagtatctggactctctgggcggagcggcatatacctcagcaaaagaggagtatgtagagcatccattcctggtcacacagactgccatgcatcatacaggggcaaataacagaaacgaggtggattatgaataataggacaatggcaacggtttatgtggatcgggatagtatttccctcaagacccgctccagaaatggctgttcgccgcagcaatttattattttgaaaaaggaactgcagcggctggaggagaagaagtatttgatcgccaaagatattcattcctatgcagaactgcggctgtgtgatgccgtagacggtgtcaaagtgctggagttttccttcacatggctgaaggatgctggcagagacagcgtttccggctataccgaacggatcaggctgccctatgagccgtttcgcgcatatgcggcaggtgaggaagaaaccgttgatggaacacggtggcggctgctgtccattccggaacagaaccggccaaagctagagtttcacagccggaaaaatctcaaggccgtagtggaaaatcctatccttcggcacaaactggggaagtttctggaccagcactttaactggtacaactatgagcgcatcgtcctgacggatgattacctgccttacagcttcttttttgagggctacatggtacagggcgcaaagacttgcggtggagtaatcctgcatggcgaagagaacatccaaacggcgaaatacgggatacatacataaaaatctataggaagattttatacatagtcaacaccgccgcaatcgtatagtttgcggcggtgttcttgttgtccaacatgacattgaaattcatatttttattcttgtgctgaaaagtaggctatcctataattaaaaagaaaaatatcggattgggacatttctgcaacatttgatgtttagaatatcagtatgatcggaaaattgggaaaggaagtgaaggctttgaagaagattttaattgtagaggacgatcagcttttgaatcggaccctggcatataatctgacctctgacggatatgaggtcatttcggtttttaattttgacagcgcggtaagaaagctgcgggaaaatgaatttgatgtggcactgttggatattaacctgcccgatggcagcggactggatttgtgtgaagaaatccggaatcgcggtcagcatacctatatcatctttatcacagccaatgataaggagagcgatatgctcaagggctatgaagtcggcggcgcagattatgtgaccaagcccttttctgtgacggtgctttgcaaaaaagtagcggcggtttttgcaaatctggaactgcggacaccccggcatgatctgtttgatgatggctttctgaaaattgacttctccgaacaaagtgcgtcccttgccggagaatccctggactttacaccgaaggaataccgcaccctgttcctgttcgtaaagaacccccggattattctgaccaagcggcagattttagagaagctgtgggacattgatggggattttgtggatgagcatactctgacgacgatcatcagccgtatccgtaaaaaaatcgaaacagacgagcggaaatatattaagacagcttacggcatgggctatcagtggatcggcggtgagcctcgatgaagctgcaaaatttatctgtcagggcatttttgagaaaaattgtggcggggactctgctcactgccgctttgctgctgttgatttttttcctattgacgaaagatgtgcgtgttgtcatctgcggcattattttgacagctgcattttacatttggggcatggtttttctgcactattttcaaaagaaactttctctgttcaccgatggtttgtgccagacattggatcacatgatggacagtacagactggccccaggtagactatgaagcggaaacactgctgtctcggattagccatcgtctggaacggctctataatgtgatgcagaaaaccagacatacggcagagggagaaaaggaagaactgcaatccctggtatcagatatttcccaccagaccaaaacccccatcgcaaatttgaagctgatcaacgatacgatgctgacaaggccattgacagaagaaaagcgtaaggagtttttgcaggccacaggcacacagctggataaactggattttctcattcagggaatggtgaa

SEQ ID NO: 5631 - DNA, 372 bp, Unknown
  gut microbiota DNA sequence
ctcccgcctggaaacgggtgtcattacgctggagaaacaggatgctgtgatcggggatacgctggtgagcgccatcaatggtgttctggctccgatggaacaaaaagagatcagcctgtcggtggactgcccatctgatctgacaatatcccatgacagccgctggacttccgaagcattgtttaacattctggataatgcggtaaagtacacctctgccggtggcagcatccaggtgagggtacgggattgggaaatgtatttgaggatagatgtgacagatacaggcagaggcatcccggagcattctcagggcacgatcttcaaacgcttctatcgggatgaagcggtgcatgatatagatggggtcgg

SEQ ID NO: 5632 - DNA, 1053 bp, Unknown
  gut microbiota DNA sequence
agatcgccagcagtccaagggcagccgctacgattcctactgtcactccggctttgataaagttggaaatgcttttctgccttgcgttctcttccagcgagaagccggatactttcgtctcgaagtcactgaccagaaactttgctccgcaggcatcacagccatcgatatagctggataattttccttcatgaccacagttggggcagatcgccatatccccctgcacatccgctttcagaaaattggcttccacgatctccggtgtcttcagggttgcgatttttttccctttgcggtaataggtacgtctcatcttcacggctttggtccggtggcaggtgtaatcatagccgtcctttttggggccatcgtaatccgcaggctgcaccggttcctgcatctccatatccaccgtcagttcccgctgctgcagtctttttctgctcaggcgcagactttgccagaaaggctgggttgtctgctccatcaggttctgttccgcttccccgttgccctgatagaaggctttcagtgccccgtaaaagtctgctgtccgtccttcgatctctttccgtgcatcattcagaaactctgttgccatttcgtttttctctcctcataagtgattctgctgcgcaaaggtcatgatatcttttgtatcttatgtcccaactgctttgtcccatatagctatgtatccattatataagttggtacccggtatttcaagacactttcccgtatagaatgatttgtctcatcgaatatctagtgctggtgcagatacttctctctggtagccagtccgccccggatatgacgctcggatttattcacatccaataccttccgcgcctgcttcgccaacgccggattcacctggatcagccgctctgtcacgtccttatgtaccgtgcttttactgataccgaacgccttcgctgtctgccgcaccgtggcattgtgctcgatgatatagcctgctatccctatagctcgttcttcaatatagtctttcaaaggaaaacccctcaggatacttttttacag

SEQ ID NO: 5633 - DNA, 3280 bp, Unknown
  gut microbiota DNA sequence
tatatcatcgtgcgccatcaagaccgggaacacccacatgtgcatatcgtgttcaaccgcatagacaacaacggcaagaccatttcggacaggaacgatatgtaccgtaacgagcaggtatgcaagaagctgaaaaccaaacacgggctttattttgctggtggaaaagaacaggtaaagcagcaccgcttgaaagagccggacaagtcgaaatacgagatttacacggctgtaaagaacgaaatcgggaagttcaagaactggcggcagttacaggagcggttagcggaaaagggtattactgtccggttcaagtacaaggggcagacgggcgagatacagggcgtttccttttccaaaggcgaatacacgttcaagggttcggagatagaccgcaattttagtttctccaaactggataaatgtttcggggatgcaggactgaatacggtcggaaatcaacggcagacagcttttacacccgttcgggagccattgccgacacagggaaagactgacagtccgttgataactggctcactcggtctgttcaccgcttcatcaccccctgcggatgaagaaccaaacttgaatttaagaaagaagaagaaaaagaaaaaacaacttaatttgtaaacacatggagaaaaatttgattttagaggggcttctctcaatggttactgaattgaaagagaagcaggaagcacaggtaacgccagccagtcgggaggaaactcttgaaagactgaacgcaatcgaacaggcattgtcggaattgcacagtaacccggctgttcccgaaaaggatttgcaggctatccgaagccagcttgacgagataaggaataggatgcaaggtcagcagaaacatatcgaggacaccaagaaaatagtattggaaacctaccgttgtttcaaggtaatgcttgatgctttgggctcttgcaagacggataaagaggaagctatacccttaccgctctatcaacggatttgcaacaaggtcgcttcttggattcgtccgggattgttccttttttcggcagtgctggttatctgttccgtttccatattcttgaatatccgtttggctgaacgtatgcagcagttacaggacaacgatatgaaataccgctatttgctgatgcaaggacaggcagacggggaaacttttgatatactggaaaacaagttcaaatggcaacgggataacggctttatccgaagtctgaccgattcagtgatggattttgaataccgcatccaaaagcaggcggaagcactggaacgtgcaaggctgttgaacgagcaagccgaacagctaaagaaagaagctgataagctgggtaagccataaacggggaaagccgggatggatgaagcacattcaccgttccggcttttcagattcacttctttttcttcgtacagtgttctttctcgaactggcgtagcgtggtgacgctgaacctttccttgatgaactcccggacatcggaagccttgtaatacacttttccgctgatagtgaagtatggcaacgcaccgatagcccggtagcgttgcagggttttgatgcttactttgaacagcaggcacaagtcttgattatccaataggttatcatcttcgggcagtaccctgtctgcattgcgtagtacccgtacatctttgcagagttcttccagtttggcatacagcttctgcatccatccaccaaattcgtcattgtctatatacataattgcttcatttttcagattatacattttgtttgtcaatcgattgatgaagcaaagttctaaaaacggatacaaagaaattacaggagaactaatggagtcccctataaataaatcataagttgctgattatctatatcctttcttatcatgttcatttttgattaggtttgccagtccattaagaaattcggtgagtttgcccggcttccgttttatcacgtcctcatgtttttggtggcagtcgcttatcttaatgttaaacaaccattcaaaacctttggataagtccactaaataggcaggtttaccgttctgataaacgatgtctttggagaggaataagccgcttaccacttccatgatattgataagggttgttttgtcggcgaggtagagaggggaaaggggctgtttattgatgcgttgctgtagttgttccgggtatttgatgcgccattcaataaggcgtatttcagtgttcaaaagtcctatcgcttcatcaattaaatgcaaatagggcatttttttcttgctcaaaccgtacacgatacgatttaagacggtgtaaaccaaaggaaaaatagcgaagtaaaatactgtaatcctgttcgttgataccaaaatcggctacatgcgtagccaattcctcaatagcttctgtaaactccgatgcagaaactttacgttgtgaatattccgacaataagcggaaaaatcgctgttctaaaattagattcatgtatgtattcatataaaaaataagccttagcgagacttaggaaaaggcttatttcaattcataatattgtaatccgcaagttgttgttttgggggaatttagaaaaatagtttatagcaaagtaatcccaataaaaatagcactaaaaggcatattgtaagaaatatatatatcctaaacatatatatttggtctgattgctccttttctatggtttttttacggatttcttctatcttttcaatggaaacattggataaatcagcatttttacctttgcctacaagatatttgtgatgttctttcatcctgtctctattcaacttgcgaagctcacggttctctttgtcccgttgtagcatatcatttatgcaacctaatgttcccattttccagttaacatttaatttccaaaccttgatatatcaatttctttttgtagttccctaaagatacgttccaaatcatatccatgcggattggaaatttggaaacatccgctttctatggggctattaacctgaggagcagttatcaccgtgtcattgaaaacgaaagcgatgtactttcctacactctttgttgtggcttctctccatataggcaatttatcttggaggaagacaccggtaatgaccgagtgtccaaaagcatcagtttccaaacgtaaagaatcgaaatccataacagtaaggaaaggtgtttgtgaaaggctgtctgtagtctgtgatgttacgtagtaccagccgtttgtccggtgaaaggattttgtctgcatacaagctgtcattag

SEQ ID NO: 5634 - DNA, 290 bp, Unknown
  gut microbiota DNA sequence
atcctgccgtccttccggaagctgcgcttcgttgacatcaacaagccattctggaaaaagctgatgtacaaggcgtttgttcgtgcgaaaagtggctgcgacaaatggcacgattacgagatgtcggttgcgccttatgaaaccggaaagcctatttattatgaatttacatcgtgtccggcggcagaatttgccaagcggttcggctttgcggacattatgcccgccctgtgcaatgtggactatgcgtccatggagctgctccacgcaaggctggtgcggacgaccac

SEQ ID NO: 5635 - DNA, 2405 bp, Unknown
  gut microbiota DNA sequence
gtcaacggactttaatccgtgaacaagagcagcctttgttgctgtttcagcagccatctgtgcagcatatggagtagatttctttgaacctctaaaaccaagaccaccggcacttgcccagctaagagcattaccttcagcatcagttaacgttacgattgtgttgttaaaagaagactgaatatgtgcctgtccgcgttcaacgttttttcttacacgcttttttgttactttctttgcaacttttttagccattttaaactaacctactttctcatttcctggggatgcttacatttgcttccctctcacagttacattacgatcttaattacttcttcttgtttgccaccgtgcgcttaggtcccttacgagttcttgcgttggtcttagtcttctgaccacgaacaggaagtcctttacgatgacgaataccacgatagcagccgatttcctgaagtctcttgatattcagagcgatttctcttctcagatcaccttctaccataacgccaagcttttcgatagcttcactgatcttctttacctcatcatcggtaatatctctcactctggtatcaggatttacacctgcttctgctaacagcttgtcagcagtaggtctgcctattccatagatataggtcaaaccgatctcaattcgtttttctctaggtaagtctacacctgcgatacgagccatttacgtttcctccattttcctgcgtaatctcttacgctttgcgcaacatttctgcgctcacaactttcgttgtgtgtgcgtacgttttggtctgttaattgtacgcccaatagttactaattgattggggctctcacccaatcggacacgatccgatctttccacgacgaaggcgtctaattcttttcaccgtggtatcaacaagtaatctcccgtaagctctatccaaatctattatgaaaattgatgattatcaattcagccgcacataataactggacaagaactcacatacctgatcaaatgacgatcaagcggtgattatccctgtctctgtttgtgcttcggattctcacagattactctgatgcgtccttttctcttgatgattttgcacttttcgcaaatcggttttactgatgatctaactttcatgttaaaccctcctttcaaaaaagaccgtcttacattatagcatgacggtctttcctttgcaagcgtattattgcactttttttaatattttttgacttttttgttgtttttttgcctgctttacattcaaaacgataaaagtgatagccgcagccgctgcaacacttaaaattcggaaggtaaatctcgcatgcaatgctgaatgatgttgtactgcaatgatccagacgaagggaattgcagctatgagtactacgggaaccagctgtgcaaatatttccttccatttgcccgtgacgattatcaccacaagcattcctatcgctatcgctgccagcactcctgcagcaattccaatataggccggatattcctgaagattcagtccgatgacatagacccccccgttcatccggggtctgccgccaatagcttcggtacggccgataatggaccagatagcatccttgatcgtaccggtatgtaatgtcagatctgcaatgacccattttgctgcccacattccggcataaccgattgcccagcttacactgaagccggtcagtcttttgatattattccacaggcgatcactttctaataagaagtaacagcacagaggaattcccaaagtaacgatgggatacgtcagaaaatcaaaataagacgtcaaaattcccacgatcaggaagaattccggatattgtcctttttcgtgcagtctgtcatgatgtaacagcatgtattccaccgccagaagcgtcaaaatccagcacactgacatggtcagtgatacaagaaccagcaccggcttcataaacaggaaacttcccagagtcacgactgcgacacctgcattttgcttttggattgccgtaaccagcacccagatcataagcgcgatctgcaccgccagctccagccataccacgtgctgccaggaaaataacagtaacagcggctttaaatataaaagatagccgtgccagtatctcgcataaatgtggagatacatgttattgacgttctcatgggattcacagaaggatttgagagaatcctccggtgtccatacatcctcttccagatcatagtggtacatccacatagcgtgttcgtaggcatttttgtccggcaatctctctatggcattctgcaccataatagcatcggtgtaggtctctctgtttttccacaggtactgcgaaaatgcatcttccggtatctcgtctccagtcttcagcatatccccgacacttttctccac

SEQ ID NO: 5636 - DNA, 929 bp, Unknown
  gut microbiota DNA sequence
gtcatttttcatagtgataccgatcttcgccagctgcttactgttggcaatggtggtattccccagtgattccgtgcggttgttcactgtggtatcgctcacatcatccacagcagccatcacgctgttgtaattcttcacaaagctgttcaccgcattgtagatggcactggtatcatagcccttggtcgtggtctctataccattctcatccttggtggtgatatccttttgtgcgaacagatcatttttaccggtagccagtaatgtatctgcggattccttcaaagcatcagtggcggtttctaccttggccagtgctttcttcgcggtctccgtcgtggtgtctttcttcgttatgtcggaagctgcggttttggatgcgttgttctccttgccgtaataagccttcatcagcttggcatagctgccgttcttaatacttgcataatctgccagccagttgctgcttgccgcattggatgccgtagagctcaaaccggaaaacagaaatgaataattggtttttgcctgaatattaatactcatcacagtcacctccgtgtcaactgttttgaatcggcctttcagccattagtccttttatatcagttacagtatactacttatttcggatttttccaaggtttgttaactgttttttgaaaaaaaaacattaattgagtattttttccagcatggtcacccggttgaagggaaaggagaaataatagccgtccgcaaaatcctccgtcatgacgatcacttcctttgccagctgcacaccggcctgctctccctcttctctggtcatgtccgctcggtatcttgccagtacttcgtccgtcacgtcgatgcctgccatctcgttcttcataaaggtggcatttttaagactcacgaaaggcatgatcccgcagagaatcctt

SEQ ID NO: 5637 - DNA, 15978 bp, Unknown
  gut microbiota DNA sequence
gaatgtacacacaaatttggacttgacttctactagtgtagatatccccctttcacatgatacacttgtggttaaataataagaaagaatttctactagtgtagatcactgaacattcgcttttctgccatttggttaaataataagaaagaatttctactagtgtagataaagagaggtatttattatggctgaggttaaataataagaaaaaatttctactaaatgtagatcggtttttttaacatatatagattaaaataaccagaaacacaacattaactcgtcaaataagtcattgacagaacaaaaaagatgtactatcatccattttggatgcaggtacatctttttctgctatctgaatacaacacagagaggtagaaccatggatgcaacagaacgaaaaatgacgaaaatagcaagagaagtgagtaaattcacggtgcagaccatgaaggaagatgggattgggactgcggaatttgactttatccatctggtgcggcataatccggggatcacccaggcggcggtgcgggaacagctgaagatcgacaagggagctgcggcgagacgggctgccagcctggagaataagggatatctctatcggaagcccaatcccgaagacggaaggagtcagttgctctatgctacggagaaagcagagcagctgaaaaattccaaggctgccatcgagagtgccttctatgaatggctgctggcggaactcccggaggaagaaaaggaagcattctgcaagacgctggatacattgtactggcgttccaagcaggaacgtcgggcaggatttgtcaatgtggcaaaatgtgtggtagaaggagccggagaggatgaaacagatatctgaggcagcgaaaaaggatcagatcctgcattatttcaaaacccagtggcctgtgctgctggcggtaacaatctccggtctgatctataacctcggactgctggcaggaccgtggtttgagggccggatgacgggatgcctggtggacattctgggtgggaaagcaggataccgggatatgctggtgctggtgaccgcgtatgtgatgtctattgccatcgtgcagatctcccgttatattaaacgtttttatgtcagacgatttgctaataatgtgaatcgtgacatgaaagagaccctttaccacagcctggtgcacagaagccgtgccgaactggaagaagagggtgctggaaatgtcatgaccaaggcaatcctggatgtggatgactgcgcggaggggatgaggaaatttaccacagagatcttcgataccggtgtggcactggcggcatatgtgggaatgttgttattctatgactggcggctggcaatcttaggtatgttgtttttaccggcgtcatatgtgctggcggagaagatgaagcgtaacgtgcaacgcaccggagcagcttataaggagcagtccggagatttaagcgacgcaacactggacagagcaactaacgctgttacttaccgtgtctatggcagagagaaagagcgggagcaggcctatgaagagaatcttgccgcttatgaaaaatctgctgtgaaggccaatatctggagtaccgcatttccgccgctgtaccggatcatctccatgatcggcgtactgtttatcctgtatttcggcagcagaaatgtgctgggcaccggctggaaatcatgggatgtggcagcgtttaccacgtttttatcctgctttttgaagttagccgtgaaatcttctcatgcagcgaagctattcaatgcggtacataaagcccaggtctcctggaagcgtatcaaaccactgatgaaggaagacacttatgaggacgacagcttggtacagaagccgggaatgctggaagtatctcatgtaagctttgtttatcccggcagagagaagatctatgaggacttcaatctgtccgctttaccgggacagatcattggtgtcaccggagcagtggcgtgtggtaagtccacattgggtaagaccttcctctgtgaatacccttacgaaggaaggatctgtttccacggcaaagaattatccgggatgaccaaggcagagcaaaacggcatggtgggatatttaggacacgatccggagctgttcaatgatagtgtccgtaacaatatactgctgggcgatgatgacgatccggagaagtatctgaaggcagtctgtttcgacggtgaggtggcagagatggaagagggtatggacaccattgtgggaaatggtggcgtccgactctccggtggacaggcacaacggctggcattggcgagaaccctgtgccataagcgtccggtcctgatcctggacgatcctttttccgcactggatcgtgagacggaggaagaggtcttcgccaatctgcggaagtttacagcggacagtatcgtgatcctgctgtcccacagactctatctgttccccgaaatggatcaggtgctgtggatggaggctggaaaagtgaccgcgggaacccacgaacagatccttgaaaagttcccggaatatgcgagactgtatgaagcacaggcagatggcgctgatgcacacagtacgcaggagggaggtccggatcatgcagaaaaataagagacagaatgtgaaaaatgtccgcagcgtgattcggcagactgtgacaggttatgcagggctgtcactgggaatcctgttggcagtcgtaggtgccattgtaaccgcacttttgccaccctggattctcggaagtattgtggatacgatcactgtaggaaacgcagttccggttgcattggtgatactatattttgcttttacagtgctcaccggtctgaccgaaagccttcgggaaggtctgctgacggtcttcggtcagaagatcacacatgcactgcggagcagcatgatggagaaatatacgaacctgacggcaggggaactgacgaagcaggaacccggtactatcgtatcccggttcgtaggggatgcggatacggtggagaacctgttcacctccggaatcatcagtatgttcgccgatgcctgtaagattataagtatcctggtggtgatctggttaaaaaacagaggactggcgatcgtacttttggttctgcttccatttctgtattggttcacccggacggtgcagaaaaacatgctgaaagcccagatcgagaaccgttgcgccgtgggcagagcatccggacatgtgccggagacgctgcacaatatccgtaccattcatacgctgggaaaagagcgctatatggagcagcggtatgatgaatatattgcggagagctaccgcgcggtagatcgcacgaatttttatgatgccatttattccccggtgatcctgatcctgaatgctatcgtggtggcggttgtgatgctgttttctgcctccggtaatgcaaaggtgctgacattgttcggtatgtctgcaggtacagcggtagcggtaattaactatatctcacagatttttacccctgtggagagtctgggaatggagatccagaccatacagtccgccattgcgggtgtgcaccggatcaatgaattctatgcgttggaggaattgccggagagaaattccgggggaaaaccggcagaaccacagaatagatcggaaaaaccttttgtggaactgcaaaatgtgacctttagctatgaggatgatgaccgtaagattttgcaggctttaaattttcaagtatatcccggagaacaggtgacactgtccggaagaaccggagcagggaagagtacggtcttcaaactgttgttgggactctatcagccgggagagggtaaagtgctgattcagggaagagatgcttttcagattccggaacatgaaaagcgcagcctgtacggctatgtggagcaggcttttcatagagtacccggtaccgtgaaggatcagatcacgctgtttgacgattcttttaccatggaagaggtacggggggctgcaagaattgcgggactggatgcgacgatagaacaattggaaaaaggctatgacactccctgtacccaggagatcttctcccagggacagtggcagctgttatctattgccagagctgcggtggcgaagccgaagctccttctgttggatgagattacggcaaatctggatgcccagaccgaggaagaggtgctgcaggcactgaagcgtgcctcggaaggaagaacggtaatctcaatttcacatagagtaaatgcggagacaggacggatcattaacatatagtaagatgtaagatgcctgacggattgctccgtgctgcgcactctcacaatcctgcccggtattcgcatatcgtgaagctgacgcttcccttttatgcgaatatcggagcgggtcatgaaacaagaaccccacgtttgtgcgagcacagcgtggggttcttgtttatgaccctggcatcttacatagaaataagtccaaatgcatttgccacagagcttaataaaataatcgcagcaaataccgggcagagatacttgatcatgaaattgaatatctttttgcggcggaaagcggcttctccgtgcatgacttcttcttccacagcctttactccgatgacgcgggacaccagtagacagatggtgatggcagcaataggcatcatcacggagttggtcaggaaatcgaagaaatcaaggaactgcatgccgatgatcttcacagcaccaagcggtccgtaacccagtgaggataacgttcccagtgccagcatgatcacacccatgatcagggtagattttttacgaccccagccaagctcgtcctcgaaagtagacacagcactttcggtaagtgcaatggagctggtcatggctgcgaacagtaccagtacgaagaacataatacctacgaaggtgcccattcccatgctatcgaagacattgggaagtgtgatgaacatcagggaaggaccagcctgtaaggtatcgggatctccgccggaaaatgcgaacacggcgggaatgatcatgagacctgccatgatcgcgatggcagtatcaaagatctccacatttttcgtggaaccttcaatggagacatcttttttcatataagagccgaaggtgatgagaatacccatggcaatggacagagagtagaacatctgtcccatggcagctacgacggtcatccaggagaaattcgcaggattcgggatcaggaaatacttcacgccgctcagtgctcccggtctggtaacagaatagactgtgatgaccacggagagcactaccaggatcggcatcataatgcgggatacgcgctcgataccgttgcggacaccggcgtagatgattcccagagtacacagagtgaatacgataaagcacagctctgtagagacaccattggaaataaacgtggaaaaataaccgtctgctgccagatcatgtccgtgacccttggcatattccaccagatatttgatcacccatccgccgatgacggaataataaggaacgatcagaataggaataatagcgttgatccatccaccgaaggacaaccatttggatttcccgaaggtatgaaaggcacctacggggcttttgcctgtcatgcgtcccagtgatgtctctgccacgatcatggtataaccgaaagtcagcgccaggataatatagatcagcagaaagataccaccgccgtatttggctgccagatacgggaaacgccagatattgcccagacctaccgaggcaccggctgccgacaggacgaaaccgatcttgccggaaaatgagcttctgttattctttttgtgattcatagtttaaactctcccataaaaaattgtcgtaaacagaataagtgtaacatagaaataaggaaaatacagtacgaaacagtctgattgagaatggaaaaattcgatcatgcaagagtaaaaattgaatggatgcattttaattttaatataaaacaatcattctgagggaaaatacagaactgctataaatataagccagcaatggcgctgctgaatgacggtgtatctggcaatttaaagtatattttttcctgcatttcgcatactaactgcaacgttaatgattagtaatgcgagatgatgatttatcttacgcaatatatcatggaggaaaaaatgatgaaagcaaccggaattgtaagaagaatagatgacctgggacgcatcgtgatcccgaaggagatccgccgcacgttacacatcagagagagtgatccgctggagatattcaccgacagagaggggcaggtcatcctgaaaaaatattcccccatcggagagatgaccacatttgccaaacagtatgcggaaagcctggcacaggtgtcgggacatgccacactgatcgcggacagagaccagttcatcgccgtctcaggaggctgtaagcagctgttaaataaatccgtgagccgtcaactggaagagaaggtcaataacagagagactgtgattgccgcaaaaggagaccgcaactatgtcaacattgcggaggacattgccgtggactatgcctggcagctgatcacgccgatcatctgcgaaggggacatcatcggaagtgtgatcctgttggaaaatgacgggaagagcaaaatgggagaagtggagcagaaactggctctgtctgcggcgggcttcctgggcagacagatggaacaataatcttttccaaaaatgaagcaagtatgttgattttcagttaaattatccatataatagaatagaaaagtgcaaccagttgcaaaaatctattccagggagaaaatatatggatattcgcagagatttctatttggaaaagttaataaaaagaaagagcaatggattaatcaaggtgattaccggtattcgaagatgtggtaagtcttatctgctgaataacattttctatcatcatttgttagattccgatgtggaagcagaccatatcatacggtttgcctttgattctgcggatgatctttacctgatcggtgaaagtcttattcagatcgaaaaggaaaagcggggtgtggatccggagaaatttatggcatatattcggtcgaaaactacaggagagggaatatattatctgctgttggatgaaattcagatgctggattgttttgaggctgttttgaatggataccttcgcaaagagaatattgatgtgtttgtgacgggaagtaacgcaaaactgttgtcaaaggatattgctacggaatttgcaggcaggggtgatgaaattcatatgtaccctctcagctttgctgaatttatgtctgtttataacggagataaatataccgggttatctgaatatatgctttacggtggaattccattagtggttctgcgggatggtgccggggataaagcaacagcgctgcagaatttatttaacgaaatttatatccgtgatattacgaaacggaatcgtataaagaatattggggaactggaagacctgctaaatattctttcctctgcgatcggttcgttgaccaatccggaaaaactaaagaacacttttaaaaccgtgaagaaatctaaaattacttctgcaaccataaagaaatatttggattactttgaagattcttttttgatagagtcagcacagcgttatgatattaaaggaaagtcatatatagagactcctaagaaatattatttttctgatttggggcttcggaatgccagaattcatttccggcagttggagcagacacattccatggaaaatgtaatctataacgaactccggatgcggggatatagtgtggatgtaggtgttgtccctatcgcagaaaaagatttggaaggaaaggtaaaccgcaggcaactggaagtggattttgtctgcaatcttggttctgccagatattacattcaatcggcatattctcttccggatgaagcaaagcggacgcaggaaatccgaccgttccggaagattgatgactcttttaagaaacttgtcattacaaaagatattgtgcagccatattatgatgaatatggtattctgacaatcaatatttatgatttcctgttgaatccggaatgcctgcaaggttaaagataacaagatcagaaacaaataaaaaacggtcgtaaccgggttaagataccacctggttacgaccgtttgtcttaccgatatataatttctcatcagcttcttttaataatgcaggaatatctttgtcggggtcacagatcagaccgaaggtcatatttacttttacgtgctgcccttcgtagagtgtatccagttcgtggattttgtccatgagaagctccagctgcttccgggcttctgtaagatctacattttcaaataccagtagaaattcctcaccaccccaacgcgcggcaaagccacggcgccacatatgctgtttcagcagggcagaaacatttttcagtacggtatccccgcattcatgaccgtaggtatcgttaacctttttgaaaaagtcaatatctccgatggcgagcgcaaaagaatggcgggaggatctggcttcctcgaagatctgccgcagctttttgtctccgctgcggcggttgtacagctcggtcagggcatcctgctcgatcatgatacgaagagatcgctgcatggacagggcacagcggccgatatcacctaattcatcactgcgttttgttaccgaatgatccagtgtggcgttcagattcccggaggctacatccgacaggaagctgtggatatggagtaatacagccacgaatcttctggtgtaaaaataaatgcagacagtcacaagagccacaaaaccgatgatcagccacgtcagcggatagacgtaattctgaatggatagggagactgtttcactgggtctgcccacaaaaagcattccgacgacgctgccgtcctgattgcgcagaggtatatagtaggaaaaataagctttgccgttaatgagggtatgagtgtagaaatggttttcgccggtgttcaaaacatcccggatcacaatatcgggagcaccggaaccgacgatgcgttcaccctgggcattatacagggtcgtcagaatgcgggtatcctgatagaacagggtgatgtccagtccggtatcctctttgaactgatccagaagagaatagtccctggtgatatccgtctctcctttatacagaagataagcaacatctccctccaggtgataatcgccgggataggcagcgttcagaagtgtagtggcacttttcgtggcatcatacaattcacgttccacttcctgatacatagtttttgtgaaccattgggaagtgaaaaacaacatcgcaattcccagcgccagtaaaggaagcagtccgatgatctgcagagtatatgatattttaccgccgctttttttgggcgtattttgcgtattttccatagaattccctgccccttccggtaagatcggtacacatatcagtattaatataattatatgaaataaatgtcggaaaagcaagaaataaaagctttataagcaaatctcaacatccggcttgacaacgcaaaaaaatgagatatataatagcggtatatcaaaaatgcattgacgaagagagtaacttttccgcagaaaggcaaagcgagccggtgatggtgagagaccggtgcgagtaagggaatcgtgaaaatcacttctgagctgtcagaacaaaagcccaggtcagtagttctgaacggaatcccgccgttaccgggaagcatatcactcctatataataggaagtatgttgtaagaggtggttaacgaatgcatgagcttcgtcctgttacaggacggggcttttttgatactattcaggaaagcatcgaagatgcgattttgtgaatgaggagctgaatagtatgatgctgtaataagaaaagaaaggaagcacagtatgtacaagcaggtacccacaagcctgaattttgtagaccgcgagaaagcagtcgagaaattctgggaagacaacgacattttcaaaaaaagtatggagcatcgtaaggaaggcgaaacctataccttctacgacggaccgcctaccgctaacggtaagcctcacatcggtcatgtagagacccgtaccatcaaggatatgatccccagataccgtaccatgaagggatatatggttccccgtaaggccggctgggatactcacggacttcccgtagaactggaagtcgagaagatgctgggtctggacggcaaggagcagatcgaggaatacggtctggcacctttcattgacaaatgtaaagagagcgtctggaaatataagggaatgtgggaagatttctcccgtaccgttggtttctgggcggacatggataacccttatgttacctatgatgacaatttcatcgagtccgagtggtgggcactgaagaccatctgggacaagggtctgttgtacaagggcttcaagattgttccctactgccctcgctgcggaaccccgctgtccagtcacgaagtggcacagggctataaggcagtcaaagagcgctccgctatcgtacgtttcaaggtaaagggcgaggatgcatatttcctggcatggaccacaactccctggacccttccttccaacgtggcactgtgcgtgaatccggaggagacctacctgaaggtgaaggctgctgacggttatacctattatattgcaaaggcattggcagacaaggtactgggcagcctggcagaagaaggtaaagcagcttacgaagtactggagacttatgttggtaaggatctggagtacaaggagtatgagcctctgtacaagtgtgcgggagatgccgctgagaagcagaagaaaaaggcacatttcgtgacctgcgatgattatgtaaccatgaccgatggtaccggtatcgttcatatcgctcctgctttcggtgaagacgacagccgtatcggacgcaactatgagttgcctttcgtacagttcgtagacggcaagggtgacctgaccgcagagactccttatgccggtaaatttgtaaaggatgcagatcctctggtattaaaggatctggatgcagagggcaagctgttcgatgcaccgaagttcgagcatgattatcccttctgctggagatgtgatactccgctgatctattatgcaagagagtcctggttcatcaagatgaccgctgtgaaggatgatctggtacgtaataataagaccatcaactggatccccgcttccatcggtgagggacgtttcggcaactggctggagaatattcaggactggggtgtatcccgtaaccgttactggggtactccgttaaatatctgggagtgcgaatgcggacaccagcattccatcggcagccgtgaagagctgtacaagatgagcggcaatgagaaggcgaagactgtagaattccatcgtccttatattgacgagatcactatcacctgccccgagtgcggcaagcagatgaagcgtgttcccgaggtgatcgactgctggttcgactccggagcaatgccttttgcacagcatcattatccgtttgaaaataaggatctgttcgagcagcagttccctgccaactttatctccgaggcagtggatcagacccgtggatggttctattcactgttggcagagtccaccctgctcttcaacaaggctccttacaagaacgttatcgttatgggccatgtacaggacgagaacggtcagaagatgagtaagagtaagggcaatgcggtagatcccttcaacgcactggagacctacggtgcagatgccatccgttggtatttctacaccagttccgcaccctggctgccgaagagattctccggcaaggccgtacaggaaggacagcgtaagttcatgggtactctgtggaacacctacgcattcttcgtactgtatgcgaatattgacaattttgatgcttccaaatatacactggaatacgacaaactgcccgtaatggataagtggctgctgtccaagctgaactctaccgttgcagaagtagacagcaatctggaccagtaccgtatccccgaggctgccaaggctctgcaggacttcgtcgatgagatgagtaactggtatgtaagacgcagccgtgagcgtttctgggcaaagggtatggagcaggataagatcaatgcctacatgacgctgtacaccgcactggtgaccatctgtaaggcagccgcacccatgatccccttcatgacagaggatatttaccagaacctggtaagaagcaatgatgcatccgctcccgagagtatccatctgtgtgacttcccggtagtgaacaaggatcacatcgacaagaagctggaagaggatatggaggatgtactggatgctgtcgttatgggacgtgcgtgccgtaacgaggctgccatcaagaaccgtcagcccatcagcagaatgtatatcaaggcagatttcaccttaagtgagttctaccaggagatcattgaggatgagttaaacgtcaaggaagtggtattcaccgatgacgtacgtgactttacttcctataccttcaagcctcagctgcgtaccgtaggacctaaatatggcaaacagttaggcggcatccagaagcacctggctgcactggacggcaacgcagccatggatgaactgaatgcagacggcgcattaaagttcgatgtagacggtgtggctgtggaactgaccaaggacgatctgctgatcgacatggcacagaaggaaggctatgtatctcaggaggacaataagatgaccgttgtgctggataccaacctgacaccggaactggtagaggaaggcttcgtatacgagatcatcagcaagatccagaccatgcgtaaggagagcggcttcgaagtgactgatcacatccgcgtatccatcaacggcaacgacaggctgtccgagatcgcccggaagaacaaagacgccatcagcggaaaggttctggcagacgaactgacaagcggtgcggaatatgccgtatccaaggaatggaacatcaatggcgagaacgcagtgatcgctgtggagagagtataaaagttttgcaataaaatgccggaataaagagattctgtggttttcccaacggggaggaccgcggaatcttttctgtttcggaaaaacatttacgaaacttacgaaaaccggcgaaaacagttggaatgcgcatggaagtttgttataatattacctgtatttggttaagaatatggatgaaatcataacgctatccggtgcggaatatcttgagaagagtacagtaccggagaggcaatagagaggagaacacaggtgaaaaaatcagtagcagccagcgagaagccggtaaaggcaaaagagttcgacaaggagctcttcaagagaagtgtggaatataatgtgcgcaccctgtatcgtaagaatctggaagaagcagatgcacagcagatcttccaggcagtatcttatgcgatcaaggatcgtatcgtagagaactggatggagactcagaaggcatatgagaaggaagatcccaagatggtctactacatgtccatggagttcctgatgggaagagcactgggtaataacctcatcaacttaaaggcatataagcccgtagcagaagctttggaagaactgggactggatctgaacctgatcgaagaccaggagccggatgcagcactgggtaacggtggtctgggacgtctggcagcatgtttcctggattccctggcaacgctgggatatcccgcatacggctgcggtatccgttatcgttatggcatgttcaagcaggaaatccgcgacggttatcaggtagaggttcccgataactggctgatgaacggcaatccttttgaattgcgcagacccgaatacgccaagatcgtaaagttcggcggttatgtcagcgtacacaccgatgagaatggcagaaatgtatttacccaggaaggttatcagtctgttaaggcaattccgtttgatttccccatcgtgggttatggcaatggcattgtaaacaccctgcgtatctgggatgcggagcctgtagagtgcttccagctggattcctttgataagggcgattaccagaaggcggtagagcaggagaacctggcacgtaatatcgtagaggttctgtatcccaacgacaatcactatgcaggtaaggagctgcgtctgaagcagcagtatttcttcatctctgcatccgtacaggaagctgtagagaagtacatgagaaagcatgacgatatccataaattctatgagaaggttacgttccagctgaacgatacccatcctactgtagcaatcgcagagctgatgcgtgtgctgatggatgattattatctgacctgggaagaagcatgggagatcaccaccaagacctgcgcttacaccaaccataccattatggcggaagcattggagaaatggcccatcgaactgttctccagactgcttcccagaatctaccagatcgtagaggagatcaaccgcagattcgttctggatatccagcagaagtacagcaatgtacccggcgtggatgtacaggagaagatccgcaagatggccatcatctatgatggacaggtgaagatggcaaatatggctatcgtttccggttactcagtcaacggcgtggcaagactgcataccgagatcctggagaagcaggaactgaaggacttctacgagatgttcccggagcgcttcaacaataagaccaacggtatcacccagagacgtttcctgctgcatgcgaacccgctgttagctgactgggtaacggctcacgtaggtgacgactggatcaccgatctgccgcagatctcccgcctgaaggtatatgcggatgacaaaaaggcacagcaggaattcatgaacattaagtaccagaataaagtacgtctggcaaaatacattttagagcacaatggtatcgaagtagatcccagatccatcttcgatgtacaggtaaagcgtctgcatgagtacaagagacagctgctcaatattctgcatgtaatgcacctgtataacgaactgaaggagcatccggaactggatttctaccccagaacctttatcttcggcgccaaggctgcagccggttaccgtaatgcgaagctgaccatcaagctgatcaattccgtagcggatgtggtaaatagcgatcctgccattaacggcaagatcaaggttgtatttatcgagaactacaacgtatccaacgcagagatcatctttgcggcagcagatgtctccgagcagatctctacggcaagtaaggaagcatccggtaccggtaacatgaagttcatgctgaacggtgccctgactctgggaaccatggacggtgccaacgtggagatcgtagaagaagtgggcgaagagaatgcctttatcttcggtctgtccgcacaggaagttatcaattatgagaaccatggaggatatgaccccatggagatattcaacaatgatcaggatgtccgcaaggtactgatgcagctgatcaacggaacctttgcaccgggagatcccgagctgttccgtccgctgtacaactctctgctgaatacccagtgcaccgccaaggcagacacctacttcatcctcaaggacttcaagtcctacgcagaggcacagaagagagtagaagccgcttaccgcgacgaagacaactgggctaagagcgcgatcctgaacgtggcttgctctggcaagtttacctccgacagaaccatccagcagtatgtggatgagatctggcatctggataaagtggtactgaagtaaatggaaagttagttaaatacattggcaaaatcaacgaactcccggagcatgcgatacacatgtctcgatgtaaggtctccggatgtgaattttctacgaaa

SEQ ID NO: 5638 - DNA, 38672 bp, Unknown
  gut microbiota DNA sequence
tttaaaaaaacagtagccccggctgggtataagaataagcagtgccgtaagcagacgtcggtacttagcggtcgtattgtgaccgcttatgtaccgctacgctctgcgacagagcgcgagcgtgccgcgtttcttataccctgccaagggctacggggatatttcgctaaatttctatttaattcccgacccgatgcaatgtcacatcatccagagttccccagctgttcttattacattgatatctcacgccaatggtcagggtgccgtcggtgactttgataccggagacggtgggattctgccagtcggcataggtggtgagcataaaaggcactgtcagttccttgccgtctacgacagcatacagctccatggaagcatccgctgccaggtcaccgccctgtgagaaagcggacaattcataagtaccgggttccagatctgtgaagctctgctcaatggaaaagtccatatcggaggtaccggaccagaagtggaaagccacctcaccgctgtgggcatcggcagctttgacctgatagtcggtgggattcgtttcaccggagtatgttacagtccacatagaagtatcagcatcctcaaagccgggattctgtacataattgacccgttctaccgtgacaatggcagtaacttccgtaccttcatccagagatccggcaactgtgaactctccgccgttttccgtgtcgatggcggcaatatcttcagcatcccaggtgacaggaacctgttcttcggaacgatcgttatagatgatacttacggtatccggaagcttgacttccgcaccgatattgcaggacaccactatttcggggatggtgtctatcgccagaggagcagtggctccgtacttcagatatttaaatatatttagggaggccagaggatgtccggtgaagtcgaacatggcctgattgtcccaggagcttccgccgtaatactgtccggcatcctttggatcataaccgcctgcataactgctggcccaaccgctgccgtatttttcccagatggcagaattatcagcatcggcgggaccgaccgggatccaggtaccttcccagtagaagatgccttcggcaccggcctcgctggcagccgcacagacatcccgcacttcgttggcctgcccctgtacgctggctgaatatccttctgccagatcatcggttcccttgatactgttggcagagccatcgccgtcttccgaagtataacagtaagcgttttccgctacatatacctttttgccataagtatcacggacatggataatggcatttttcagatcgtccatcgtgccgtgccagtagggatagaaggaaagacctacaatatcataatcgatttcttttacctgcagaccggtcagcagtgtatccagctttttcatatcatcgatgttggtgtaatgtacagccaccagaatatcttttccggaagcagtggcagcatccctgacagccttactgccggaggccaacagttttcgaacgtttgatgcatctgtctctccacacatgccgttgttgatctcgttgcccacctgtaccataccgacgtccacaccggcatccagaatctgcgtcaggttttccagagtgaagttatagagagcgtcggatttttcttcgatatccataccttcccaggcctttggaacgaactgctttttgggatctgcccagaaatcggaataatggaaatcaatgcagaccttcatgccatactgcgtggcacgttgtcccagagtgatggcagtcgccacgtcattgttgccgccaccgtaaccgttgccgttctcatcatagggatcgttccagacccggagacggatatagttcacaccagcctgcgccagcgtcataaatacatcctgctcttctccgtcaaagttataatatttcacgccactgttttccagagccaatactgcggatacgtccataccacggtaaaaatcatcggaaatgccgtccaccggctccacataaacggtagagtcctccggcccttccggctgggaaaaagtgatgacatccgtggcatctgcagtagcggtaactgcggattctgccactgtatctgcgatttccagatcctgactgccgcatccgggcagccagcccatgaccagtcccgcactgagatacagagtcaacagccgtgtacgtaattgtttgctaaaatgttgcataagtaatcctcccacaaaacataattgaacaaccgattgcacatatatattatagcatattatcatacatcaaagataaaaatgtaacaaaaagtgcgcaataatttcgaggactattgcgcaaaacatttgttttaaataccagaagcagggaatcgtagatgtattattggaattgaacaaagcattgaccgggcagcggatggatgagtggatacaattgttcaatgtagaaacggtggatgatctgaagatgttggaaaccatgacaaagaaccccggaattcgtacaggaaatgttaaaaaatatgatttgtaaaagcttctgtgaagaagccggaccataaaaatacgccatggggaaggaattcttctcaatggcgtgttttattacaaggcattatacaaacaattcgatcacaaacaccagcacacagcagatcacggataccggaaacagtccggcaccgagccatgcggcgatgataccggcaatgagtgccaccagtccggaaatgggggtctgggtagcatggatgatggccgggaaggtcatgacggccagcgtcacgtaaggtacatagtacaaaaaggactgaataaactgattcttgatgggtttacggatcagtgtcaggggtaagacacggatcgtataggagacagccgccataacagcaatataaatataattattcatttacgtggtctcctttctgtacagattctccgttttccgcaggaacggcttcctctgcatcctgcttcaccgggaacaggattgctgcagcaccggagatgatcacggtcaacaggatggttctcgtaccttctgacagggaagaaatcccgggcagatagttgcaggcaaagctcagtgcgaagctgattgctaccagagctgccacgatcttactttttctggcaggcggaatgataatggccagaaacattccgtataacgcaacactcagggcgctgacagcacgaagaggcagcgcatttccggcgatgataccgcaggcggttcctccggcccaggcgggcgctgccaacaggatcgcaccgtaggtatagtacggattcaggatacccggccgggcaatggtaatgccgaacaactcatcggtgacatcgtaagcaatgatcagacggtggaaaaagggcgtgttgggagaaaatttctgggccagcgcacaactcatgagtagatatctggcattggcaatcagcgtgatgatcgccacttccagatatgtggcctgtgccgcaatcagggtaaaggctgcatattctccggcggaagcgttatttaacaggcttgccagaaaaccctgcatgggggtaaagcctgcatgtcttgcggcaattcccaaagaaaatgatactgcgaaatatcccagagcaatgggaaagccgtcgcggataccgtcgcagaagactttcctgctgaatttatcattcataattatgattccctcatctttctgtaaggcgtcttttgacgcacatcacctattataacgcacattttcaaaggagaaaaggatgaaaattaatgagataggtacagaacaggagtatatttctgcttttttcacataaatatgcaataaggaagttttaacggtggatgacggatgaaaatcaaatggagacagtggaaaatcataatgaccgcagtactgggggcattgctgcttacaggctgcggtctgctttcgaaagagaatgtgaaactcagagatctggattttacggtactcagtgaagaaaaaattcccgaggaattaaagactgtaatcgctgaaaaaggaacggagccatttcagctgacctacagtgataatcagaacctctatatcagtattggttacggtgagcagaagaccggtgggtacagcattgctgtggatgccctgtatctgacggacaatgccattcatgccagcaccagcctcttaggcccggacatcaccggacaaaaggaaggcgcagggaaaccctccacgccttacattgtgttaaaaacagaacttctggataaaaccgtgctttatgattaaacgaatggttcttacagatccatcaaaatctcccggcgccgccagctgataaaaccatacatatcattggtggcaaagatcagggaagtgacgcacaccagcgcagccagcaaagttaacgggtcaaaattttttcctcctgaaatatgatttagttgccagcaacagactcattttcaggatccaggattggcagattacgctgacagcgttcccgcagataactgcagaaagtagcggtagcccggctctgactgcggcttttgtcccacagcatttttacttcgcgggacggtagaggcacatttaaggtcagcggaacgagactgtcgttttcaaaaaagggagctgccagaggctccggcacgaagcccactcccagattgttctggagcagagggatgaccagatcggcggtagctacttccatggcgggttcgtagtccagatgctgttcaataaataccttccggtaatattcatagctggcggtgccgtatcccagaccaatgatggaatggagccggaattctttcagcgtcatgggacgatcagacaaggcggcatagtcggggccgccggcgggaacctcccggaaagtcagcagatcttcgcaggccagagcatcatgaagttcaaaaggggttgtcacaacagccagatccagccggccgttctgcagagatttcagaatctccggagtggtattgttctggatacgtattttgatctccggatagctagtctggaaatcatggagattctgtaacagaaataaatgcagggcggtctcggtgacacccagttcaatggtgccgctgcacacgtttttgtcccggcacagttcggcttccgcatccaacagatgttgacaggcgatggcaacatgggcatagagccgttttccctcttcggtcagcttcagtccccggggttcccggagaaataaacggcagtccagctgatcctccagaatatgaataatccgggtcacattaggctggctgctttttaagaccatggcagccttggtgatattttcgtattttgcgacataatagaaaatcttgtaatattcaaaactaatatccatataaaaatgatatacctcgcatataaactatatatttttagtatccgtgtggatatagtataatacgcggttgaaaaaaagtaaacagaggagaaaaggatatgcgacatttgattgattcactggacctgtcggtagcggagacgcaggaaatcttagacctggcagaccggattgctgccgattccgctgcatatgctcattgtgcagatggaaaaatactggcaaccttattttacgagcccagcacacgtaccagattatcttttgagacggctatgctgaaccttggcggcagaacattgggatttgccggtgcggaacagtgcagtgccacgaaaggtgagacggtggcagataccgcacgggtggtcagctgctatgcagatatcattgccatgcggcatccgaaagagggagcaccgctccgagcttccatgtattcccggattccggtgatcaatgccggggacggaggacataaccacccgacccagaccatgatcgatctgctgaccataagacagcgcaaagaacacttggatcatctgaagattggcttttgcggtgacttgaaattcggcagaaccgtacactctctggtgaacagtctggtacgctatccgggcaatgaattctatttcatttctccggaggaactgaaggttccggattatctggtggaagataccctgaaaccggccaaagcctcctaccatgaggtatccagcctggaggagacgctgccagagctggatgtgctttacatgaccagagttcagaaggaacgttttttcaatgaggaagattatatccggttaaaagatatctacattttggatcaggagaaactgaatctggcgaaagcggacatgccggttcttcatccgctcccaagagtggacgagatcgcaccggaagtggatgcagatccgagagcagcgtattttcagcaggtattgaatggtaaatttatccgtatggcattgatcttaagtctgttagaccttacggatcctgtgacgggaaagaaggtgtttttatgttaaacgtagaatccattcagaatggtgttgtgatcgatcatattcccgcgggaaagggaatggacatctatagattgctggaattggaatctaagacgcagtctgtagcattgctgcaatcggtgaaaagccagaaatacggctgcaaggatctgatcaagattgagggcgagacgttgccggagcggttggatattctgggatatctggacagtcagatcacactgatcgtgatccgggacggaaaagttgcaaaaaagtatcatccggttcctccacaaagactggttaatgtgataaaatgtaaaaatccccgttgtattaccagtatagagacgaattgtgaccacatatttgaactgtcaccttccggaagatatcgttgcctgtactgtaatcaggagatgcctgtaggaaggtaattgtatgtatcggagacagaatctgcaggttactgaaaggaatgagaattactatgcaacgtaaattacacggacaaatgtcagagtcgtttctgattgctggaattttgtcaatttccggcggattacaggatgcttatacttatatgtaccgtggcaaggtattcgccaatgcccagaccggtaatatcgtgttgctggcccagaatctggtagaccggaactggtccgtggcgcttcggtatttttccccgcttttgttcttcgccttgggagtagcggcagcggagtgcatccatatgcgatatcagaaggctcagaggatccactggcggcagctggtgcttgctatagagattctgttgctgtttgccgtgggatttttcccgaatgagatggatctgctggccaatgccatggtatctttcgcctgcgccatgcaggtacaggcttttcgcaaggtgaacggttatgcttttgccagtaccatgtgtatcggtaatctgcgcagcggcatggaatccctttgtgcctatgggaagacgaaggacaaaaaaatcttacggaaatccggcaattattttggaatcattttcctgtttgccgttggtgcggcgctgggcggacatatgatcggctacataggggcgaggaccatctggatctcctgcatcatattactgatcagcttcctgtgtatgttcattaaagaagaaaagaaggaacatcccgagatcgtacaggaggaacgggagattcgtgaaaatctgcaaaacatccgcaaagaagcaaaagatgtggaacatattctggaggatgatatccgttcccagattgagaagtaaaagtaaaaaaactgcaacgaaaaatattacagtgcttttacatcgtcccgtaaagcaccggtcatctcctggacaaaagtggtctgggaggagatctcttccgctacgacggcgaatccgcggctatgttctcaggcacgggtcgcctcgatggaagcattcagggacagaagattggtttttcacaccgcagtatggccttgctgacatggtaaaaaatcggccagaaccggtgaaatttgtcggtttccggtatcatggacgaaaggctgcgatgaaaaaagtttcacagcgatataccgaatttctgcaggtctactttattgccggtgacctcaatgccgtcggcccggaggcggttggcctgttcgttggaaccgccgaaggcaaaggcaccggagagttcccctttggaattgaccacgcggtagcaggggatatggtcgggatctgggttcttgtgcagggcattgcccacggcccgggccatcttcggttctccggccatggcggcaacctgaccgtaggtggcgacgcagcctttcggaatctttttgacggcttcatagatccgcttcgtaggactgtcggtgacgagatcatagctttctgcgatcatgcgccggatgtcctcatcggggatcgaaccatctaaaataatggtgttccagtgctctttgttcagatgatagcccgggatgacggagggaaaggtgcttcgccagaaatcccgccaggcaggatctgttttcacattcagatgcaggaagccatccttttcataagtccatagaaaagcttttttactgcccttcacacgtaccagctgccagttgggatcgtggaagggcatttccatataagtatttggaaaagacaatccgtagttcagcgcttcctctcttgttttcatgtcgtcagacctccttttttctattataacactcttttcttttctatgaaaacatgataaacttttccgagaaacaggtcacgaaggcgggtggtaaaagcccgggaatggagacaatatgatactgatacatgatggctacatgatcgatcccaagtcgggcagagagggcaattatgatatcctgatcgacggtgacaagattgtaaagattgcggaaaagatagaaccgaggggcaaagtgacccggattaatgcggaagggttattggtggctcccgggctggtggatgtgcatgtgcatttccgggatcccggctttacggcaaaggaagatatcaacaccggtgctgcggcagcagcaaaaggcggcgtgaccacagtggtactgatggcgaacacgaagcctgcggtggacagtgaggagacgctgcattatatcctggataagggagcgaagacaggcattcatgtgaccacctgcgccaatgtgaccatggggatgcagggaaaacagctgacggatatgaagaagctggcagtggcaggtgccgtgggattcacggatgacggagtgcccctgctggatgcggaactggtgcgccgtgccatggagatctccgcagagctggacatgcccatcagcttccatgaagaagatccgaaatatatcgagaacaacggtgtgaaccggggaaaggccagcgagtattacggtatcggcggttctgccagagaggcggagattgccctggtggagcgggacctgaagctggcagaggagacaggcgcctgcatcgatatccagcatatcagcagtaaggaagcggtggaactggtgcgtcaggcgaaaaagagatgctccaatatccatgcggaagccacccctcatcatttcactctgactgaggatgcagtaataaaatacggtacactggcgaagatgaatccgcccctgcgggaggaagcggaccgtcaggcggtgatccggggactggtggacggcaccatcgatatgatcgctacggatcatgcaccccatactgcggaggaaaaagcaaagccgatcacagaggcacccagcggtattaccgggttggagacgtctctggcgctgggcattacggaactggtggacagaggatatctgaccatgaagcagctgttgcgtctgatgagtaccaatccggcggctatgtaccatctggatgccggatatctggccgaggacggcccggcggatgtgattctgatcgataccgcagcggagttcactccggagaaatatgcgtccaaggccacgaatacaccgtttaccggatggaatctgaagggtgaagtgaggaagaccatctgcggaggcagaatcgtatacgaagcgtagagcccatggtagagagcacttataagagcgctatagcgttataaatagaagagaaaaggacaataacatgaaaaagaaaatcacagcaactgtgctttcccagaaggagatcgcacccagaatttttgacatgtggatcgctacagatctggctgaacaggcaaaagccggtcagttcatcggcgtataccccaaggaccggagcaccttgctgccccgtcctatcagcatctgtcaggtaagcgacaaaaaggatgccctgcgcattgtgtaccggattgccggacagggcaccgcggaattttcttcttatacagaaggagacagtgtggagattctgggaaccttaggcaacggcttccccacagaggcagcggaaggtaaaaaagtattccttatgggcggaggtatcggtatccctcccatgctggagctggcaagagagcttccggcttccgcagaaaagcagatcatcgtgggctaccgtgataaccagctgttcttaaaagaggatctggaagagcacggaaccgtatatattgccaccgaggatggcagtgttggcacgaagggcaatgtcatgaatgccatcgaagaaaatgcattgcaggcagatgtgatcttcgcgtgcggaccgatgcccatgctccgtgcgatcaaaaaatatgcggaagaaaaagaaatcaaggcctatatctctctggaagagcatatggcctgtggcgtgggtgcctgcctgggctgcgtggtaaagaccaaagaagtggatcatcattctcatgtgcataatgcgagaatctgcaccgatggccccgtatttgatgctgaggaggtagagatctgatgaatacacagacaacgattgcaggagtaactttcaaaaaccccgtaatgacagcatccggaacctttggctccggcatggaatatgaagaattcgtagatctgaaccgcctgggtgcggtggtgaccaagggtgtagccaatgtgccctggcccggtaaccctaccccccgtgtggcagaagtatatggcggcatgctcaatgccatcggtttgcagaaccccggcattgacgtattcatggagagagatattcctttcctgaaaaaatatgatacgaagatcattgtgaacgtctgcggtaagaccgtggaggattacgtggatgtggtagagcgactgggagacgaaccggcagtcagcatgctggagatcaatgtatcctgtcccaatgtcaaggaaggagccattgcgttcggacagaaagcagatgctctgtacaatattacttccgaactgaaaaatcatgcaaaacagcccattatcatgaagctgagccctaacgtaacggacattacggagatggcaaaggcagcggaggcagcaggcgcagatgccctgtccctgatcaataccatcaccggtatgaagatcgacattcaccgcagaaaattcgccattgccaacaagaccggcggcatgagcggccctgccatcaaacccatcgctgtccgtatggtctatcaggtggcacaggcggtacagatccccattatcggtatgggaggtattgccacggcggaggatgccatcgaatttatcctggcaggtgccagcgctgtcagcgtcggagccatgaattttgtggatccctatactaccgtgaaagtagtggagggcatcgaggattacatgcgtacctaccatgtggagaatctgaccgatctgatcggtgcagtgcagtaagatacagagaacagaatacggtataagtacacagagaccttcatatatatagatatatctgtatatatggaggtcttttattgtggagctgatcaagagaaatatacatatggaccgggtaaaacgatccactgtcatacagtttaccgtggaggaggatctgaatcttccagaggataaaccggacatcagtaccctgaacctggaaaagggagaagttgtcatcgaggagatccggcccggtacggatgaggtgacggtacggggaaaactgggctatgccattctgtatcatacgcaggagacagggagcaatctggtgcttttaagcggtgcactgccctttgaagaaaaaattcatatggagggaacgttgccgtcagatactgtagcggtgaatggaaccgtagaagatttcacggtaaatatgatcaattcccggaagctgaatctgcaggcattgctgcttctcacggcccggatcgaagagatttacgatgaagaactgcccgtgggaatccagggaggcagcgccggagaaggtgtggaataccggatctcgcccatggaggtgacggagctttccatctgcaagaacgatatttttcgcaaaaaagaggagattccgctgccctccagctatccgaatatttaccagatcctctggagtaatgtgtcactgcgggatgtggaattcaagccacaggaagagaaactggcagtgcagggagatattcaggtcttcgttctctatgaggcagagggagaggagcggtctattcgttcctatgagacgacaattccgctgaatggcactctggaatgtcagggatgtcgggaggaactgctgccggatatccggtattcactggtaagacaggaacacggacagccagagctgacgatccagccggatctggacggggaagagagaatccttgggttggaatgtgctctggaactgaatatccgtctctatgaggaagagcagatcgatattttaagagatatttacggcgtgacaaaagaagtgatcccggacaccagagatgccagcctgcgtcagttgttggccagaatcacaggcaagacaaaagtgacggatcacagaaagaccgatatcggctcaccggtactgcaggtgttgcacagtgagggaatcgtgacgatcgatcatcaggagaccacagaggaaggaatccgcctgcagggcagcattgatcttacagtgttgtgcattacggaaaatgatgagactccttatgtgagtaccagagagcagattccgtatgaatataccctgaatgtgcagggagtgacgggaacggatcaggcagaggtacacagtgaactggagcagctgcaggtgaatctgctggagggagaggaactggatgtaaaggctgttctttccttttccacgaccgtgatgaagaatattccgctggaagccatcgaaggggtggaagagcaggaaatcgacagtaatgtgctggccggactgcccagtgcggtgatctatattgcggcaccgggggatgacctgtggagcatcggcaggaaatatcatatgccggtgaagactgtaagagaattaaacgcgctggaaagcgatgaattacgcccggggcagaaggtgctgctggtaaaaggtctggcctgatacagttcggaaaagaaaaaccatgttgtacatggatgcgttctgtggcatcggtacaacatggtttttctataggaaagtctgtcgagaatacgacattattcttctgtggtcagtccggcatctgctgccagcttgtcgaatttctccataacagcatcataagtcttctgggagatctcgggaagagaaccgccccaggtcttctcagcctgtgcgtagcccttcttgaatgcctcgcgcatggactcgatcttgtccgggtcaccgccggtcagagcattggcaaactgaatgatacggtcggaagtctggttcacaccccagtaaccgtcctcggcgatatctgcctgcgcctgtgccttggtagcaggatctacggtgaaattaccggaacgtaaaaaggaccagatgtcattggcattgccgtaggtgttagcctgcttgcccatcatctgttctaccagagaacgaagctgactggcacggttttccgcatctgcctttaatttgttgaccagattggtatccggtgtataggttttcttcgtcgaagaagtcttggcagcggtgctgtgctcatagatgacaccggtatcttccgcggtagttgtagtttttgcttcctctgcggaagttttctcttttgctgcacttgtactgttatagctgtaggctgcagcggcctgggttgatgtaactccgtttacgctcatagtttcctcttttccggtacggttctgctgtccgtacctgttgtcatccttgactatacatgttttaaccttctgagggtttttggtttcacctgttatatcgtccccggacagtggatactttagaggatttagagaaaaacagtggaaaaatctatggaaagaaccgcactccattgacaaaatacgcaggattgtataaaattaagtacaattattgtatacacgctattcagaggcatgtagttttggaatagcgccctaacgtattggagacaaaaatgaacgaatatcggataaaagcgtatgccaagatcaatctggggctggatgtggtcagaagactggagaatggttaccatgaagtgaagatggtcatgcagactgtaggaatctatgatgtgctggactttgagagaacagacggtgggatcgtgataaccacagattccggtgaactgcctacggatgagaataatctgatctacaaagcggcaaaactgatgatggagacttatcctatcagtggaggcgtgaagatccatctggagaagcatattcccatagcagcgggcatggccggcggcagtacggatgcagcagctaccttaaaaggaatgaaccgtctgtttgatcttgggtgcacactgaaggatctgatggaactgggggtgaagatcggtgcggatgttccctattgcgtcatgggcggaacggcgctggctgagggaatcggcgagaaactgacaccgcttgctccggcaccggactgctatgtactggtggcaaagcccgatatcaatgtttccaccaaatacgtgtacgaacatctggatgctcaggagatcgtgaaacatcctgatattgacggtatggtggaagccatcgctgaggaaagcttacagggaatcctggaccggatggaaaatgtgctggagacggtaaccgtcagtgcatatcctataatccagacgatcaaggaccgtatgaaggaactgggagccatcaacagtctgatgagcggaagcggtcccacggtattcggtatttttgtagagaaggacatggcccgcagggcatatgataaattagaggaggaacagctggcaaagcagattttcctgacggaattttgtgagtaatgccagagtagaggtatgcaggataatttacaggtgacaatggatgaatttctgccactcagagatgtggtgttcaatactttgcgtcaggccattctgacgggggaactgaagccgggagaacgactgatggaaatccatcttgccaacaagctgggagtcagtcgtacgccgatccgggaagccatccgtaagctggaactggagggactggtgaccatgatccccagaagaggagcagaagtggctcagatcacggagaagagcatgaacgatgtcctggaggtccgcagggccatggatgcgctctgcgtggagctggcgtgtgaccggatcactccggaggaattacaggatctgaaaaaggcctgcgatacctttgaagcggcggtgaagaccgatgacattaaacagatcgcacaggcggatgtggcattgcatgacatcattgtacaggccacggggaaccagcgcctgatccagctggtcaacaacctgtccgagcagatgtaccgttatcgttttgagtatatcaaggatttcagccagcatgagcgcctggtggaggaacacaaggtcatctatgagagcatcgtgaaaaaggataaggaaacggcatccaatatggccaaggtgcatatagataatcagaaaaaggcgatcatccgccagatccgtctggaacgggagaaaaataaatagatttcaaaagtataatctgtccggaaagcggtaatgatttccatagaaccgaaacggtaatttatggaaagaggaatgctgatggatagattatatgtttgttatgaaaaatatcgcaggatgattgcagaaaagaaaatattacaccggctggtgcagggagtccggatactgactgtggcactggcatgttacggctggtggggcgtgatctacccggagcttacgatgctgccgtccacctatgagatcgtatacgaggagacggaagccacggaggcagagactgtacagaccggtccggaagtggtagaatggaattccgacagccagatctattggaagattctggaggcggatccggagcagatccggttcaagagcagactgcttacgatgttaaaaaaataaaaggagaaatcccatgtatcaggagaatgttactgcgctgaaaaaggatgcccccatcggggtattcgattccggtatcggcggactgaccgttgcccgggagatcatgcggcagattcccaatgagaagatcatatatttcggagatacggcaagaatgccctacggcagtaagtccaaggagacggtgactcgcttttcaaagcagatcgtgcggtttctggagacttttcaggtgaagactattgtggtggcctgtaatacggcgagtgcctatgcactggatgaactggaaaaagagatcgatgttccgatcatcggtgtaatcaagccgggagccagaaccgcggcggaggtgacacgcaacggccgcatcggcgtgattgccaccgaagctaccatcggcagccagatgtacaacaaatacatacaggaactgaataaagatgttacgatctacggcaaggcctgcccactgttcgtacctttagtggaagaaggcctgtgggaagatcccgtgactgatgaaatcgcaaagcgttatctgtcagagttgattgatattgacatcgataccctgattctggggtgtacccattatccgctgatccgttccacagtgggacgtgtcatgggagatcaggtgacgctggtgaatccggcatacgagacagccagagaactgaagggactgttacagcattatcatattctcaatgatgaggagccgcatctgggagagaacaagtaccagttctatgtcagcgatggggcggagaagttcaagcactttgccaattccattattaaatacggaatcctgtcggccaagaccattaagatcgatgagtattagaggatgaagagaaaatgaatcgagaggtagaacttgtactgtccggtctgcatgcttccggacaggagcaggaaagcgaagcggtggagaccgtgcagccggcacaatattttaagagaaacgacagtcattatctgctctatgaagagaaaatggatgaagaccaagctccctgcaggagccggatcaaattccgggatcatctgttggaattgaccagacaggggacagctgagatgcatatgatcttcgaggaaaataagagacatatgatcccgtataacacaccctacgggcaattgatgctggggatcgaaaccggcagggtactggtagaggaacaggaggatcagattcacgtgacggtggaatacacgctggatcatgagggagaacccctgagcgaaagctgcctgaagatccatattcgggaaagatagaagaaagataaacataaaaaatagcagatgttcttatgaatgcaagcattcaacgaacatctgctatttttatgtgcgtcagacgacacacaatggggtctgaatcgttatttactttacaggctttgctcctgccttttcctgtgccgtagctacaagacgcttgaagaagccttttttcttctcgggagcagcttcggtcttgccgtgcagtcccttgacatccagtacatagataccgctgacaacggcttttacttcctttttcacaggaacactgtcgaagatcttctcgtcacagatcagggatacgatctgaggaccaacctttgccttgatgatggggagtttggaaccgcgcatcatcttcggggtctggtcaatgaccatctgtggaagaccggcatcttttagcttcatgcgtttcttatcgatgatcagcatggatacggtctgtttgttggcatccagcagttcctgctgttctgcctgtttcttctgtgctttcttacctaagaaatataatactgcaatgataatcgcaagtactattacaataactaataatgtgattgccaccggactcattttacagtccctccttcagttaatcggaacaaattcctaaaaaacattgtaacatagatgtgatgaaatacgcaaccatacatttatgatttctatcttgtttccggttcttgtaaggaagactgtcaccatgtggcagtctttttgtaatataaaaaattatgaaacacgtatgtcaaccggttgacatacgtgcggtaaaattatataatgtgaaaaaagaaggaggtgcggaaaatgaaagtactggtagtatcagatgtacatgcgaacatagccgcattgaacaccattttggaaaaagaggctgattacgatattctgtgctgcgccggggattatacagactatggaatctatccggcggaagtgatagaacggttccgcaatctgaaaaacacgcatcttgtgtatggcaaccatgatcttcacgttataaatacttatgaaagtaaggaatggaaaaatgtagaagatggaaaatacaagtgggttcactataattgtgaacagctaaacaaccagggtattaggtggctgaagcagttaccggaaaccgcatattttgaggcagacggatggaaatacggaattgcccatcagtatgatagtggttatgggacgatagaaagcaggtacgcgtttgataaatattgggcggagcattacggaacagataatacagggaacagaagactgattttcgggcatacacacagacaatgtattcatattttaggtgatggaatggaatggctgaacccgggaagtgcctcgtatcgaagacccgatgacccggataagacggcacattatgcgacgattacagacggcgagatccgattgaaacaaattccctacgacagaaaaccacagtttgaaaaggcaaaggaatttataagtaccgataaaatgatgagaacagaaattcaggattttatgttcttttttggggatgcaaagacctcaagagaaccgttgggataaggagtgaaataacaataacagagataaaaagggatggaaagagatgaattgtaggagatatcgcttggatcaggtggcaaatttcagagatttgggaggctatgcgtgtgacggaggcgtaactagatatggtgtgattttccggagcacagctttgaataaggcgacggaagaggatattgaaaagatagagcacctgggagtcaatacggtcattgacttaagatttcccagtgagacaaaagatcttccggacagattgggaaagggtatggattatatcaactgttcgcttatgggtaccacaaagctggaacagttggatattgtaaacagtagtgtggtggagaccaaaacgctgcatcgcatgtatcgcctgatgctccgcaacggaggaaaagagatcaggaaagctctggaggtagtcgctgattccgagggagcggtattgttccattgcgcagccggcaaagaccgtaccggtattctggcaatgttgattttatcatccgtgggagtggatcgggaagatattctggtggattaccaatgtagcagtacctatattacaaaatttacgaccgatatttccggttccaatatctacaacatgaaatggattctgaactggattgaccaggaatggggtggagttccggaatatctgcgtcaaattggagtacaaagtgaaactatacaaaaaatcaaatccaagtttgttgaaaatttatatatgtaaccggttgacacacgataaaaattagtatatattcttaattacaaaatatgtaaccggttgacatacaattacatatctacaaaatgtatagattcagagaggagaacaatacatgaaaaagaaaattttagcaggattgttgagtgcaatgatggtcgtatcattagcagcttgtggaagctcagagacaggtgccacaactacagactccaagaatgaaacaacggcaaatactgcggatggaacagcagccgctgcaacagatgcacagggcggttatgaagggaaagaagtgaaagtctggatcagctccggcgcagaagatgatatataccgtgaaatgtttgacaagatcgaaggagatctgaatattaccattacagatgagtattattccaaggacgagctggataacaagatgcagacatcttctatcgccggagatatgccggatgccgtagttgccgactatctgctgatccccaaatattatgaagcgggtttggtagcaaatctggacgattatgtaaccgatgaactgatggatgattatcttcccagcgtagtatctgagtgcacttataatgatcacatcatttccgttgcacagttcgatagtggcctggctttctgggctaacaaatccatgctggagaatgccggtgtcagaattcctgccgattacaaggatgcatgggataaagcagagtttgaagatgcgctgaagaaattaaaagacagcggtgtagaatggcccatctatgtaagacagaacaaaccttccaccgagtattacacctggatgccgtttgtagcaagctttggcggagactacatgaatcgtgagaccggactttgcacaggaactctggacggcgataatacaattgcttctttcgatttcctggcaaagctgttcacagatggatatgcagatgcaacctgtgattatgaagattctttccagaagggtgagaatgccctggctctgtatggacattccaagtatcaggattataaggctgcacttggcgatgatctgatcctggttcccctgcctgatatgggacacggggtttacacctgctccggttctactgttatgatcatgaccacaggagcacaggaatccggaaatgatgatgctgtatgggcaatgctgcaggaagcaaccaaccccgattacatcaagatggtagtagatgtcaacggtgcggttcccgcaagatccagtgttatggatgcaatccccgactattgtgagggaggtaccctgtatctgtacagacagcagctggagagcggtatttccttcctgcgtccgtacactcctgcacatatgaccatttatgatgcaatggccagcgttatcggtaatatctatgccggcgcagatcctgcaacagagttgcacgatgccgctgcaaatatcgatgaaattattacagagaacggatggaactttcaataatctgaaataagaaggatcggataaggctgtctgtgagggcagccttattcataagaaaaaggagtacctatggcaaacagttctaagaaaaaaagcggattgcaacgtggcgagtcaaaagccgcattcctgttctgcacaccggcagtggtgctggcactggtatttatcattttaccgtttgcaatgtctgttgtgtattcatttaccaataaacaactgattcccaaagtgggaatggaaacagcctttgtagggttgaagaattatattgagattttcacaagcaaagtgacagtactttcttttaaaaatacatttttgtatgcactgatcgtagtgccttcggtattggtgatcggaaccgtgcttgcggtttttgtaaaccagaagatcaaaggcgtacaggtgttccgactgatctatttcagtccgcaggttgtaacgatgactgtagtggcagttatctgggcattcattttttcctccaaatccagcggattattaaattcgtttctgggtctgctgcacattgcacctcagaaatggcttcaggatcagcatctggcacttccgtgtctggcaattatgtatatctggcagaatcttggtatgcagatgttgatcattttaagtggtctgcagtacatttccgaagaactatatgaggctgccgaaattgatggatgtaccacctttgagaaatttatttatattacggtacccggattgaagaatacactggtatacgttttggtatctgtgattatcaattccctgaaagtattcacccaggtgtatgtactgacaaacggcggaccgtccaatgcaacaacgaccgtagtattccagttgtacaaagccggattcgtaaatggacaggtaggatactcttccgcaatcgcagttacattctttatgctggtaatggttatttcaattctgcagaataagtttgcaaaggaggactagggaatgagaactgcaatgtcaaaaaggaaaaaaatcattatgaaattgtgcatgtatcttggatatttgctcatagcagctattttcatcggaccgatcgtatttttgttcgtatcttccctgaaaccatatgcgcagattgaatcggatatgtcaaatatcagagcattcattccttacggagacctgtcactggataactatatcaatgttattgtgaaagcggatttcttcaagttcttcaagaattccgttgtagtaacgatcatctttgtcttgctggcaaccacaatcaatgcaatgatcggatatgcactgggaatgcttaatttccgtggaaaggcaatcattatatccaccattgtggcattgagcattattcctacagagtccattatcattaaccgttttatgacagtgaattcactgggaatgttaaatacatatataggactggccattccaagtgtcgcatatcccatgtacatgtatctatactataatcattttaagggaatgccgaaggaattgcaggaggctgcaattattgatggagcctcctactggaaaatatttaccaaaatcatgatgcctttgtctaagccgatcattaccactgttgcgatcatggcattcatccgttcctggagcgatctgctgtggcccaccctggttaccagagacggtacttaccgaacactgccgctggctttaaagtcactgttttccgatacctacactgattggggacaggtctttgcgttctctacattaatggttattcctacgatgatattattcctggtattccagaagcagtttgtggcatctgtgacatccagcggaattaaggggtgataaagtggaaatcagatatctcggaacaggcggagcagaaggattccccagtattttctgccagtgtgaagcatgtcgtaaggtaagaacgttgttgggaaaaaatgtaaagacacgtagctgtactctgatagatcaggtgatgatcgacctgtcgccggatattttttcccaatgtattaacagccatgtggatttatcggaggtaaatcacctagtatttacccattctcattccgatcacctgaataccacggaaatatgcttccgactgcgggaaatggcatccgtgattcaaaaaaaagataaaaaagtaatggaaatttatggcaatgatgcggttcgggatggtattatggagataatagctaaggatccacatgtagatctgacaaggatgagatttcaccggattcaaaagtttgaaccattccgtataggtcatttaaagtttacacctttaaaggcatatcacaagctggatgaggaagctctgatctttgtgatcgaggatggaagatcgaccttattgtatgcaaatgatacgggggctttgccggaggaaacactggattttatagaacaacagaacataaaatttgacgtcgtcagtatggataccagcagaggtatactggatggtgacacgcatatgggaattcgggaaaatgtagagctgcgggagaaactccgcagaatgcatgcagtgacaccggatacggaatattatctgaatcattattctcatatgtgcggtatgattccgcaggaatatgaaagactggtaggtcaggaggggttcctgttgacttacgacggactttccgttactgtctgatgcaaaaaagtaagataaggggaagggaatatgccaacaatcaaagatgtagctgcagaagcaggagtgacttccacaacagtatccagagtattgaataatcgtggatacatcagtgaagagacgagagaaaaagtatattctgccatggaaaagctgaactatatgccaaacgaaatggcgagaaatttatcccggcagaagagtgattatatcggggtgattctcccatctgtagagcatccttactttagcaaggtccttcactggctggagcattatgtgacaaaacacaactacaagataatggtctgtatttccgagaacagcagggaaaaagaattacagtatattgatctgctctattcacacagagttcttggaattgttgtgtgcagccatatcggagagacgatggaacatctggattccaattgtccgctgatttcttttgagagagaaattgcggaaaacattccggcagttctttgcgataactatcagggtggtattttggcggctaaccggttatttgatgccggatgcagaaatatcgcaatttttaacccgcctaccaaggaaaatatccctgcatatagcagagaaaaggcatttatgaagtgctgcgaggataaaaaaatcagtggacgtgtggtttatacagacaggttggctcccttatcagaagaattcggcaacaatattttggaattattgaaaaaaaattcggatctggatggaatttttgcaacaagtgatgtaatggctgcaaatattatccgtgcatgcaaaaaaatgggaaaacgtgttccggaggatatctctattgtgggattcgatgatacctggatttccacactgacgtatccttccattacgaccattcatcagccggtgcaggaaatgtgtgaatatgccatagaagcgattgtgaaaaaagtaaagagtgaaaaggttccatcccaggttgtatttccggtagaactgatcgaccgggagtccacaaagtaaaataatgacgataaaggaacagatatgatagaaaaaggaaccataatggaaagtgaagcagaaccgtcatcaaaggagctactgaaaatatatgatactacgttggcagaaaaactgatgcaaaagctgctccccatgattgaaaactgtgcgaagcagacacgttccgaaaaagtagtcgttgcagtaagcggaggctccggatccggaaaaacagtgacggccttgttactttcctgcttcctgaaggaaaaagggatagaaaattacattttgtccggagatgcttatccgcatagaattcccaagtacaatgatgcggagcggctacagattttcagagaaaatgcaattgtgggaatgctgaaagagcagacttatacagaagaacgatgtacaatcattcaggaatttcaaaaagccggaaatgatgcggatgaaaaacatgtcgaaaaatatccatggtatgagtcctatcttagaaacggcagaaaagctctggaaaattatcttggcacggaaaaggaaattaattttgaagaagtaaacagactggttcatgcgtttaaagccggcggagagaagctatgggtcagacatatgggacgcgaagagacagaactgtggtatgaagagaaggatttcaccggaataaaagtgctgttggtggagtggacacacagcaacagtcaatactacagcggtgtggatatttccatctaccttgacagtaccccccaggagacattgcagagccgtctggaaagaaaccgtgatcaatggatagacaccccatttacgatgatggtactggatattgagcagaaaatgctgaaaaagcaggctgagaaagcaaaacttattgttacccgggacggaacggtgttagaccggaaggaatatgcgcaatttgttccgaagcttcagaaataaaaaggaaagatgttatgaacataggaccgatgttgaatctctacccggatagtctgggcggaaccctggatgatgttgtagattttttgaaaacggaagaggcagagggagcattttcttcctgctatattctgcccagtctgtaccatacggatctggacagaggcttttctgtgattgattattctctgaacaagatgtatgcttccggcgaaacattggaagcaataaaaaagctcgggattgaattgaagctggattttattctgaatcatgcttcggtgttgtcaaagcaattccaggatatcattgcaaaaggggaagaatcggagtacaaggacttcttcattaattggaatgaattctggaaggactgcggagaaatgacggagcagggatatatccttccggaagaaaagtatctgaaaaagatgtttttccggaagcctgggctccccattcttatggtacgttttccggatgggagagagatcccttactggaatactttttatcaggaagtgaactaccctgaggttaatgctcctgaactgatgaaagctgccgatctgcaatatatgcaggcggaaattattgcacaggaactatccatgggctgcccggaaggaaaaaagccggcagacattttacagaaaatcgttctggagcgaaaagcaggaaggttgacaaaagaacaggttataacggtctggaattacatggagcagcatcggtattatctcggacagatggatctgaatattcagtcgccaaaagtatgggagtactatcgtgaagtgttaaagacactggcgggatatggtgctaaaattgtaagactggatgcatttgcttatgcaccgaagactccgggggaacggaattttttgaaccagccggacacctgggagctgctggacaaaataaaacagattgcggaaccgtacggtatggaacttctgccggagattcatgaaagctatagtgaaaaaatatatgagaagatagcagagcagggatatgtcacctatgacttctttctgccgggactcattatagatgccctggaatcgggaaacggagaacatctggccggatgggcacaggagctgatcgataaaaatatcagaaccgtgaatatgcttggctgtcacgatgggattccactgttggatctcaaaggaattctggcggaggaccgggttcagaaactgatcgacactattgtctcccgtgggggatatgtgaaggatcttcacggtcagaaaaacatttactatcaggtgaatgcaacctacttcagtgcattgggcgaagatgagagaaagatgctccttgcgagagccttgcagatatttatgccgggcaaaccgcagatctggtatctggatctgttcgccggaaagaacgactacgaagcggtgaaaaaggcaggtccaggaggacataaggagatcaatcggacaaatctgacgacagcacaggtatgcagtggtttgagtaagccgattgtaaagcagcaactggagttgctgcgattccggaattcctgcccggcgttctcggaagaaagccggatcaaagtaagcagtgaaggatccagaatctgctttgtatgggaacatcagggctgtactgcacagctgagggcagatctgcaggattgttcctatgtgattgaattctgcgatcaggatagaaagagaacactcatcacagagggataaaatatcacggccggagaccgccggcttgaatacaaaagataagaagagactgagaatgttgattttttcggcatttgtcagtctcttttgctggaaagaaggtttgcattatgatatattgaggaaaagggatgtttttcatctgaaggggcagtattatgagtgaagcatttgagatcgtaaagacaggaatagattttttctgcaaccacctggtattttttaatatgctgtttgccatcgtgatcgtgtttttccagagacgggatccaaagagtgtgtgggcatggctgcttttgttgtattttataccggtactggggttcgtgttctatctgctgctggggcaggatatgcacaagcggaaaatgttccggatcaaagaggtggaggatcacatcagcaaagatatcaggcagcaggagtaccggctgagatcccgggatgtccaggagctggatgagaatatccgggggtatgaggatctggtcatgtataatctggaggccggagaagccatgctgacgaaggacaatgatgtggatatcttcatcgacggcaataagaaattccgggcgctgatggaagatctgcggaatgcggagcattttatccatatccaatactacattattaaaaacgacgtattattcaatcagatcaaggatattctgatcgagaaggcggcacagggtgtggaggtccgggttctgttcgatgccatgggctgtcgttccgtgcggcacagctactggaaatggctgaatgaaaagggtgtgcagaccgcggaatttttcccggcgatcctgcggaggcttcagcttcgtatcaattaccgcaaccacaggaaaattgtggtcgttgacaataaagtggcttacgtgggcggatttaatgtcgggaaggaatatattgatctggatgaaaagttcggacactggagagatacccatctgcggatttgcggcagtgcggtactggggctccaggtgcgatttattttagactggaattatgcggcaggagagaacctgtttttgcgcccagaactgttccggggaatcgaagccggtacgagggatttctgtgatctgcagattatcagcagtggtccggataagacgactcagcagatccatgataattacctgcgtctgatcaacaaggcacagaaaagcatttatatccagactccgtattttatcccggatgaggcgatcctgaatgccctgatgatcgcggtgaagtccgggatcgaagtgaacattatgatcccatgtatgccggatcacccgtttgtctattgggccacctattcttatcttggcgatatggtcatggccggggccaactgttatacctataacaacggttttctacacagcaagggcatgatcgtggatgacagagtactgtgttacggaacagcgaacatggacatccgcagctttgcgttgaattttgaggtaaatgctgtgatatatgatgaaaaaaaggcgtgggaaatggtggaaatatttcacagggatctggaagtctgccgtcagatcacccgggattattacacgggaaggaacctgaagatccgcataaaagagcaggtctgccggttattgtcacccttgttatagcccggtggatgtgttataatgggcggtgctatgatgcatttcgcatggtaggcacaaaatgaaaggtataggaagtattagaatgaagaaaaagacattaggatttctggcagcggttttaagcatgtgtatgctggcgggctgcggagcaaaggatacaggagacggcacggatgcagcgaccggcgccggagcagaaagtactgcattgaaggatatggatgtggacaagtatgtgacactgggcgagtacaaggggctggaagtatccgtagacaccgtggaagtagatgaggatgagtgggacagtctggtcaataatgtatattatgaaaatattaccgcagagaacggcgggattatggatcgtgccgtggagaccggagacaccgtaaacatcgattacgaaggcaaaaaggatgacgtggcatttgacggcggtaccgcacagggatacgatctgaccatcggttccggaagctttattgccggattcgaggatggactgatcggcgtgatgcccggagagacagtggatctgaatcttacattcccggagaattacggaaaatccgatctggcaggacaggctgtggtatttacggtaacggtaaattatattcagcccgcacaggatggggaattcagtgatgaagtcatcagtaacttcggtatcgatggtgtgacgaacgaggaagaactccgtcagtacgcttatgattatctgaatgagaatgcacagcagaattatgaaaccaatgtacagcaggcagtgatggatgcgtttatggcaaataacacctttacttccgtgccggaggctctggtacagaaatattctgatgcagcggagagcagcattacctccatggcatctgcttacggtgtggacggagatacgttcacacagtattattacggacaggatctggcatctttcctggctacctattctgaggaggcagcaaagcaggatattgccttgcaggcagtggcgaacaaagagaatctgaacatcagtgacgaagaactggatcagatgcttcaggaccgcacaacagcagccggttatgacaccatcgaggagtatatcggcgagacctccaaggaagactacagagagtatttcctctatgataaagtgacagattatctggtagagaacgcaaagatcaccaacaattaaattttaaaaatagtatgtgaccggcgaataggatgcgggccggttcagatagagcacgtcgcagcgtgcggataggaaaaattatggaattaacagacatcagagaacttcaccgggaaaaggacgtctatatcggcaaggagatcaccgtaggcggctgggtgaggaacaatcgtgactccaagaacttcggtttcctggtgatcaacgacggaaccttttttgagcctttacaggtagtatatggcgatggacttgcgaacttccaggagatctgcaagatcaatgtaggtgcagcagttgtgatccgcggcaccatcgtggctacccccgaggcaaagcaggcatttgaaatgcaggcagcggaagtgatcgtggaaggaccttctactgcggattatcccttacagaaaaagcgtcactcctttgagtatctgcgtaccatctctcatctgagagcacgtaccaatactttccaggcagtgttccgtgtcagatccctgatcgcttatgcgatccacaccttcttcatggagaggggatttgtctatgtgcatacccctctgatcaccagtagtgactgtgagggtgccggtgagatgttccaggtaacgactctggacatgaacaatgttcctaagaccgaggacggaaaagtagattacacacaggatttcttcggcaaaccggtaaaccttaccgtaagcggacagctggatgtagagacctatgcttttgcatttaagaacgtatatactttcggccccaccttccgtgcggagaattccaacaccacccgtcatgcggctgagttctggatgatcgagccggagatctgttttgcggatctgaaggatgatatgatcctggcagagagcatgttaaagtatgtcattcgttacgtattggaaaatgctcccgaagagatggcatttttcaaccagttcgtggataagggactgattgagagattgcagcatgtggtcaactcggattttggtcatgtgacctacactgaggctatcaagatcctggagaagcacaacgatgagttcgattacaaggtattctggggatgcgatctgcagaccgagcatgagagatacctgaccgagaaggaattcaagagacctgtattcgtaaccgattatccgaaggagatcaaggcattctacatgaagttgaacgaggatggcaagactgtggctgctatggactgcctggtacccggtatcggcgagatcattggcggcagccagcgtgaagacaatctggagattctggagaagcgtatggaagagctgggactgaataaggaagattatcagttctatctggatctgcgccgctacggctccgcacgtcatgcaggcttcggactgggcttcgagcgctgtgtaatgtatatcaccggaatgggcaatatccgtgacgttatccccttccctcgtactgtaaataactgcgacctgtaattatatggagtcattttacctatgaagaaaaaaactgccggcagaaaagtaaatagagcaaaaagaaagtttttatgttattttcttctggcagcggtgacactgacagccaccggctctgtctgggaatctcccgcggagacggtgcaggcggcaccttccatgagtgaactgcagaacagcatcaacaatcatcagaaccagctgaacaacatcaacagccagatcaattccctacaggatgagcaggatctggtgcaggagaagatcgatgacctgaatgcagagatcatcaacaccatgaccagtatcggcatgaaggaggatgagatcgcatcgaaggagacggaacttgccgacaagcaggtgcagatcgatcagacgcaggaagaatacaatcttgccaaggcaaaggaagaaaagcagcacaatgatatgattacccggatgcggatgatgtatgagaacgattcttcggagaattatgtgaaccttctgttacagggcggtggcctgagtggtatgctgaaccggatggacttcgtggagagcgtctacgagtatgaccgccagaaactgcaggaatacgaagagaccaaggaacaggtgctggcgctgtggaaccagctggaagaagagaagacccagctgcaggtcgataaggatcagctggaagccgataaggcggatctggagaaccagaaatcggaactggatgtgatgctggccaagaaaaagcaggaatccgccaactatgatgcggagattaagaaggcaaagcaggaggcttccgtagcgaaggcactgttgcagcaggaacaaaaacagttaaaacagctgcaggcgaaggcacagcagggaaatactgccgcagccaccggcacttatgcaacgaccaattatacctcagtcatcgaaagtgcctccggcagtgatatgggaaagcgtcttgcaaaatatgcctgtcagtacataggcaatccgtatgtggcgggcggtaccagcctgacgaatggtgcggattgttccggatttaccttccgcgtctacagtgatttcggttacagcattccccgtacgtcctatgagcagagaagttgtggcaccggtgtggactacagcaatgcacagccgggagatctgatctgttatgacggtcatgtggctatgtatattggcggcgggctgatcgtgcatgccagcacacagcgtacgggtatcaagatcagcaatgccaattaccgtccgatcctggcagtacgacgcgttgtgtaatttcatatttgacatttgtaaagtccctgtttttgcggaaaacggggactttttttctttttgaaattattttttcgtgaaatttgacaaaagatatccttggtgaaatcgcatatagacaaagcaatctatctatgatagggtggagttatccgaaatctggatggtttcggaaactgtaaatctctgaaataagaattctaaataggccgttcggccgggatttccaacgatttttttaatagtaccttttatttttgtacgcaaatttacggatcagttctctgcttttgcagggagaaaataatgggggatcaatgacatacgaagaatttaagaaggaattgcgttggaatgtgcagaacatggaaacggcacggggcaagaccatacgcctgctggaacggcacatggtatgcggtgatccgatggcggttcatatcatgaatattatgaaccgatgtatgtatggaagagaacagatcatgatacgtgaagatatgctctgcgcattatggatgcgtggaaaaagagaatatatacagcactggctgatacggcctttgtatgagcgatacggacaggaaggatggcagagtattttaccggagatctcggcgggcctgacggaggacgatgaagaagaggacatcgtactctccggggagaatctgagctatgctgtctgcagaaggcatatgatcgtgcgtccggtgaattatgaacggtgcaggcaggagcttggcaatgccatctatcgtaagattggagatgtggcgctggtgctgcatctgttgaccagtgagaagaccggaagcagtctgaccatacaggtgtcccgaggtatggtactgccatggaagcttacggaagaccagttgatcacggaagccatgatgaacacctgccgcaagatgccgcccagattgtttctgggagatgacaggagaaagttttttccctatgaggaaggcattctgttgccggaagaggaagggcgtcagacctggatcagcccctggaaccacagggagggacagagaggatatcttctcaccactactgccagaatccatggggctgtggcctttttctatcccggggtaaaagcaatcctggcggagaaactgggcggggactactatgtagtctttccaagcgtacatgaagcaatcctgcatcccgtagactgcaccggtgtacaggagatccgttcctccgtacagcatatcaatgccgtctacggagaaggagagatgctgtctgaccggatcttctgctaccacaagaaccggagattgctgcagctgctgtgaaactacatcttaaagtaataacaaaagcactcccggttaatgggagtgctttgttattatagtatattatttataagtgaatctattgtacactgggattttccatcaggaaatgcatgaattttccctcatcagagctgtctgagcagaataactcaagttcatcaccatgctgaccaagcaaagcagcaatggcaatatattgggaaagtttgctcttcagattaaaaatatcaccgtctacggatcttaaagtaacctcccctttacaactgtcaacaatagcaagaaactcgtttacctgttcgatttttgataatttcataagaaccctccttctcgtatgtacgtgcaatatttgttaaaaacaaggctgttataaacattataccttttagagaagataatgcaagtgattatttcggagtgagaccattatggtgtgatttccacaccggtgaagtacatcgtgtctacatctccggcatatccggtctgcatatactcataaaaatgagtgggctcatcgtaatcatagaacaggaaacgtcgttctctggcatcaccttccttgtaatcaaagatagcatccccctgtttgccatccagaagtcgtgtgtaggcttccagataatcagattgggaaatgggagcagaggaaatctgtagttcatcataatgctcaccgacaccctttacgaacagaataggatgctgccgtttctcggaactgtcatcatcctcaatgttgtatccgtggtccgacaggatcataatggccgtattatcatagacaccgctgtctttcagtttttgcagatacgtagccacgattgtcatgctggcttcaatgctttgttcgtaggtgccgttttcaatctcgttcatctgtgcatcctgatgccagggactgtgggcgcctaccagatggatgaatctgaagcatttgtcatcggtcagtgttaccggtgtctttttcaggtaggtatagaaggcctgattgtcggaagaaaagagttcgtaatcactgatatcatcggtcttctccagtgaattgaattccgccgggatggtgaggcagaagcgcttgagatcaaaaggcatgtatttgaatccgaccagcttgatttccagtttcataaattgtgcaatggaagagatcgtgggggtcgtgtcgatcatattttcaaaccggagcatgctttcttccagacggtaagcttcctcctcatacattcccatgcggtatcctctggcttccagatcatcaaagaaaggagcttcccgatagactctctttgcatattcgataaattcttcctgatcctcataccattcgccggagaagaggtaaggaactgaatatgcggtgaatggataggccgacatcgtattattataataagtaaaatcagaaagagtttccttatattcgggatggtgttcgatcacctgtgacatgatgtctccgtctactgtgtccagaaccagaagtacaaggttttgatcggtagacatttccagttccccataggtggtgttgatcatagaaaatttgtgttccaggccctgttttgtaaaccctagcgttacaagagtcaccaacagaaccagactgatcagcccgctgacagcacctgctgcatctgccacctttgtaagcgacagctttttcaccgtcagtatcaccagaaccgcgactgccacccagagagcaacggagccgatacgcaatccggaatactgtgcccaatccaccgtacttccatccagatgaggcagattgcctatcatgaaattgccctgaatataagtgcagaggaacgcaatcagataaactgtgagaaatccatgatatagcctggtatttatcttcgaaacgatgaaagccagcaggaagctgacacccgtaaataccgcaaacatcaacagacagagcgggatcagatcataaaaatcaaaccagaattcatatttgttattaaaataaatttccaatggagcataaagaaacaacataaatcctgccgcaacagaaagtaaaccggcggaacgcagccggagctttgactctttcacaaaaaaaccctcccgtatgttcaaaatggatacttgcaaagtacaactattatattttgaaacaaaataattgtcaaatagcggcttaattgtcaggatgcataacccctcagatactttcatacactgtaaaaaagtatcctgaggggttttcctttgaaagactatattgaagaacgagctatagggatagcgggctatatcatcgaccacaacgccacggtgcggcagaccgccaaggcattcggcatcagcaaaagtacggtacatgcggatgtaacaatacagaacgatacaaaagtaaaataatatggagaattgaatagaattgaaacaagggcactctcgggtagatatcagggagtgcttttgttataatgaaatcaggtaaccttgagtattggtgaggggagatagaaaatgacaggaatatatgattgctttggttatggctcgggatatgatgtctcttttgaagaaaggtacaaattgattagaaaatcgggatttgattgtgtaatgttgtggtggagcaatcagtttggcagaggagacggttatcaagaggatgtaagattagccagaagagctggtttattagtagaaaatatccatgcgcctgtgcatgagcagaataatctgtcactggacaatttgagtggtgaaggcgtatttcaaagttatctacaatgtgtagcggattgctgtgaatatgatataccgaccatggtgatacatttgccaaatgataataatcctttaaatcaaacaggaatcagacggttggcagaacttataaacaaggcagaacaaaagaatattcagattgcttttgagaatttaagtaacattaaaaatttgaaaatagttttaaataaattcacttcaaataatgtaggctattgttatgatagttgtcatcatataaattatgcaccggatgaagatttgttgggaatgcatggaaaccggctgatggcaattcatttacaggataacggcggtagtcataatcaacatcaattaccattcgacggcaatattaattgggatacagttatggagaaaattgcctgtacaggataccggggagctacaactttagaaccaatgaattgggattattctcatttaaatatttgtcagtttttggaattggcttatgaaagggcaaaaaggcttgattacttgcgaaaataatgtaggtgatgaaaggatggaaacagacggggagttcaatcagatttctgattgattctgagggtttgggagatactcccaacaagcaaaactgcattttgtgtgtacaaatgcactgcttgccaagttgtgaatatagaattgattgtaaacttgaatttagaaaaaacaaggcagagaagaggatgttgagcataaaaatgtatgcggattagaattgagacgcttgaaaaggtttagtaacataaaatcttttcaaacgttttctttcacttttacggctttgaatggaatatgatgtagtcaggatcggtgtaatttttgaaaaagtatggtggaaatggacaaaagtccagtattttgggaacgtaatttaatttcaagtggattatgcttagattaaataaaaggtctggtctaatctaagaatccttctcatagtatgggagagaaggacaggcgaggtaagggggtgtagctttcgcttgaaacggacgaaattaaattatcgttttcataatccaaattcagcggaagatactgcagatttcctgtgtaagctaatgatagaagtaaataccgggaaaatggagagggcaatagaagaagctgcattgtatacagagaatggggaatacatatcgggggcgcaaacggaagttcgagaagaaatatgcgtatgaaaagcagggtgagaaaaccttgcttttt

SEQ ID NO: 5639 - DNA, 20292 bp, Unknown
  gut microbiota DNA sequence
cagactttgtcaacaactttttttgaaatcttttcaagtttctttcgagctgttgtgttgtctcggcgctgcctcaacaacgaatctgagtatatcaccctgtaccccacttgtcaacattattttgcatatttttcaaacaattttgcaaaagcagtaaaaaagcccataatcatgggcttttttgtcattttggatcttattgtcttttctctttttctcataatttacagtatatatgcctataaaagttgaattgtatattcatttgatgtatttttgagacgaagagaaatgttttgtatcccatttgccatatcttcatttacttccagtagcaggaccaatccctgtgtctcaccgggagccatggtttccacatacgtagacatgtcattgggcagcattgtggtcaatgcatttccacgtgtgccgtcatttacagtaatgatgtatctggatgcggtactcaggaaatcaacattttcctcctggtctgttccgttggtcagttcaaagttcaatatcagaagctttttcccggtggatgcatccaacgcaaaataatcctctgtagatccgtcctccggataagagtctgctatctggtaatctctgtatgtcaaggtcactccctccgcaagtccgaagaaatcctccagactggtggtaatatcctcctgtgcggtaggtgcctgggcttctgaagcagtcgattccgcaggcttctcttccgtctgtgcattctcctgtcttccggtttccttggccgcgtctttttccagttttgcaatgacgatttccgggtccacgagacggctccggtgattcgcatcatattttaagagagttaccgccgcatattctccgactctttgtgattccgcttctgtcagatccggaatttcatttccgcaggctgtcatgccaagcgccattacacacaataacgctccgcatacaatcctctttttgtttcctgtcattcttctatccttccctgtctgtttttccattgtttcctgtatttttctcaagtacgatataaatcccggcaatcgccagtgcgatcacacccactgcaaagaaaaggaccgttttctgcaataccggtgctccccagtaatcatataatgctattttaccacaagtgcacaaagaaagcactagtccatatattcttaccggcttatcttttttcaaaaagcccagtgttacacttaccagcgcaatcagcatgatcagaacactattgatcacgggaacattggtcttaacgatcagtgccatataggtcagaaagatcacaatgatcagttctctgcgtttaaacttcttatagtatctctcctgcaatgtcagtaccagataagccagtacaaacacaaacatgcacagataagtaagataagagttccggtacaccggatttgccagagcgatcaacgctccgatctgccccaccattacaaatacattaaataccaggatgtttttcctgcgcatatatttcacattattaaacagcaatatacttacaaacaggatccccgcaaaagccggcagctttagcatcggcatcaaattgaccgctgcaaaaaatgccagggaaaaagtaagcaggagctcctgtatcgttgtccatccatagaccaggaacatactgaggatggttcccgcaaggagcaggtatgcatacggtatttcctttccgtttgccagaagttcaatacagtacagtgatgtaacgatcacatccagtgccctcagtccgccttccgcaaaacgggtcagtatcttcgtcagtaaaagcaacgctgtcaggcatatgagtatcggccagttactttctattacagaaaaggcacataccgcaacaaaactgaaaaagtaacagggcagccattttttccacgttccacgtatggcaattcccgcaagaaccgcgactacaaacgccattcccgtcagggcgatgattccgatatacgcgtcgttctccgctcttccccaataattgttcatcgccgtaccggttgtaattccggctaccagaagaaatgctatatagattgccagcaagccgttttcattcactgcatggcccgcctgtttttcttttagtatgtaattgctctgcactaccaggatcagatgtgcgatcaggaaaaaggttccaaatgcagctgctgtcacccagaccggcattccctgtgtactgatcacacaggataccgttaccgggaaaaggatcgtagtgctgacaagttgtatcaactgcgaagccgtatgatatcttcttaccggcacacagatgctcagtacactcagtaacagaatcaatgccagcaccaacaggccttccggctccgaaagcaatgaagaaccgaaaagcggatacgcacaaagccagcatgctgcgattcccagcattctgtgtatcagggaatccctttttctgctcagtaaaaccgtgcccactgtgatcactgcaatgatcgccgctgcaggaagcataccgaaattatgtagggaaatcgtattgatcatggtcgacagatataacgccgctataccgatagccgaaaagatccgggccagtttcggaagctttctgtggatcagtaattctgcgatcaataccactcccagggaaactgcatataaagaaatacctttgatccagccgttcataaaatacataccaagcaataccagtgcggtcagaataaagattccgccaaccaccgacaatgcaatggttgcgaccagatattccgcattctgcttcttctgtgccggagcctgcgtcgccggtgcctgcacctgttgcatggtaaactgccccactggctgtgtctgtgattgcccggctgtctgctgttctccggcggctgtctcctgtggtacactctgctgcggcacagatgactccgctccggtttctccgcctctgtttgcattgatctgctgtctctggtaccagaattccacgcttttatccagttctgcctgtagctgttctacatattccggctgtctctgtattcttggaagtaattgctgtaaatacctggtaaatatcggatcattggactgcatcaggtattctcttgcctgttgttccagtctctttgctcgttcctgttgtgtattggtctccatcttttgtccttccctcattgtaatttctgtgatcttatgacactatatactctctgtatctgtccatatcctgtctatggcagtccgcatggatcagaataccgtcctccctatactctctggaaagtatctgcgcctgttccatcagataggaagccacatttcctgcactgtacgggatcagaaatacgcactctgcattatccgcatagactttctgttcaacagcctctgccagttcacggataccgatattaagtcctgctgccagataccagttgtcctgtctcttttgcggcagtggttccatctcacatttgtctgccttattatacactatgatctgcggaatgtcacctgcttccagttcttttaaggtatcagcagttacctgcatctgccgtctgtaattttcatcgctgaaatccaccacctggatcagcagatccgcatacttcacctcttccagtgtagagcggaaggcttttaccagtccgtggggcagcttgttgataaatccaaccgtatccgtcaggaaaaagggcttattatgtccggtatccacactgcggacactggtctccagtgtagcaaacagcatatccttttccatgaccgttttatccggcaattcgccgaactgctctaccatacggttcagaattgtagactttcccgcattggtatatcctaccagagccacctgcgggatacgggactgctgcctctttttccgctgcacctctctggtacgtcccacatcttccagttcctttttcagttctgtgatacgatgctcgatcttacgcctgtccagttccagctttttctcaccggtgcccttattactcatgctgccactggcaccgccctgtctactcagtgcatcatacattcctaccagtctcggcagcatatattgcagtctggctgtctccacttgtaattttgcctctcttgtctgggcccggatggcaaatatatccaggatcagattagtccggtcgatgatcggcagttccagttcatttcccagatttcttacctgtgaaggtgtcagagaattatcaaacacaatctcctgtgccccgcattcttctgccagcctgcgcacctctgtcacttttccggtgccgatatataacgctttattgacatgatccagccgttgtaccatctgaccggccacttctttttccgcagcttccgccagacttgccagttcctccatggaacgctcaaaatccggttcttcaccgacatccacaccgactaacagtacctttaccggtgcctcctgtatctgttcttccctcatataaaaatatatcctttatatttactattttgtctctaactcaaaccagaattccacgccgttgttgtaattgttcacaccgaattgctggttcatggattccatgatggccttcacgatagacaatcccacaccgctgcctccgtattctctggttctggccttatccaccttgtagaacttctcccagatatggtggatagagtcctccgggatcggtttgcctgtattgaatacagatacccgtactttgccgtccttttgttccattttcacttcgatgatcttatcatcttcacaatgattgaccgcattggagaaaaagttcatgaacacttcttctattttaaattcatccgcccatgcatagatcggcggatactcttccatccgcacagtaatctcatgctgttttgtcagaattgccgctgactggatataatttttcaccagcgccgtaaggtcgaaccgctccatggccaccacatcattaccaaattccagttggttcagggtcagaagctttttcaccatgttgttcatcttcgctgcttcgtccacgatgacatcacaatagaactgcctgctctcgggatcgtcattgatctcctcctgcagcccttccgcataaccctgaatcagcgcaatgggggtcttgagttcgtgggatacattggccagaaattccttgcgcatttcgtcaatggcttcttttttctccacgtcccgttgcaattcattgttcgctgtcttcagttccgaaatggttttctccagggaatcggacaacttattgatattctctcccaacagatcgatctcattatgtgccttcccctgatattttgcctcaaaatccagctgtaccatccgttccgaaatattattcagttccaggatcggcttggtcacacttctggagacgaaccagataataataccacccgccattgctcccagacatcctgcaagggcatagaagcggttggcgatctttgcactctcctgaatactggaaagaggtgtctgcataataaaagaaatgccggtattcagtcttccgtagatttccagatattccttgtcctcctgtccggttctctggatcacatagtcatcgccgttctcgatcaccctctggtcattgaaaggtatgctgagtccaaatacataaccgatcaggcggttttccagtctctcaccgccgttgatggacacatatttcatattggaattcacatccataacgcataccgtcatgttgtagcttctgcacacatcatccagttctctggcaaattcttccgtgtcatagctgtcgctctccgctgcctgcttgatggttccgtaagcatcatgaataacatccagtttgctctgcatatagacttttcccagaaataaatagttgatcatcaggcacagcaggatcgtaccgatcatcaggccgataaagatccaggcaagctgtcccctgatagaatgtacttttctcttttgttgtttattccgctgtttcatccatcttgtaccccatgccccatatggtctttatgagattgccttcctcgcccagtttgctgcgcagttttttcacatgtgtgtctatggtacgggcatccccaaaataatcatagttccacacattgttcaggatcttttctctggacagggcaatgcctttattttccataaaataggtcaggagttcaaattccttgtaacttagatccacatcttttccatcaatgatcacgcggtgggcttccttgtccacggtaatgcctccgcaggtcaatgcttcctcctgtcccagctgatttgttctgcgcaggatcgcttccacacgggccaccagaatcttgggactgaagggcttggaaatatactcgtccactcccagctggaatccctgcagttcatcccgctcatctccgcgggctgtcagcatgatgatcggaactttggagttgacacgaatttcccggcatacctgccatccgtccatcttcggcatcatcacatccagaatgatcaatgcgatatctttttctttataaaaaatatccagtgcctcctcaccatcaccggcttccagtacatcaaaattgctcttcaccaggaaatcccggaccagcttgcgcattctgctctcatcatccaccaccagtactttcagtctgtccatacaccctcaccttcctatcttgagatagtaactattcagtcccattcgcaaaatcgcctcttcgaggctttcctgaatacttacactatagcgtgtaaatatgtcaattttgtgaaacttcggtctctatatgtaattctctttccttttcccgtaccgtctgttccctctgggtcagttcctgctcccaggtggcatatttgttctgcagatttctttcataattcaggacattgggctgatcggaattcagcgtgatgataaacattgcaataattgcaatgaccatcacaatattcataataagagacagccggaacgtcgtatttttattttcttccggtgccggtttgattcttcttctggcaggagacgttttttccctggtgtccgcaaagttcgtccacagagggatcggcggaatctcttctcccaacagatcctgctctgctttcagttctccctgcaattccctgaggtattccaaacctaccggagtgcggaacaccctgtcatccaatgcttttttataaataaccagtacggactccagatttgtccgatcgatccgcttatccagataagcaatcttctgtctctcctgctctgccagtctggcatctttctctgaatagaatgcaaatccggacactacatgatccgtccggttttgctgttcctgttctttctgtacatccattactggttttcctccgcgcttcctgctgcagcattctgcaataaaatatgttctccctgtaccagcgggtaatggacaggacgatcactgtccagattctcccggtacatatccactgcagtaatctgatgattttcataggtcgtataatagtaaattcctctgtctgcattgcagcaggaagtgtagatagtgatctcatactcccctttgtccagctgacagcatcctctggtctgatccacgctccccagaatatggaaaaactggctgacgctctccgactcagacaatccggacagggaattcatcttcgtgaatgccacccgtacaaaacgggatgcagaagacagatccccgggcagtcccatggctcccatgcctctgctgtacggcttcagcttcagatctgcggaaaaacggtttgtcggtgattcggaagacagggacatataatcgttcaaacgaaacatctggattggaaacgggggattgttcgtcaatactcccaccgggttgtcatagatcttcagtccctcctgcacagactcgatcgtaatggcctcttccttgtctgccagaatccagtgcaatggagaaaccggatatttttcattaaagggcgtatccaccagattgatatgggataacaatactctggcttcctgcacattggcacactgccccagaatccaggggatgaactcaaactgggcgatgttgtccttacctgtctgcactttgctgtatactgcatttcccgggaaattcagtcccgccatgccgagtcctttctcattcactgcatcatagtacaaaggataatcccctgccatatgagcaatgccgatcatggcataatgctccgtcagggcattctgatgccgtagcggaaaaggataattgcgtggtgttaccgttacctcttccccatagttaaattcataatcaaaagttctgccgaaataaaaatcctgtgatctataagttgccgctgtacacataacatatactcctttgttctgattcaaatagatatagaaactagtcttagtctatagcatttgcagaatgtttgcaagtatacgaaaactattgacgcaaatcatattcttatctttactaagcaaataataaggaccttcgaggctgttatcaatatctcgaaggtccttttctgctatatctaattcacttgccgattaaggattacaccgcttacagggcatatatcccatattgatgatatcttctctgttgccggtatatatctctttgtttttctccttcatctgatccacgctggagcaggacggatagtggaatttcatggtgttggtattcagtacgtaggtagtttcctgtgattcctgtggcactgacggttccggtgtgatctgcatcgtagtgtctgtctggggttgttgtgtcggtgtttctatcacaatgggtgctgccgcttcctgggatgccgcgttgctctccgcccagttatctccggtggcatagtcaataccgatccccggctgcacattgtaggcaaatacacagaattggattccctctccgacatcttccacagaataggcttccatgaggacaccgtctgccagcaggttatccccgtcaaatatgggagtgacacggtacaggacatgattccctgtatttttgatataatcgcagactttcgtctcaaaaggaagcattccctgcacgttgagatatctggttccggtgatcaggttctgcggattggcgttttccgccgccagcatgtaggcgatcaggtggcagcgattgtataggtattttccgtccacgttatcgtatttcaccagatgccatccggtaggcttcacggctccgatctcccctctcggttctgtcggcatcagatcctgtcctacgttggcatatgccacgccacagcgccccaggctgtccagctcgctgtatgtctcgaaggactgtgtggtcagatctacctctgtgaaataaggtttgttgccattgacctctgtataaggcgtgccggagtatgccggaatctcccggagggaaaatgctgacgtgccctctcctgtcggaacgtctgttgcagatgtaacctgctgcgattcttgtgtatccgaagcgttttcctgtgactgtccggattcgggttccgatgctgcagtctccgatgcttccagcaattcgtaggggatcgtcgccggctgctctatcgtataggtattatcctgcggcgtgacggtactttccgcacagccggtaaatgtcaatagcagtaccagccatagtgacaattgtgttatcaaacatttctgagatctgttgtgtttcattttcatagcttgtcaattactcccttgtaaaactctttggaaattataccacatttttcatctgacctcttcttttcattgacaattttttcaaaaaacagtatgctaaaaatatctaaaaacacttcaaataatatgccaatcatctaaacatttaggcttattatttgaggtgtttttttctgcttattgacacacgtatttacacgtattataatttaagaaaggatatcaatgaaaacaaacgaactgctaaaactattaaagaaaaatggttgttctcttatccgccacggaagcaatcatgatatttggtatagctctgtgacgggaaaacagtttgctgttcctcgacacaaaaaggaaataaaaaccggaactgccattgctattttgcgcgatgccggaatggattcttagaaaggagattcttatgtctaaatatgtttatcccgctatttttacttctgaaccagatggaggttattctgtatattttcccgatttggaaggttgttatacctgcggcgacacactggctgatgctctgtttatggctgaagatgccctcgcgcttattctctatggatatgaaaaggaccaacgccccattccacagccctccaaaatgtcaggcatcaaagttactgcggattcctttttaagtatggttgcatgcgataccctggaatatcgcaaacgttttaataacaaagctgttaaaaaaacattgactattcccgaatggctgaatgaagctgctgttgcaatgaatattaacttttcacaggtattgcaggatgctcttttgcagcgaatcagtcctcaataatgcacacacgaaaaataaaaagtgccgcaaaaacggcactttttctatggagttatctgtgtcaatgtcgaacactttctgttagaccttttgtcctggagttctgtgatctccgttagcgtatccagttcaatggttgttctgtcatcgcaataccaccatgtaataaccaaacggtcattatatacatatatcttatctatgaagtagtccagaattttgtttctggtgtcctcatcatcaaagtcggcttttgcatacatatcgaaatatttcttgatgctgttctcgtcctctgccagagcgtattttaatttttcagcttccatggcttctttcagattggctttgtctttctccagcttctccagacggcttgtcacggcatctgaaatcacacctttttcaatgactttaatcaaattggcaattcctttttccgtctcctttagctcattctccaagaccgcaatatagccattgtccgtatatagctttttgtaatattccgaaatatctaccgcaagacttatgaggttttcatcgtcccttaaaaactcacgcaatacccataccacatgaacctccaacaagtccttcggtatgtttttcagacaacacttgtgctttctgtgatttttgcaggcatagtaatatagaagatataaggaaatgataattcccctgtagaaatgataatagtactatttctgctccggcttgcgtagattctttatcttcttttcaaagaatctccagagttcttcgccattctcacgtagctgtacatattcctctgcccattgcagaaccagcttttcattctccgcagactgtgtagctatgggagtttcataaggcggtatcccgctatccaaagtttctgccactccccacattctgcaaatccgcattgctgttctgtagactttttctttttgcgtgttgccgctcatccgtttttctcctttgcatccgttttttctgatagtccacgccgccgtctgatttcataaaaaaacatacatccgacttgtttctaaaacaaacccagatgtatgtttaaatttctttttgcactttctcaaagttgaaacatacatctgaacctgatctcttcttttcctgaattatcagtcaaaaaaagagacacaagtaacttgatgtctcaacctactcagaaattagcacattttttcggttttgtcaagaggattggcggtttttgggggaacaggcttttctctatgcctgttcacactcaatgcggaaaatatagtaacaggcaaaattaccgaaaatctttcgatccgcttccagcttgctgatgtccggcacgctcaccccgttgttctgtagataacggaaatagatacggacgctgtccatgaaccggttgtgctggctggtgcggtagctgtcgttctcggctttctcttctctgctcatttcactgaaccgataccgcatcgttgcatacttgtaggcaaactcctttatatctgcatacagttctgcggtggtctcgtccttttccttctgtgcttccagtacctgatatacttcctcaaacttctctaattccatgctgctttctcctttcgctttcccttacttttatcctgtattttattatgaatgtttcgacacaggatgtcaaacattcttcctgcaaccactcgttggtacaactgttttttcgagcctttcttctctgcttatcttttggaaaatgattttgtgaaaaataagcctgccataaggtgtagcttttcttatttttcagttctcttttcaaaagcatttttcattcttttacatcgcagatgtgacaagctctgcttatgccctttttgctttccggagcctttagcggagaaagcaatgagatttctgcgaaaactccgtaaccatgcgggtttgagcctgtaaacgagccgtcagaatattggcacttttctgtaaacattgtttacaactgtaaacgagagtgccagaacgcccgtaaaacgggcattttttaagtgaacttgtttacaagccgcaagggtctgtgacgacgtgtaaacgggacgttatttgcaaaatttgtaaacaatgtttacaagaaagttctttacgcagaccttagactgcaccgtaaggttctgcgcagcttattctaaaaaataagttcccttacgggaaccttctgaaaacatgtgaccgctgccggtcgttctgtgtatcgtgtcatgcctttttctttcaaaagcgaaccattctctgtaccggtttccgcccagatttgggtcaatcttgggcgcatattggtacacaaatgtagggaatgcctgttctttcctttttggtacaatccgtggctcattctgctcccaaagatggtacattatctggctaaaaaaatgggcggcctttcggctgcccgtagattctctagtttattctgaaattatatgcctttttccgtgaacgctttctgagtcttgccgtcacatatatgatctgaaattctgcgttccacttcttgatatttgttgcgacaaagaccgtcatcacaacggtaaggattgtcatactaaggcttgtacagaacagacactccaaatactttgctcccagtattcccataagaactattctgaccggaacgggtactgcaagaagaatctgtaataacgttctctccaccagacagaacaggacaatcaataagtctctgatacctgaaagcattctcttcctcatatttgccacactccttccaagcaccctgtcggcagtccggcggactgcaaaaaagaacctgcaaaagcaggttccttaaatgagtgaaaatccttgtcgaagaatggtgttccagttgcttttttgataaagaaaacgtacaatgattaccaccttcttgtcttcgtctatggtataaaacgcaagataattgtttaccctaataaatcgaattccccaaccagccaaaacgggatcatccaccagctgtagtttctccggcatctgggtcagttcgccgattttttccgttgcaacatccagcagatggtctgctgcctgtgggttcttcaagacaaattcgatgtaatctgctgctttcgcaatgtcatgctccgcagttttggtgatgtgtacctgataattcatcttctgcggcggctccgaatatcagccatggcttcttgaaacggtctggtattgccagcggcaatatcatccattccttccttaatctggctatatagttcaaagcggctggttaattcttcgtatgcctcaatgctcattacagcaaggtcaccttttccatttttcgtaataaaaacaggttccgggtagttatgacagtaggtcgatatttcattataattgttccgcaagtcagcacttgatttaatggtcggcataaaagcacctccttctgtgatagtaaaattatacacaaattttgttatgcggtcaatggagtatgctattattctttgcggtatgcttttccttattcctttgtcaacaatcctctctcgcacacacggtctcaatgtcagcactcaaaatatcgaaatggcagtcctcacattgcagtaagatattttcggggttatcttccgcaccctcgaacgtgatttttacattatgccccatgtgcttctgtagagcattccataagtccatatctcgatccataattctttaccattctgtctaacgacagcctttctttttcgtattgcgcccggtctgtgcatcagaccttcattaaaatatgaaaagcggacgcatcagcgtccgccttggcacttgttatttaatttccgaacgacacttccacatcagggttctgctcctgccacttcttcaagccgtcttcctgcgtgggtggggtcatagaccagcctacgttcgaggatgacgtgtcagttctcgtcggcagtcttaggagctgctgcgacggtgttttccgtcacgacaggttctgtgcaggatgcaacagaagagtctgcgttcgtgaatacttcgtatgctacgatggtgtcattcacatccagtccacccatgttcagcgggattctctttattgctacagcaccagctacatgtctgctgtccatgtagttgtcataatgtccctggctgtcatgccatttctggtggatgaaggatgcgcttacttcgtcaggctgtcctgcctgataattttctgctgtggtggcacctgcatgtccattatctgcattacatctttctactgcaagattgtacaggtcttctgaccatgtcagttcggggatatctgctgcactacgttcggcattgaccattgcaaatacctgttctgccatggctctgtcgaagtatgcatctttgcttgttgtagtggctgtatttccagtaccgccgtcaccgtgagttttcatgaagttctcgataacagcatcagagataccgaattcatcagttcctgtattacttgcatactggtttccagcagtattgctgttaccagctgttgtgttatttgctgcaacggtattcacagcaggtttttcggatacgatgtacttgtcacttacatagccagtggtgttatttaattcaaagcgataccaacctgtctggtcacatttacccgtaacgacaatttcctggctggctttcaggctgccaattttcttaccatcggtgctgggcaggtctctgacatttactgcggactttgcatacatggtctggttcaattccgaataagtataccctgtgcttacagcagtgggttctacgggtgctgttgtgggttccacggcaggtgcaggagattctgcaggagtagtctctgtgggaacagcttctgattctgtgggagtctcagtaggctctaccgtgggttctgctacggctgcttctgtggttgtcatttctgtggattctacagaggtagtctctgtgctggcagtttcgttactggttgtctctttgctgccgcatgcggtcagcatcagtgctgcgcaaaggattgctgctacggctttcgcagcgagcctgtgtgttctgtgtttcatagttggttttcctcgctttcgttgagagaatttatttcgagcgattaacttttgttttcatgtgatcgttctctatcgttcttacattatagtcaatatattaggtatagtcaagaaattaagtatgatactctttttataatatgtgataggaggttcaatctaataacatgatatcatacaaacctttttttgacaccctacttcgcaaaaatgtgacagaatatgaattgatctttaagcacggtgtttccgccaataccatccaccgcatgaaaaagggagaagccatcactacaaagacactcgatgtgctctgctacatcctcgattgtcctgtttctgacattatcgaacatgataagacaaaatagaaacgacaggagctaacgcccctgtcgatattttttataaaaatcattcaaaaactatatctcaattcgtttccctcccctctttttcctgctttcctcacgcttcacgtaaagttctgcgtgcttttccctgaaactgtaatactcatttcctgctacaataatgtggtcaaacatatgaatccccataatttcacaggctcgcatcaacccctgtgtcacatcaatgtcctgcgtcgatgggttcgccgtactacccaacccggggtgattatgtgccagaatgattccggctgcattggtcagaaacgctctttgcataatttcccggattcccacagttgccgaatcaattactctgtggctgacttctgcgtaagctatcacatgaagacttgcagataagaacatcacatacagtttttcttccgaaaagtctttcatgtgaaaaacattattcagcacatttacaaccttctcaggggaatttactttcagccgttgctctcccacatattcccctcggtattcagccaccgtctcgctgaccagatacggcagctttctttcatccagtctcacgtctacaacatctatattcattgccgttacctccttcatggtctctcccggcattgacaaatgcaaaagccgccaagaagatgttaatagattgctctacatcttcctggcggcttgccctttgatatattcttcttttatttgcactgttctaaaaatttcaaagcatccctactccttctgtgccgtcaggcatggggatgcttctacaaaaaaatagcgatactgtacgaggtgtaatcacctacctacaatatcgctgctttcctgtagattctatctacaataaccgttctcacaattaccattccctctgtgaaaccaagcagaacatattcctgtataccacaatgttatacagggcgttcgacttgttacggtttagtggagtagacgagagtcgaactcgtgtccaagagcctattccctgtccttctacgagtgtagtttattctttgacattccctccgcgccccgggaataaacaccctgagcatttcagtagcttcatgttacgcccatatgcgcaaagctttgcatatgtcgtttctcacatgtttgaagccgggatcctaaggtgtgagtgccctagggccgactgctgccattaggcagcgtatgctaaattatcgttagcgtttaattttaatttggccatttaacgcattaccatgcgactcgcttctccagctgcaaaacccctgtcgaaacctttactaccccttattcagttgtcagaccaagtatacttgatggcacacacactgtcaagcacttgcggtaaagcattgcaggatcagagcctgtggatcacaaattgcggaccttgaattccttctctgcctctctgcgctgatcctttttggcaatggcttctctcttgtcatagagcttcttaccacgtgccagcccgatctctacctttaccttaccgtctttaaagtatacctgtaaagggactaatgtataccctttttccttgatcttgcccagcagtttgttgatctcgtacttatgcagcagcagttttttcacacgaagaggatctttgttgaaaatattccccttctcataaggacttacatgcattccgtagacgaatacttctccgtcttcaatgcggacgaacgcctccttgatactgcacttgcccatacgcatggactttacttccgtgccgtgcaaggcaatgccgcactcataggtctcatcaatgaaaaaatcatgatatgcttttttattgtttgcgatcagcttctgggactcttttccttttgccatggctacctcttaaaaccttgtaactattcagaaacccattcacaaagcgcacctgcggagcttctttttaacggctctgaatagttacagtttactatattttctgtaattgtcaatgaactaacagttcatttatccaccagccggaaattgatggtgcgcataaaacggtcgcagtcttccacttcgatccgtaccggcattcccagtttgaagcaacgtccggtggcttcccccaccatctcacaggctgcctcattgtagtgataatagtctcccggaatcgtcgaaatatggaccagaccctccacggtattgggcagttccacatacagtccccagttggtgacaccggagatcacaccctcgtattcctctccgatgtgctgttccatatattctaccttcttcagcttatccgtctcccgctccgcctcatcggcacggcgctccatttcagaagaatgcttcgccacctccggcagaatctcacgataatgctctatgcgctcttccttcagacgtccccgcagctgttccttgataatacgatggatctgcagatccggataacggcggatcggcgaagtaaaatgacagtaatactgacaggccagtccgaaatgtccggtacactccgtgctgtattttgcctgtttcatgctgcgcagggtcagtctggcgatcataggctcttcgggagttccctcaatcttctgtaacagcttctggatctccttgggatggatctcctccgtggagaccttgctgttcctgcgccccagcgccttcatgtaatagccataattgctgatgaacgtagacagcttctggatccgctccggatccggtacatcatggacgcggtagacgaagggcagctcctgccagtaaaaatgctgtgccactgtctcattcgctgcgagcatgaaatcctcgatcagcatagtcgctatattccgctcgtaaggcttaatatccagtggatgtccttccttatctaacagaatcttgcactccggaaaatcgaaatcaatggatccccgcttctgtctcttcttccgcagtttgtccgcgagctcagccatttgttggaacatagggagcagttccctgtactgtgaatagtctgttgaggtttctacgccttccccggaggttccgtccggcataccggcgttatgctctacacactctggctcctccagcagctttttcaccacggtataagacatccgcttattgacccggatcacagattcgcagatctcatagtccacgatttctccctcttcatccaccttcatcaggcagcttaatgccagacggtccacgccttcgttcagggaacagataccgttgctcagtgcatggggcagcatggggattacacggtctaccagatagacgctggttccgcgctttaatgcttctctgtctagtgcggaattctcctgcacgtagttcgtcacgtctgcaatgtgtactcctaagtgataatatgtcccgtcaaaggatacactgacagcatcatccagatccttggcatcctctccgtcgatggtcaccatggtcacatcccgcagatccctgcgtccggcacaatccgcctcggatacctcctgggataccctctccacctggctcatgatcttctcgccgaattccaccggcagatcaaagccacgtacgatagacatgatatctacaccgggatcgttgatatgtcccaggatctccacgactttgccctcaggactcttcgtattcgtgccgtatccggtgatctccaccacgaccttatgtccggtcatggcccccttcgaccactccttcggcacaaaaatatcctgtgctatcttcgtgttatccggaatgacaaagccaaaattactcttggactgctcataggttcccaccacctgagtcatacccctggcaatgatgcggataacctgcgcttcctggcgtttgccggtcttcgcaggcagaagtgccacttccacggtatccttatggaatgctccaccctgcttgtcctccggaatgaacagatcctcgtcccttccttccacttccacaaatccaaagcctttggcattgctgataaaagttcccgtcagaaccttaccgttggacttcatatatttacccttaacggtcagggtaagctttccttccgctaaaagttcccgtaaaatctcacgaaactcttcccggtcttcttttgcgacctgaagaaacattgccagttccttttccttcatcggaacgtaaaaatcatccttcaccagatcacagattactttttttctcttctctctgatttcgttattactcatgtaacctctctcaatataaaaaaggatctcgcttgcgagattctccgcctgcggcgggtcgcttttgcgacatatttcataaccgccgcagtg

SEQ ID NO: 5640 - DNA, 4145 bp, Unknown
  gut microbiota DNA sequence
gtaccttttccagcttatccgctaatgccagcagattctcagaagaattcatcagttctgtcatggtatcactcatgccatgagccgcctgcattgtactgtctgcggatgctgcattctgttcggagattgccgacaatccttccactacatcacggatcgcgcttccggactgtcccaagacatccatcttctcccggataccgccgatatgttgcagggaattctccacaccatccgctactgccgcagtcttcacaccggtctcctctaacttgctctgctggtgattcatgttggcttccacttcacccatgatctccaccattctgccggaagactccatgatattttggatgatctgctggatctcggttgcggagcgcttagactggtcagccagcttactgatctgctctgctaccaccgcgaagcctcttcccgcttctccggctctggctgcttcaatgctggcattcagtgacagcagatctgtctcgtccgcaatatcctgaatcatggatactgccttggtgatattctgaattgctccgttcatatccgttatctgttccgctacccgcaggacagattccttggtgctctcgttggagccgttcagttccttcatgatctcttcggaagctttctccgcttctgccatcctgccggcataatccgtcagagattttacttcctcagatatatattcgatctgctcgccgatacgcactacattttcattagcatccgttgtctcattggcctgattccttgcgccgtctgatatctcgccgacagcatggtatacatcattcacagattcctgggtatcctgtgccatcttgatcagtttgttggaagatgctgtcagatcatccgcggaatccttgatctctgttacgatcgaacggagagttttttgcagttttacagaaatacgatatacatccccaagttcatcctttttacggcactgcttttcatccggctctgcatccagttctccgttcacgatcctgcctaggaaatgcttcgtcttcttcatggtcttcaccatgctacgggataatacgcttaccagcgttgccgccacaagaacacatgccacagcaatcagaataatatccttgacctgcatcgagattgtatccttgacattctgcatcggcgtcgccacttcgatggcaccgatcacagagccatcagaattgatcaacggctgataatatacataataatctacttcggaaatgttgcagtccgtcaggaacaaagcctccccagtctgaatctgtgcatagacatcgtcttccagcgccgtaccgttaatacgtcctccctccggcttggtcaatgtcgtgatcagacgcatatttccatacaaaaaagacacctggaagcctgtcttctcctgcaatccatcgatcaactgtgtctccccggaaatggatgtgccgcccttgcgcaccttgcctcccttatctctggtgtaatcgccttcatacagattcgtgtaggtttcatccacactgacaccaacgatctgcagagactgctcaatctgtttctcaattccggtctctaatgctttggccccaaccgtagccaccagtgcacatacaatgatcatcggcagaaggctcaatgccagtatctttttcgaaattgtgaaaaatggctttttgttcccttttactttcgttttcttattctctgtcttcttcatacttaccacatctgcctttctgtaaaagactttatcacattcggtccatctcgaaaacgtttaagtattttctcagtaaattcattgtaacattttccatatagtaatacaattcgacaaaattacaagtattttattgttaaatttggtcatttttccttaacgttaagtgaaaatatctcttttgtttacgaaacggttaagttttctgcttccagaccggcatacgcagtatctttatcaatagcggaatgatcataataaaccacacaataggctccgctgcgatgacacccgggtatccgaacatgggaaccagcgtcgccgcgatcacaattttccctatcatttccaacgagctggagatcagcggtacgatccgctctcccagtccctgcatggagtttctcacaatacagattaccgctgtcacataatagaacagtgtatctaccttcagatataatgtggcattgtagatcacttccggagttttgctgccggtgaccagccataccagccagtcaccgatggtataagcagtcacaatattaagcgtacaccagatgcaggtataaccggttgccaacaggattcctctgcggatccgttcgattttgcccgctcccagattttgtccgcaataggtcgccattgtctgaccgaagacgctgaacatgatcatgaagatctcggagatcttgcgggctgccgtatgggcaatgataatattctgtcccagcttattgatggaggtctgcaatgtcaatgtaccgatattgaccagcgagctcatgaatcccatggaaagaccggagcttaacatattgcggagcattccggcatcctgcagcttcagatcatccacacgtatccgcagaatttcatacttttcccacagatagaccgcacacaccaccacagcgatcagctgcgacagcacagtagcaactgcggcacccagcactcccatatgcagcaccacgatcagaagcagatctcctccgatattcagcaccaccgacaccgccagcacgatcagcggggtcacggtatctccgatcgctcttagggtcgccgctaatacatcatatagtaatgtaacaacaagtcccgctatgatcacggatacatactgtgttgctgtgttcagcagattttccggcacattcagaaatctgaggatcggctgcaaaaatacaagccctcctatcgtcagtaccacagctgccaataggccaagcaccagagaattgcccaaggatctgcgcaatctgtccatatccttcgctccgaagcactgtgccgaaataatagcaaagccattgcacattcccatcaggaattgtacgatcagattgctcagcgtcgtcgtggcccccactgccgccagggcattatctcccagaaaagtacctacgatgcgggtatctgccagactgtaagtaagttgcaataaattggccaaaaaaataggaagggcaaacgtcagtatcaaaactgacggtctgccctttgtaagatctttcatatagttcctcacttctacacttccgagaaaaatatagattttcccgcgtgatagggctacagaacttttttaaaactttttcttggcattgtcaaggtatttcttggtctcagccaccacaacaccatttaatgccaacagtgcgatcaggttcgggatcgccatcagaccgttgaagatatctgcgatggtccatactgccttaacagtcatgtagggtccgatgaatacgcaggcaatgtagatccaacggtatactttgattgccttcggcttctgaccgatcaggtattccaggcatctctcgctgtagtaatcccaaccgaggatcgtggtaaatgcaaagaataccaggcataccatcaggataaaggatgcaatagagctgctaaaaggcagcccctgctggaaagctctggtggtaacatccacgccgtccagacctacgttccaggaatcggtaattacgatcgtaagaccggtcatggtacaaatgatcagagtatcaatgatggtacccatcattgagatcagaccctgtttggcaggagagtcattctgcgctgcagccgctgcgatcggtgcactaccgataccggcttcgttggagaaaatacctctcgcaatacccttctgcattgccatgataaccgctcccaaagcaccgccggctacggcacgcataccaaacgcactctgtacaatggttacgatagctgccggaatggcagttacattaaagatcaatactaacagacaggctactacataagtcactgccataaaaggaacgatgacctgtgccacggtggagatacgctttaatccaccgataacaaccagtgccacgcagatggtcaaaaggattccggagatcaccacgct

SEQ ID NO: 5641 - DNA, 2194 bp, Unknown
  gut microbiota DNA sequence
ctaccgatatcatgtacaatagaagaatagtacagatagaggagttatgaaaatggacacaaacgaacagaatcagcaggacaaaagagaactcagacataagagaagacagagaaatcagatcattgcatatacggttgtaggtattatgatcctgttgctggcggtgggaattgcttttgctgtaagtaagattaccagcatgagtcgtaatcaggaagaacagcagaacaaggtggatgagatcctttcggatgaggagacaatccaggcgccgacggaaagccaggagacagtggtggaactcacggatgagcagaaactggataccattatcaatgaggcaatcatccagaacatgcctctggaagataaggtagccggattattcattacgacaccggaatcgatcaccggtgtgtctgcggcagtacaggcgggagacggtaccaaggatgcgttatcccaatacccggtaggtggaatcgtatacgctgcgaaaaacatccagtctgcagatcagctgaagcagatgattgataataccaaattatataccagctatcccctgtttattgccattgacggagagggaagcgatacagatgcggtagctgcggcaggccttggcactaaagtggacacaccccagagcatcggggctaccggagataccaacaatgcgtacctagcgggaaccacggtgggaacttatctggcagagctgggctttaatcttgatttcgcaccttctgcagatctcagtgtagtggatggaaatgcggcaggcagcagttcttacggatcggaagcggacaatgtggcaacctttgtaggatatatgcaggcaggattacaggagcagaaggtgaccgcatgtatcggacagttccctggtatcggcagcagtacccagagcacgaaggacggcatggcatctacagacagaagtgcggaagatttcagagccaatgaatttgtggttttccagacttgtatcgacaatggcatgaccaaaatgatccgcatcagcaatatggcgtcatcttccctgaccggagacaataccccctgcacgttctccagtgcggtggtaacggatattttaagaaatgaactgaatttccgcggtgtgatcgtgtccggagccatgaatgaggctgcaatctccaattactatggagcagatgaagctgcggtactggcacttcgcgcaggctgtgatatgatctatgcaccggagaattttgagacggcatacaacggagtattggaggctgtacagaacggcaccatttccgaggaacgcatcaatgattccctgcggagaatctaccgtatcaaatatgcggataaactggaacagtaaagaagatagaagacgattgcatgtgagtgcagtcgtcttttttcttgtaaaaaattgccgttcatgttatcttagcaataagagcaatatttctcttacaaattctcatatcgttgactagcgatctatagtcgttttcccagagacgtgaatggaagaaagaaacatgaagttaaaatgaaggtggtgaaaagagtgaagtgtatagcataggaaaaataaatcaaaaaatatataaatgtataacagaggatattattaccgaagaggttattatcacagaaaatcagattcaacatattaaggacagacatccagaggcatataataaagtattgaaaaatatacaggagacaataagtaccccggattatattattagggataagcatgcatatacgggactgattattaaaagaatacaaacggaagaaggatttttacagattgtattaagattatgtacttcgggggatgaacatggatataaaaattctgtgatttcatgctggaaaattagtgagagaagattgcagaattacttgcgaaataaagaaattctttacagtagggaataaacagggtataatctatatacaataagagaggaactatccgaggtggtaaatttcgttgcaaccacgcaccctatgggtcaaaagagatgcaggagaggcgacgcctgccggatggtttcttgcttatgttattgagtcaccattttgtggtggcttttttagttttaaccacattcgttgtagaatcagctgtctacaatttcatgcagacacaaaaagagtggaaaccctgtaaatgcaaggcttt

SEQ ID NO: 5642 - DNA, 8499 bp, Unknown
  gut microbiota DNA sequence
aagaaaagtaagaataagccccggagaagtcaagaagccggggcgtaggagaaagaaaagtaagaataagccccggggaaatcaagaagccagtgtgcagaaggaggaaaagtgaaaactacacgcgaaaatatacaaaacagaatagaagaaattaataaggaattagaaaagataacaaaattggacaaaaaatttccgcaaggagaattgcaatgcttcaaaaatgaaaaccgctacaaatggaaagtaaaagaggaaaatggaatacgctatcttccgaaaaccgaaagaaatcaggcagaaatactggcattgaagaaatactatgagtatagaaaaaaggaattggagagtgaagcagcgggatgggaagcctacttgaagaagacagacaagattaaaataaactccgaacatctattaaatcatccggaatatggaaaattgctggctaagaatttcagaccattggataaggaactagagcggtggcaggaggaaccctatgaaaaatgtacaaagcatccggaaaatttattggtacaaggaacgcatgggaagatgttgcggtctaaatcagaagcaattattgacagagcactatatcaaaacaaaataccattccactatgaagaaaaactgattttggatggaataatgttatatccggacttcgtgatgcgacatccctttacgggacaatatttctattgggagcactttgggatgatggataatccggattattgcaatcatgcttgtgacaaaataaagctatattgccgacatggtatcattccttcggtaaatctgattctcacctatgaaacaaagcagtgtcctctgaatgcagacaaagtagaaatgatcttgcaggaatattttggttgtagcaaatgggatgccgtggtaggataaaacatatcagtaatagtaaaataagggggatatgcaaaatgaagcacctgatcattgtaaaatttaaagagaatatatggaaccgggaggatgcggcgagcagggagatgcttgcggacatcaagaagatcttcaatcggacgaagcagatagaaggcgttcatacggtgaacatttatgaaaatgtgacgccgagaccgaaccgtcatgacctgatgatcgaaatggagatggatccggaggcgctgcctgtgtacgatgcttctgcgacccatcaggaatggaaggcaaggtacgggaagtatattcagactaagaccatttttgattacgaataaaagtatataattttatgaaatggtgaaaaccagaataaaagaaaatcagcatgaaagaataccaacatctgatcggcaggataatcattgtggcagctattgtgattgcggaagattgaccgcacatgcgctggagcagctggatggaagtattggtgcaggttttaatacgattgcaagtcagatctattaacagatgacagaagggctggaggcagctatggaagaatttgatatcagagaagctacgccggaagatgcggagaagatcatcgcatatttagcgcaggtaggtggagagacagattatctgtcctttggaaaagaagggcttcctatttcgacagaagaggaagagaaatttatacagaatataaataaggaggaacattccgttctctatgtagtatggaaaaatggagagattatcggagatgccagtctaagcggattttccagaaggatgagccaccgcgccgaattcggaatctctgtggtcaagtcggaatgggggcagggaattggcagtgctctattgcaaaagattattgattatgcaaaagaacatacgatagaactgatcaatctggaagttagaagcgataatatacgagctattcatgtctatgagaaatatggcttccggaaaatcgggacctcgccggcgtattttaagatcgacggggaatactacgattttgatctgatggtattagatcttagataggaaagctacaaagaaacacaaaggagccataacaccatggaattttttgacatcgtagatgaaaaaggcattcccacaggggagagcatagaacgcacacaggcacataaaaagggtatccgtcacagaactgcccatatctggatcataagagaacaggatgggaaggcacagttgttattgcagaaacgctctgcagaaaaagacagctttccggggaggttcgatacttcttccgccggacatattcaggcgggggacgagccggaggaatctgcaatacgggaactttacgaagaactgggaatccaggcatctaaagaggagctgcaattcgccggatgctttgatattcaatacgaaaaggaatttcatggaaaaatgtttcgggacaacgaggttgcattcgtctatatgtacactaagccggtagatgttgcgaagcttatcctgcaaaaagaggaagtggagagtgtggagtggttcgatatggaggaactggatgccgcattgcagccgcctagagatcagcgattctgcgttcccatggagggattccaaatcgcgaaacaatggctggagagcagaaaataaaggctgatcacttcgcatagatagtagagccagagaaggagatcgctgagacgctgatggaggcagaagaattccgacaggcagagagaagataggtatgcgcaggtgtacctggcaacagataagtaaagcatataagtggacaataaaaaagaactgtcttcctgggaagccagttctttttattgtcaatatagcttaatatctgatgaaattacttcacagtcacggaagtgatgtgagggttcacaccttcgtaccagtacaggaaaccttccatatcgatggtgtcaccgatctttaagttctttacagcgttgtaaacatcggtggtgttgtcgcacagataagactcaacggtgaaggtataggtctgaccattcagagaaacgttgaagtacaggtcgttaccgtcttcaccggaaccatcgtagttgtacaggaaagcaacatcattgccggtggcatcctggctggcttctacagtcatacccttgaaagctacgaactggttctgatagttgatcagatcatcagtacctaacagatcggtcacatcggtaacgggagcgatgtagctgccctcttcgatctcgaaggtagcaccttcagcgatctctacttcaccggaccactcggtcttataaccggttactttgatcttggtaccgggtaccagcttagcataatcctcttcggaacatacggaattgtagatgaagtaagcaccatcctgatcctgggtgtacagggtagccttatcttcccaccaggactgtttcgcctgaacataagcctcgatcacaacttcggaatcgagatcagcagccatgtactcttcgtaggtcataacaccctcggacttctcatcagcaacagcttcagcagcctcggtagaagcttccgtagcagcggcttcggtagtagcggcttcggtagtagcagcctcggtggtggcagcagcggtagattcagcagcaacgtctgcattgctgtttccacatgcagcgagagacagaaccagagccatagccatggttaatgcaagtgtcttctttttcataataatcctccattcctgcgcttgtggcgcatatgggtctgtgcagatacacagacatctcctcaatttatccggcgcattcagacaccgaacagttccattatacctgaaatgcaagataaatcaagattttttgcaaaaagagccccatgcgcaggataataccaccagatattatcttacgaatggggctgaaaaattacttctttctgttttttaaatattcccgccctacatacaggaggatcagaacccaggtgactgcaagtgtgcttaacaggatcacggaagcccggggcatggcacccagttcctttttgccgaaggaggcatcacttccctgaccgagacggtacaggctttctacatcgctgtaaagcttttgcatgtaggtatcatccacagtctcttttctgcgggtggacttcaccacgttttcaatcaactgtccggaggcatcacgtaaggatgcggaaccgttaaataccggtgtgacgaaggtgctgtctacgttgtcaagcaacagtttggaagcctcaattttcaccgcataatgcgtactgttatccgcaccgcattcgaacagatactcctgatactctgcggagttctgtgccttagaggttacaggtacatagccttctgtctcggaataagcaatctgcacatcgttggtgagcagatactgggcaaacagccaggatgccagtacttcctgggagtctgatttattgaagacgcagacggaaggaccctgggagatcatttcgggatgctccgggtcaaactggggaatcatccgcacggcggtctcaaactgcaccagagagtcctcgctgatatccgacagcggagcgtccgtacccatccaggtggctccggcggtggaatcaatggcaaaaatacattgcccggcattcaggaagttcgcaggataaccggagatcttgaaggtggaaaaggcaccgctttttacatgtccggcaataccatacaggagatccgtggtagtatcgttgaaaagttcaatgctgccgtcagccgtggaatatcccgcattcttttgctttaacatctggatcatcatgttgtcggtggacttgtagataaatgggatcagtacattctgcccgttgaccacataggtgccgtccgcattttgggcggtggcagcctcggagacttcccagatgaagtcccaggtcagtacatccggcagagtatatccaagattttccacgtaggtcttattcacgtagcaggcctcggtggaacgcatgtaaggaacggcatagtaatgaccgtcgatggagcattcattcaaaaactgaggaatgacttcttctctggcaggaccgtcataggcaagatctgtgccgcccagaccgtatttttcatcggcaaacaggtcatccagaggaactacagtattctgcccggtgaggtaggtggcaatgtgatccgggtaggtgatacagacattgggtgtcgtattggtggaaatattggtaatgacatcgttgtaaattttgccgtaatccgtgtatagattcaggttcaccgtgatattgggatacagggcttcaaaatccgcaatggctttcttgtagatttccgtctgggttttgttggtatcatttttcgcccagaaggtgatctcatagttcctggaagtatcgaactcctcaggaacagtgaattccggcaggcctttcgaaccatggcagccggtcagggacagagacagagtgcccacggcacataataatgccagttttttgctgaatcgactcatcctttggtacctcctctggcaacgcctgccatgacttttttacggaatacgaggaacaacaccaccagagggacggaaatcacgaccaccgcagccatcatggcggggatgttctctctgccgaaaccattctcacggatctcctggatgccgttggataccagatagtaatccggatcatcggtgatcagtctgggccacacataggagttccagcattcaataacctttaggatcacgatggtgatcagcgtgggcttgcagatgggcaccatgaccttgcgcagatatcgcagatcggaagtaccgtctaccttggcggcataatacagctcgtccggaatctgtgcgaaattctcccgcagcagatagatataaaatacgctggtcacggaaggcaggatcagaccggtgaaggtattgcgcagatccagattcgtgatggtggtgaaattcgtaatgaccaccagttcattgggaatcatcatcagagataaaaataacgtaaagatcagatcttttccggcaaagttcaaccttgcaaaagcgaaggctgccagggtgatgaccaccagcatgatggcagtggtgaccacggtgaaaaacaaagtgttccacaggtatcttcccagagaaacagtggtaaaagcgtccacgtagttctgcaaagtgggagacagggtgaaaaacttcggaatatattctgcattataggagccgtagctttttacggaggtcagtaccatccagtaaaaggggaacagtacgatcagtgcccacagacacagaaaaaggtagacgatcccattgcggatattgccgcggatccgggtgcgtttctcgattttttcataatcagatgtaacatcagacatcacaaagacctcctttcttatacatagtggacatgttttttgctgaccagcagattgatgcaggtgatggtcaggacgatggcaaacagcaggatcgccgctgcggaagcataggaaggatagccgccgctgtcaccgtagagcatatcgtagacgtagccgacaatggtattcatctctgcggcatttaagttcgtgccgaacagcgccacggcatcactgtaggctttgaatgcgccgataaagccggtgatgatcaggtagaataccatgggggagatcatgggcagtgtgatcttggtgaacatccggaaacgggaagtgccgtccactcttgccgcattgtagtacatggggttcacactggcgagagcactggtcaggatcagaatcttaaaaggcataacgatccagatggtgtaaaagcacagcacgaacattttcgcccagtagggtccgtcgatgaaatccacggagctgccgccgaaaaactggatcagcagattgatcagaccgtcggagtaaggggtctttttgaaaagaatcatgaagaccagaccgaccgccagagtattggttacgtagggcaggaaaaatatggtctggaacagatcccgcagcggtttgacggagcttaaggcagcggagatcaaaagcgccagtccggtggagaccggaacggtgatgatgaccagaatgaaggtatttttcaatgcctgtaaaaagtacggatcgtggagcacataggagtaattgtacatgcctacgccataaaaggtctgggatgcggaattgtaaccctcttcaaaggagtacacgaatacgtcgatcagaggatagatcataaaagcacccagaaacaggaatgccggcaatagatagagccaggctttcagattttgtttttccataagaaacctcaattctttctgcagcccatgaatagcgccggactacagaatcggataaaatattaaaagcggatgcgttcttcggtgtcggtgcaaaagaggaatacttttgcgggttttaaggcgaaatgcacttttccggtgggaagagatttcccttcgtcggcatcaataatggaacggatggtagcgttctgggacttttcatgggtggaaacaatgctcacatcccggcccatgacctccagacgcaccagatcgcaggagagcggtccgtcctcttttaatacaaaaccttccggacgaatgccgacatgcacagtctgatccgctaccccgggagcaggcagaacagcttcggagccgatgtataactgtccgctcttcacttcaccgtcaaagacattgatgggaggtgtgccgaggaacttcgcaacgaacaggttcacgggatcgtcgtatacgttctggggcttgccgatctgctgcacgataccgtccttcatcacgacgatcatatcggagatgctcatggcttcgtcctgatcgtgggtaacgaagatggtggtgatctgcgtctcctgctggatccggcggatctcttctctggtctggagacggagtctggcatccagattggagaggggctcgtccaaaagaagaacgcgaggcagcttgactaaggctctggcgatggccacacgctgctgctgaccgccggagagctcgttgggcttgcgctctaacaggtggtcgatttgtaccagctttgccgcttccaacacgcgcttgctcatctcttctttggaaagcttgtcggcacccttcagattctctaaggggaactgaatatttttctccacagtgaggtgggggtagagggcatagttctggaacaccatgccgacaccgcggttctcgggcggaagtccggtgacatcatcttctccgaaaaagatcttgccctcggtgggcttcagcagaccgcagatcagattcagtgccgtacttttgccacagccagagggacctaaaagtccgatcagcttgccgtcggggatctcgaagtcgaagtcattcacggcaatgacatcctcacggttcttcctgccgcggacaggaccgcgggcggggaatttcttggtcagatgctgtaatacgattttcatgtgtatatttcctttcttaatatatatgatacaagggtcaaaaggtttaagcccacatgagcttgctcataggtgggcgaaaaaacttgggacccgccccgatatg

SEQ ID NO: 5643 - DNA, 396 bp, Unknown
  gut microbiota DNA sequence
gccaggagttgtaaataaaagccggtacatagaataaattctaataccggcttttgtctttttcgtgctttcctgtaattatctcttcagagtaactacaactcttctaaagggctcttctccctcactatgagtagtaacatatttatcattctgcagtgcggaatgaataattcttctctcataaggattcataggctccagagatatgcttctcttggttctcttaaccttatatgcaatgttcttggcaagattctcaagagtttcttttctgcgctgacgatagttctctgtatcaacctttacatgaatgtactcttcagattctttattgactaccagagataccagatactgtaaggaatccagtgtctgtcctctcttaccgatcag

SEQ ID NO: 5644 - DNA, 3512 bp, Unknown
  gut microbiota DNA sequence
gtgacagttactgttgctccgattatagaattacttttaacccgtaaatacttttctatcaatttcggctgtattaacggatatgtccagttctcaggcaaatcatccataagcacaactttctccatttcgctatgtaattctgttgcaaactctgttatctctgcaaaacaaagcagtccaaatgtttctttaccggtatcatttactctagtcttacctgtcaccgaatatacacatattggttttatctcaaatttgatagctccagtctcttcctgcaactccctttttgctgtttcaaaaatatcctccccagcttctctatgccctcccggcacttcatatgtatctctttctttatgtttgcagaaaacccacttgccgttactctgtgagataattactgcaaatttcaatagttcatcattaactgtatcataaaattttacttccatcacatttttccttcccattccagcataaactcatacagaaattcctgcattacaaccagtctatgttctgccagtttctttccctcagtcgtattcatcatgtctttcaacaaaagcaacttttcatagaaatgattaatgcttgtagaatcttgattattccgatactcttctttattcattcccattttaggttttatttccggatcataaatctttcttcccctactaccaccatatgcgaatgttctggcaattccaatagctcctatagcatcaagtcggtctgcatcctgcacacattttccttctatggtatcaggtacgactgaatcagttcctgcaaatgaaacctcatctataattttgcataccgcctctatctttttaccatctattttgttaattgtcataaaatcaactgcatttttcttggtaacataagtgtccggagaaagcttaatatcgtcaacatcatgtaacagagccgccaactgcactattttaacatctgcattttcctgttttgcgattttagtagccagtttatatactcgtattgtatgataatagtcatgaccactactgtctcccgaaaatataccttgtataaatctcttttcattatctgtcatattttctcctaatcaacctaacaaagcaatatattgatttatgaaagtcattactccacccacaaatagagccaacctagagccattcgataaaacaaatgccggaaacccgcataaatacaggctttcggcattttaatccgttattcaaactcggcaaatccgaagatattactaaatgtatttgtttagtttccatctcttttctgccgttattttatctctgttacatatattattttggctcactgattttctgttgctaatttgttgccataaaatctatattatcctgattttggagataccctgatttcaaaagggaagtctattttccctttgaaaagcacctcgctctccccctactgtattttttctttagaatggagagtcagggagttgccttttttgatattggttgaaccatcgcattagcttcgcgttgtttcgtattccaatcacatatttcaaaattttcattgtaccatcttatattggacattccatatacatttcccatttttaatccttgataatatgcttgtccatctacaatcgttccatgatacatgccattgaatttgcttccattatatagaccaactagttgcggaatccctcctgtatgcttgtccttgacattttttacaatatcacaaaagcaatggaaataatttctacttgtgctttcgttatttccatttttgaacctcaaaaagttctcatcatattcttttttcccacttccatctgaaaaaaggttctttgacttcttaaaatcagtatgtatttttatgttctcccatattattccattccaaaagtatacgttcgcatcaaatattctttttttatttcgccctatatgatatattttaataattccattattaagtttgtatgctgaatgtgctcttttgatttcattaaaaataatctcacttctatcttgataatccatatctgctgataacagcattcccacatcgcacatacttgttaagcgagttaatatctgatatgtaaataatgtttctccacaataccctaatatatcaggagtattttttaatgcaaatgtcttttggctataatcataaaagttcctattatcagaaattctactatcactggctatatatgcagaacatgggcctctctgatcacaagccaaccatcctacaattaatgtcatttttactaattcctctttgcaaatccattctaaaaatccataaactttatgaacttttagagtggatttgcaccactatcttttatcatctgataaacgtcttactcttagaccactagaaccatgttcagtattattttatcactcttgcccccattatacaacatatttccaacttgagcacttgtcccatcacgttttttatactatactgatatcatcaaatcgaaagaaggtactctcatgacaaaacaggaaatcagcgagatcaaaaagctgttcaccccgaaaaactgctccatcacaagaatctgcggatgctatgtggatggagaaaaaaataaaaagacagaattaaagcaggcctttctggcactgccggaggaagagatgttcaagtacttcgagattctgcggaagagtctgtccggcaccatcggcaaaaatctgctgaatctggaattcccgttaaagagtgaaacggagggcggcacgcaggaattcctgctgcgtctgcgagacagcaggctgaaggacgatgcattgcttgagcagttctatgaccgtatcatcgagtcttatgaatatgtgggcaattatctgatcctgctgatccacgatgcctacgatgtaccgggtcgtaccagagacggcatcgaaatggaggacgcttccgacgaagtctatgactatatccttacctgcatctgccccgtggatctgtccaagccgggattgagctataacgctgtggaaaataccttccagaaccgtatccgcgactgggtggtaggtatgccggatgcagccttcctgttccccgcattcaatgaccgcagcacggacctgcacagcactctgtactattccaaagatgcggaggaattaaaggagaacttcgtagatctgatgttaggctgtcctcttcctctgtccgcaggcggtcagaaggaaaccttccagtcactggtggaggagactctgggcgatagctgtgatatcgagacggtgaaaaatatccacgagaaaatgaatgagattgcccaggaacataaagaagatcccgagcctgtggtattagataaaaatgaagtaaaaaccatttttgccagcagtggtgtagccaatgaccgcatggaggtcttcgaccagtgtttcgatgccactgccggtgaagccacctccctcatgatgaccaatgtctacaatccccgcagctttgag

SEQ ID NO: 5645 - DNA, 522 bp, Unknown
  gut microbiota DNA sequence
cgtccgcacaggccattttcgccgccatggtcttggcctgcaccttgtcctgcacccggtagctgcccatcacgatggcagcggataccgggatgacccacagcgctgccagcgccatccgtccgtcaaaggcgaacagactcagggcaatgagcacggtagagatgagggcgccgaacagaccggggatgaagtgggagcagtccttttccaacacctcgcagtctgccatgatggtgctggtcaggtcggcaaggtctcgcttgccgaaaaaggacagaggcagcttccgcagccgctccgcaagggtcaggcggcgggtgccgctctctttataggtcgtaaaatatgtgccgttgtactggaaccatgtggtcagcaggatcagcgcaaagcaagctgcacaccccaacagataaaaggcggctctcccgctcgcggagcctgccagcaaatcttttaccagaagatacagcagcccggtgggcagcatgaacgccatgttttggaacgcacaggcca

SEQ ID NO: 5646 - DNA, 1884 bp, Unknown
  gut microbiota DNA sequence
aaagtgaacagaatgattgccaatccataattatgcaccagataatagcaaaagtacattacatatcccagtgcttctgatagtattcgcattttaattaaccatgcctttctcaaaatctgcaaagtttgggccgcaggcacaaatttgcgtgtgaaatttattttcacactgttctccttttagtcaatagtactaattataacataatcgtatgttttttcaacatggaaagcaattttccgttcaaaaaacaggcagaaccctctgttattataacagcaaatttctgcctgcttccctatttttctgtattctttgttctatttccgttttattgcgtattgtccgttgtttcttcctctggctttttatagaatgcaaaatcattcttgccgttcttcttcacctgatacatggcatcatccgcacacacgatcagctgttccagattatccgtatccttaggataacttgcaataccaatgctgccgccgatcttccgcttcgtaccgcagagcaccacatcctttgtgaatacctgtctgcactggtacgctgtcttctccaccagcatattctggctgctgcgcaggatcagaataaattcatctccggcgaaacggtatgatgtcagtatctgggactgcatctctttcaggcggtttgccacctgctgcagcgcttcgtctcctgccgtatgtccgtaagtgtcgttgatcttcttgaaattatcaatatccagcatcatgacggtacagggaaccttcgcatcgatcatctgctccagatccttcatgaatttgctgcggttcggaagtcccgtcaggaagtcatgctgtgctgccgcctccataattgcacgtgcctgctccagttcctgcagcagctttcgtctgcggtaattatcgaagcacacccagcagataataacattgagtgcagtgataagtataagtgccggtatcaaagcctctcggttcctgacaaaaaaattctcccgatgatttacaaattcggtatctttgggaaactgtgatgcctccagcccgaacttccgcatgacgtcttcatctacacaataaatgttgggactgtcctttaccacattgatctctgcactgtcggtaccatttgcgatatccatggccatctgtgctgcgatctctccggacttatacatggataccacattaccgcccagcagtccgtcaccgattccggcctccaccatgcggtaaaccggtactttggcataatccacaatcatacacagcgcctggtcactggtatattgtttgccactgccgtccttagacataacgatatagatcagtatcgtcttatcatccaccttactgatagcctgctgcaatctggctgtttccagttccgcagcattgatctcagaaaattccagctccggatagttttccgctgagttgtaaaaattcttccgttctgcatctgcggtcactgaatcatccagtatcgccactactttatcggctgtcggattcaccttcagcgccatgtctatgttcttctctacggacagtttttcaataattcccgtcacaagaggattctctgccgctttcatggcatattcttcatcgttcacaccttcgaagacaaccggtatctccgggaacagttcttcccggtattccatggcaaactgcagcgccgcatcatctcccacgatcaccacatcatagggatccgtattctccagatggtatttcagcatatcatgaaacatattcagccactcatctgtccgaaaacgcttcgtgtccataaattcatagtcgatagtggtattctcgtccacccccgccttgattccttcgatctgcgtctggactgtgtcccagccat

SEQ ID NO: 5647 - DNA, 1209 bp, Unknown
  gut microbiota DNA sequence
agtatggggataaatgttaaattatagagtaaatattttagaaagataaaacctctataatgaggcgatggtaggtgcacatgcagaaagaagagacaacaggagaccatcaagaatttgatgagatgtaccgtaggacacaggcggaaatatacaagtttatccgctacagggtggcagacaaggaactggcaaaggatgtcctgcaagaaacgtattatgttgcgtataaaaagtgggatattctctgtgaacattccaatccaatgggatggctgatcaatactgccaagaataaaatacgtgaactgaataagtcattgaagaagatagaatgtgaagtcggcctggatgccgacgaatatacattcacggaagacggttatggaaaatcagaacttgatctcgtaataacgaaaggcctgacggaagaggagaaaaacagatttcacaaatattttcttcatggttattcaatttctgagctggcacagcttgagaaaatatccgagaacaatatgagtgtcaggatcagcagattgagaagcaagatagcccaaaacatacccgacgagtccggtatcgacaaaaaatacaaaaaatctgtatgaattgacaaaaaagaaccatgtacttaacgagggaccaatattacaccagataaggatatgcagaagggaaaggaattggaattaaaatgaagaagcaggataacgaaagcctgattcaggagcttaccaagcggttggactggtacattatggaagcatcagatgaagagtttgatgcggatgaagtacagacattaatgaaactgctggacaacctgaaaacagaggaagacaatatagaagatgaattgcctgtggaagaggcattggatgatttctggaaacattgtgaggaaagggaagaagaggagcgcctgttgcttggcaccgaagaagagaaggacaaaagtgaacctgttgcagagaaagaggaggacaagcccagggagggtaagcttcataaagtgctctggtactttcacagacgcagatttgtagtggtgacagtagcgctgcttgtcgtaatgatacttggcggttcctggcaggtagttgccaatgcggagaagcatggaggtttcttctggtggatggataagaatgaggaaggaactactatgattacggcaccggaaggtgtggaggattttgtgaattt

SEQ ID NO: 5648 - DNA, 338 bp, Unknown
  gut microbiota DNA sequence
gggagaaattccaatcgaacccggagatagctggttctcctcgaaatagctttagggctagcctcgatggagtcttacggaggtagagcactgaatttctaagggggcgtcaaagcttaccaagggatatcaaactccgaatgccgtaaagatgctcatcgggagtcagactgcacgagataagttgggcagtcaaaagggaaagagcccagacctgctgctaaggtcccaaagtacgtgttaagtggaaaaggatgtgggatttcgaatacaactaggatgttggctcagaagcagccacacattcaaagagtgcgtaatagctcactagtcgagag

SEQ ID NO: 5649 - DNA, 2485 bp, Unknown
  gut microbiota DNA sequence
atatgatcactgccggaaggtaatgttcctccactgcctccagatactttcctatgtatttgagactgagcggcagacttaccgtcaccagtatccccgcatagaacatgaaatccagcaggtacttcgtcccctttgccagagaaaacttcctctcccgcagctccttttccgacaactctctcttctccataatgaatacctctttccttcttggtagccttaacatatcactctatgatacgaatgtcaatataattttattgatattcgataaatttatattgaatctcatatatcacagagcagatatagggtaaatagggaattattaacataaatgagctgaattggaatccgagcttccagtttgcaagtttaagttctgatttagctaatcgcttgcataagtaaattctggcaaatcaaaatatcatgatttttatggaagttagttttgcaaagttcttcaaaactggaatttactattagaaacaagttgttttatgcttcatatgctgatattctttttttgagatcttaatcctctgaaaaaagagtcacgttaagcggaggtcgaattttatttcttttttcgcaagattaaattccacccctcattcggttcagtattttttccgaatggcgctacgtttcttattttttcagtaatagaggtgtaaggttaatctcattagcgggaatggattttattcctaacttgtcaagaatatccccgccattaatgaagctgaacaactggtgtgccgactggttattcagcttttttctgttatatgagttgatatgactcatcataagattgatatcatcctgagttaagttatcaaaagaggttttcttcggaagcacacgacgaatcatctcatgtgtaacttcacaaccacctttttgatcagaacgctgtggatcacaataaaagatatgtgttctgcgaccattgcccttattaaattcgattgccagcgggttagtaaattcacttcctctgtcggtcaaaatcacctggaagaggctagtgaatacttcatgtcctaactgttcatacaaccagtcaaatatttctgtaactgacttggcggtattgttatcacggataaaagcaagcattaaactactatttctaaagtatatggtcaacaagactttaccgcctttgcgaccttctactgaatccatttccactaccggaatatcaggattcgcagcaagataagcttcaaaatcctcgtaagtgcgtcctacatgacactgcttgtctactcttacaggcttcttatgtgagcgggtacgataacggacctttcttggaagatcaacgttatctacagataaaagccctgcatcaatgtagttataaatagtcttttcatcaagcatgatatcatctgcattattgacacatatcatgtgaatagactggcctaacttaacaagcggtgaaacaatagcatctacacgctttaattcttccggtgtaattgctattccttgacgactttctgagcgagtagtctcataattcttctgagctgatttggcagaataaatatgcttctccagcttacaggattgccgttggatacagccgttgcaaacgtatggtggtttcttcagtttgttacaaaccaatacctcaaactgcttgcaatgctcgtagcactttacacgaggacatctcttgcagctttttgaatactgtagtttgcactttgaacatgctgttccgtattcatcacaggtacttcgcttgctgcagggattgaaggaatctttacgtacagtctgactatggagtctgacttcttttgagatagtagaagggtccttgccaagttccctacctatctcagtaaatgaagctcgttctcttatgcgaacttctattgtggctctttcatcaagaaccagatgtgcattcttagccatggtattctccttggataacgccatccggactctattgctgagccacaactataactagatatcaagaggtttgcaacactaacttctaggatatattttgcaatactaagttccagtttttgggtgaatggactggaatttaattttccaattcaccttaacataaatgaaaataattgatatagacattctcagtgcttttttttacaatgaaaatagtaaaaacgaaaaggaggatttttatggaatccgttttactgtccgcacgctgtactgccaacaccgcaactgtgttctggaataagccggaaaatgccaatgccgacacagtatatgaagtttctctcgatggtggacattctgttcacacaaatcggacacattatacattcacagaattgatacccaatactgaatattgtgttactgtctacaatatcggcagtatccgcatctgtacctcacctgcacggcaccgcatctatgtaacggaagaaccctacaatgccgtgggtgatggaaaagcgctgaatac

SEQ ID NO: 5650 - DNA, 11919 bp, Unknown
  gut microbiota DNA sequence
cataccacggggatcacatttcggttatcataaagctgctctgcctgatgatagatcagggcatattcatcttccttcggcaggctgggattcgctgtcagggtaaccacaatacgcttgttacgctctgctaatgcttcctctgcagcctcttcctgcagccgttctgtctcacttaaggcatcctcgatcatccattttgcatattgttccgcccgttcaaccggcacataaatctctccacctaaggatacgctgtcccccagatccagatatttctccagattgccggaggaaagggcttcctgctccgctgccgttatgctttccacatcagacccggtattgacagatggttcaagctccatgatatcagagctttcagagcttccgtaactttcatagctatcagaggcagaggaagtttctgtgttgatataggtgttatcagtcctatgctgcacctgggactccagccggtaagtcagatcatttgtcttgtctacataatcctcgttcttccattctcccagaaattcatccgtatccagatcgtagctctccacctttacccagatgttccgctgcctgcaataagcttccatggtctgcaagctctcattctcataccagtcgcgtatccgatacagatcctgattgacctgccggtacaacagctgatcatgaataaacatcattttgccggaggaatacgctccactgtctgcaagcatgcaggtaccatagagtccaagcacccccgcaattgcggcagcgatcatcaggacaaatgccatgatctttgccagtgtgctgcccaacaggctgtttccctgtgccggtgcattcttttttttctcggctttttctctttttttccgttcccttttattctctgacaatgctggttctaccgtcgtactcactgtttcttccaccggatttgccactctgtcctgttctgtgctcctgctgttttcttccatgttatccatattcctgtctccttatttccccaagctgctccgctctcctgcctgctcttatccctgcttctcacatttgtatccctgtccccagactacttttaagtatctgggttctgccggattgatttccaacttttcccgtaaatgccggatatgtaccgccacggtattctcgctgcccagaggcaggtcgttccagattctggtatagatctccttcggggaaaatacctgtcccggattctggatcagaagctttaagatctcgtactccgtgggcgtcagcgccaccggctcgccgtccagcatcacgcttttctccttgtcatccagttcgataccaccgactcttatcacatccggccggacagtacctccacccagctgcatatagcgacgcagttgggatttgactctggcggatacttcgatgggattaaacggcttcgtgatatagtcatccgctcctaccgtaagtcccagtaccttgtcggaatcctcacccttggctgtcagcaggatcaccgggacattactcttctcccggatcctgatcatcgcctgtatgccgtccagcttcggcatcataatatccatcagtaccagatgcacctcattcgtctctaccatatgtacggcttcctcgccgtcaaaagcctccagaaaatgataattggtgtcatttaagtatatctttaacgcgtttacgatatccttctcatcatcacagatcaatatattgtacatactctccctcatttctgtgccggtggctgcagcccggacacttcctgcgcaaggagctttcccttacgctgccagaacatctgctttgtccacagatgtcccgctgatgaatttattgtagcagataacagattaataaaaaacaggaaaaacctttaaaactttattaagatgactttacataaaaacaccctctgccattcccagaagagcaaaggcaaagggtgtggacaacacatgttgaaaagtgaacagtgagcagatcaaatagccggtgaggccgaagaaaactgcaagtgcccggggatccctggttgcggagattcgaaggttccggaatgcggtgaggaagattccaccgtaggcaatgactcccagaattccctgctgtaccagaagagtcagccattcgttgtgggcattggaatagatattgttgtccagaagtccccggttgatccagtccatggcgtcactgccccattgatagagcgcataatagaagctgtcagggcccataccgaatatctgaaacaggagtccctcttttccgtaagtaagaatcgtgaccttccacagtgccagccggccgttggcaacttccgacactttatcactgccgggcagatatcccgccaccagcagacagccaagaagcagtgccgccagcgtcaccgcaaccgcaagccccacaaaggtccgaaaaacccggccgctctccagccggtcacttctctcctgtctctcccgcagctgcaaaatcagatataccgccacttccacaacaaacaccacataccaggccggggtaaaaaagagtcttttttcggcatcccctgccagcaccaggccggtcagatgtaacagcaaaaacatcctgaccataaataccgaaagcggtaaaagcatcaggatctccaacgcccgcagcagcaggcctctcttccgcagagaaagcaacagtaacagcaggcttaatccgcaggctgccagtatagctgtagtactgttggaagtaatagccgatgcaaaaaacacaaagctcccaatcatccccagtactctgacctgccgttttcccataaaagctgctgccagagagatacctgccgtcacactgatatagcctgcataccagttgttgttaccgatggtggacaacagctgggtccggttccattctccgttttccattccgcggaaagttcccagcacatcaatgtccagacggttcagcagcccgatcagtgtcacgattcctgccgtaatcccggcgatccaccagatacttctgctgccgtcataataccgggataccgcaaaatagatccccaccagcaatccctgggtcaccagccccatataccagccgggataccctaaaaggacatcctccctgcagggactgattccataagaaaagattgcagacaccagatacaacagcataaacacatccgttttcttccacgtccgtttcgttgtccgttctccccggatcccctgccacagcacagccagcaccacaaaagcccccagcaccagcgtagtattccggaaaaacaaatattttgcatttccgatcatcaccagcttgttctgcatatacagcggtaaaccggcaaaaagaatcaccagatacccataaaccagcatactcacggtctcttttgtattttgttcctgtttcttcatagcttacattatccttcagactgaaaaacaaggcacccctcattgactgaagagtgccttatatttcccggttattttatttccttacggttacttatttgccgtaacgcatctgcaggtacagaggaccataccattcgatagcattgtcttctgccttaccggcagggatggttaccgtatactcgttgccttcgaaggtgtactccagctccagagctaccgtctgcttcttgtacagagcctgcatgatatcgttgggcagagcattgatattcttgtctctgctgatcttaacggtagcaccgtccttggcattagcgatctcgcttgccacattgtcacgatatcttccaaatgcgttgtcagtaccttcagcgccggtagtctcaacttctgcgatggcaaaagtggagaagtgatctactagaaaatatacagaatctctgccgctggtctcatctacataccattccggatcaataatctcatctatgctgccatctgctgcgaaatgataaactactactttcgcggggtccattcccgcaggaacagatactccgatacctaccggaacgttcactgcagcaccaactttccgtccttctgcattaatcaggctgaagtccaaataacatatagatgtgacaccagaaacggaaggtttgattgtaggagcatccacctgtaactcagcgcaatcattaagagctactccttcactggatacccaccactcatctgaatattctttattaaaatcgtctgtaaagttaggtttagaaatctggattccttttgcatctgcatattcctgttccagacggccatacaattcctctctaagatcataactctgccacaacgcggccctcaaagtttggattccaatgttattcttcaaaatagctactgcctcgtctgcgctggacacatctgtaatgctaatgttatcaatgctaaccttcaccttatctacatctacaacaggtgcaggtgtcggtgccaccgtattattctcacttgctacagatacggtagacagtgcactgctgccgaaaggaactgcaaatactgcaaatgcaatggctgcggcaatgattaatttctttttcattatctcattcctcctaagtataatgttatggattttatttttaccgctatttagtatactcccccccgttatattgtcaatcctatttcttcctatttttcctttttttctcattttccatgtgcaaaaaaagcatgcccttccgcccccctaaaaacgggcatcacagacctgcttttttctgcttttttatttatttttcttattagagtgttctttcagttcttccagggcttccttgaatttctcagagctcatggtagggttggaacggatcatgtcacgctggaagaaatctcttaagctgctgacattctctctgtctgccacgcttctggtgtacttctgtttcagctccagcacttcattcttcacgctgtccagatactgactgggagatttctgggaagaagtgcggatgctttccagcttctgctcaatactggacttcagatcctctactctcgtagtaatcccctccgtaaagtcttccttcttctgggccagactctcgctgaatccctccttgcggttctccagatcctcactggtcacagcaataataacatccagccgtttctggatccgcagcatatcttcttttgccttctccatcttctccagtacatcccgcagatccagggctgccttgaaggacaatgcgaaatccgcaccgatcagcgccgtcagcagcagtgtcacaggagtgaggatgctgtccggaatggacaataccagatgttcaatgggcttatggataaactccgtcatcaggatcgtcagaccaccccatgccagcgaggaccccaggcagatatgtccctggaaattgaacttattcttggaatagtcccagtatctgactttaaataatgcctccatggtcacgcctgtgacatactccagcaccgtagccccgatacatccggcgatgtaaaccagcaccagattgtcctggaacggcatggacaccactaacatcatgatggcgccgctgccgtacagcggcaggaacggtcctcgcatgaatcccctattaactaattttctgctctttatggatacatatgtggactcaaaacaccagccgaaaaagcaataaaaataaaagaaaaatagccattggatcgcagtataatgatacactgtttaacctccttcacgtcttcgttttttccttacgagcaaggcaactgtcatctcatgaccgaaccgctacggatatacctcagcctctatggcaagcttccccttcctcgtggcatggggttctccacttatgcggaatttaccgtagcctctggcatttaccacatcccccgtctccaggggcttggaattattttcacacagcctgccgttcacatatacctttcccgcccggaacagctccaggcagtcacttctggatttattatataccttggaaatgacagcatcaacacgtggacttgccacctgaatgacctgtgttaacggttcttcccgcggtacttctgccgccgcatccaccacctcacacttcacgtgggtgtggcggatctgctccagattgtcacagataaattctgcaatggtatccagacagaacaaaaatgcttcgccctctcccggcaggatatcaccgatggtgctgcgttcaatacccaggttcatcagtgcccccagataatccctgtgggacagcttgtctgcaaatttcgcggatagaggtctgatccggatacagcagataggaaagggctgttcatagcccagctccgcctcactgccgaagcgaaggagcttccgctctgcctcttccctgccgccgtataaggtgatccctgcgaacttcacttcccgttccacctgccacagggcatcctgctccgccagtcccaagaatccggtaaatgtgtactggttctggttgtaggatttgtctgccagttcacggatccggtttttcagctgttgtatttctttttcattttccacggacattcccgtacatccttcctactgttctcactttgcttttgcaaatgttaccctgtacacattatcccagtgccacatccaacatcatcatcaatgcaaaaccaatcgcaaaggcaatggttcccagattcgaatgctctccctcactggcttccggaatcagttcctccacgaccacatagatcatggctccggctgcaaaagccagcatataaggtaaaatgggtgtcacaatgcttgccagtgcaatggccagaatcgctcccaccggttccactgctcccgacaatacgcctaaagcaaaggactttcctctcttatttccttcactccgaagaggcagggaaataatggctccctccgggaaattctgaatggcgataccgatggccagcgtcagggctcccgccatcgtaaccgttccgtcaccactcagtacgccggcaaaaatagcaccacacgccgcaccctcggggaaattatgaatggtcacagctaacatcagcatagccgtacggttcagactgctcttatggccttccggtgcatcgcttcccacatgcagatggggtaccatgctatcgatgaacaacaaaaaaacaataccgatcaggaatccgatcactgcgggaagaaatgcaagcttccccatctcttcgcacatatccatggccggtatcagcaaagaccacaccgaagctgccaccatgacaccggcagcgaatccggtaaatattctctgaatattgccgccaatctgttttttcaggaaaaacacgcaggctgcccctgcagtcgttcccagaaacggaatcagaagaccggctacaatgcttaaattcatgaaacactctcctttcttttattattctatgtaactcgcagcaaaatggtatcttgtctgccttttcaaatcatttttactaaaatcccgccagatcgttgcccaggacggcatacatcaggaaattcacaccacacaccagatggtagcagaataccgcgatctcgcccacgacgaagatcaccttccagctcttccaccactccctgatattccgcaccatgacgatcaacgtcatcaggaagacaaagaacatgccgtgcatatagccccaggaaaagttggcatgcatcatgcggaatcctttttcatagaagatcaggaacattactgtacccataagataattcagccatgcaaaccagtaatatctgttggactttatatttttaaaatcaaataccagattcaggaaaagtacgccgatgggcaatgccattcccatgataatacttaaaggaatgcttttggaataattgctccatactttggcaaagccgatggcgatgcctgtctcctctcccatggcattcgtcccggtgaaaattccggaaaactggtacagcagggcaattcccgtggggatcatggtcacacacagacagaaggcattgcgaaaactttttcctctgcttacgatcagctggatcaggaggatcagaccgatcagaggcaccactaccatcgtatagcttggtttggtcatggtggtcagcagaaggctgaccgcgaagagaacgcagttcttccactgaaaatccttctgatattccgacagcactttcaccgtctcaaaaaagcagataatcgcaaaaggtctggtggccagataagtggcattccagaaaggattcggcgtataaatccccatacagcgatacgcataatcaaagccgaaaaaagctgtattcttgggagaatacaggttagaaagcaaaaatagcgaaaagacaagcagggtcacaagaatgtccgtcatagcctgtcttccctgagttaagtcatcataatgacttaccttccggatctcccggttcatataatattttgtgatcactaccgctgccagattgaacagcgcggtggtgatggccatggccgctttcgctccgatcagccaggcggaaagtctggctgtccagaacaggatcggatagggaaactcataatttcccgcaatacctgccaccttattcacatagtccggcatatccgactgaaagcccggcacctgatagcactccatccaaaacagatataacataaccccggtatacaaaaacagcaggaaaagaaatgtcacttttcctgccattgtctcccgcaggccgctctttatgggattctttttcatagagccgatcctttctagttgaaactgatcacgggatctttgggagcctttgccttctccacactgatggcatggagtacagggccctctcccttatagtctgcaaagtattctctggcaaccttcgctgtcactttgacccattccttctgcttcaggtctttcgtgcctgcaaactcacaggcatagcccagaaatgccatatcttccgcacagcaggtcattgccatgcgtcccggtacgaaatagccatcgggatattcctcgggcttcagtaccatggccagaaactggatatttttgccttcatagcgctccagatgatccatggaatccagataccagatgccgtagccctggttgtccagtacgataggatcctgattcagatcgtagggcagatcctcctcgaagatctcatcgatctcaccgttggaatcctcgaagatcacatctgcggaaggattcaccgctttgatgttgcgcttgtatacattcagatccttgataccgtcgcaacggttgaaaatgatcatctcggacttacggatcatctccgccagcagagatttcatatttgtgtagtacatagggaaggtggagccgtcaatggtcgtgatctgctgctctactttccagtaccagggaagcgtcatgttcttacaattccacataccgttatactcgatgatgatacgggcgggcttgtactgcttctccagctcgatcagatgattcggagtaaactcctcttcctcttcgatcaatacgacatccgtacgactcttttttaataaagcgggatcgtattcattctcgccctcttcacagaggatgagcagtgtctttcctttgatctggaaatacggctgtcccagtgtaaatgtgataaattctgtcttaccgctctccagaaaaccatttatgatatagactggtttcgtcataattcatacctttctctttcttatcctgctgcctgtaaaatccgttccggcaatttatttacggaacagttctgccagcttgtcctcgtccagtttggaaccgatgacacagatcttaccggtaacttccggcttaccgcttctgatgtcatgctcttcgggaacataatcataatatacccaggttccgtcgggagcgggtaccatacccttggcacgcaggattgcaccgtactctccgctgtccagcgcagtaaggatcttctcgatgtcctctgcgctgtaggtattgggtgtctcgataccccaactggtgaatacttcgtctgcgtgatggtgatgatggtggtggtcatgatcatgatcgtggcagccgcaggtgcagttctcgtcatgctcatgatgatgctcatggtcatgatgatgctcatggtcatggtcttcatcatggtcatgatgatggtgatgctcatgctcgtcttcatcatcgtcgtcatcgtggtgatgtccacagcagcactcatggtcgtggccatcctcgtcatggtcgtgatggtgatgatgctcgtggtcacagcactcatcctcatcgtgatcgtcatggatatgctccagcatttccttcatcatatcttccagcttgtcagcgccttcgatggtcttcagtacttccctgccatccagctggtcaagaggagtggtgataatggtagccttgtcgttatgctcacggatcatctccacgcaggcattcagctttgcctgatccactttgtcggttctgcttaagataatggttccggcgtactcgatctggttgctgaagaattcgccgaagttcttcatatacatcttgcacttggatgcatctactactgctaccgcactgttgatctccacatccagatctcctgccacgttctccacagccttcaggacatcggacagcttgccgacaccggagggctcgatcagaatacgctcgggagcataagtgctgataacttccttcagggaagtaccgaaatcacctaccagcgagcagcagatacagccggagttcatctctttgatctcgataccggcctcttttaagaaaccgccgtcgataccgatctcaccaaactcattctcgatcagaacggtcttgctgccgtccagagcttcttttaacagcttcttgatcagggtggtcttaccggcacccaggaatccggatactacatctattttcgtcattgttttttcctccaatctgagtctaagacccatcctttttattttctatcatatttacagtattgtcaataaaacgattattaaatttttatcaactaagccataatgttcgtcagacactgtgcggatgctcgcatacgcagctgtgctacggtctctccgtctcgatcatgctgtaaggcaccacggccacttttccctcttcatcaccgccacacaggattcctacgaacacaccgtcctccgtaaaggctccgcctcctgacattccgggagcgatcagtccctgcagcagaagcatatactggtcaaaatcctccacatagatccagggatccaccacgaaagcatagaccggcagcccactctcccctccgtacatccatacatcgtcatattccttcagtgcatcgaatacttcccgatccgtctgcaccggcagacagaccttccatgcttcctctgacagttccgccttgtccacccacaggaaagccagatcgcagctgtccactgtctccacgccggtggcagccacctgtgttccgtccggaaatgtcacccgggcctctccggtatcgtccgccagtacgtgccctgccgttgcgatcagaatcctgttttcctcttcatcatagatcacaccgctgccctgccgctctcccgtctgaattcccaccagggatttcattaccttaaaatcattctccgtcagtttctgctctgtctgcaccggcagttccacaaattccattcctgcgtcagcctgtcccatgccactgttttcttccgaaaccttctggcctgcggtctccgtggagacattttcctcactcccaccgttttccccgcagccggcgaaaagtaacaggcagctcagtatcacagtgatcccttttatccgcattctctcttttttctccatgacttctccatagtttttgtcattcctttcgcttcgctcaaggcacaaacaagttatgaaaaatgttgtgcccctc

SEQ ID NO: 5651 - DNA, 240 bp, Unknown
  gut microbiota DNA sequence
cacgcactttgggaccttagccggtggtctgggctctttcccttttgactgcccaacttatctcgtgcagtctgactcccgatcatcatctacatggcattcggagtttgatattctttggtaagctttgacgcccccgcggaaattcagtgctctacctccataagactaaatcgaggctagccctaaagctatttcgaggagaaccagctatctccgggttcgattggaatttctccc

SEQ ID NO: 5652 - DNA, 495 bp, Unknown
  gut microbiota DNA sequence
atatggacatccttcacagatcattccgcagctcttgtattcccggtatccggaacggttcgtcgtatgataagccagcacctgatcattcgggcatacatagcagtcaaaatattcatcatacacatactcggcttttttgaaaaaaccatcttgggtcatggggcgtttatacggtagaagcggtgtgataccatcatccagaagtaactttgctatcgctggtgttttgtatcctgcatcggctaccagtgtctgaatgccaatgtcttttatcttatcatacagggatttaaatgtccggctgtcatgctggttgccgggatttacactataacccagaatccatccgtttttgtcacaggctgtctgcacggaatacgcaaaaacatttttatgttcaccctttcggaaccatccgctttccggatccgttgtactttccttgaccgttttttcttcttttccatcagagctgccaccacaggagggggg

SEQ ID NO: 5653 - DNA, 1502 bp, Unknown
  gut microbiota DNA sequence
gttcctggcaggactgttttttgaaaagatcctgccctgagccgttttactgcattactgcattgcttctgccagcatccgttcctcatgaccctttttgtccctcaccatcttcttcatgaggaaatgataagcgatccagaggaaaatacctgcggtcagccaggctgaggcattggcaaagcacacacccacataactcatcagatgcgctgccgcaaaagccacgataccacggctcaacaattccaccacaccgcccatcatgggcatgaagccgaagccacagccctgcagcgcatttcggaagataaatatcattcccagcggaatgaagaacatgccgcagatcgtaatatacgttctggcatatccacataccatctcaacctgttcggagatgaacagcggtacaatataaggaagtgctatatatactagtccgtagacaagcaccgcatagacaccggacatgatattggcagctttcacgcccttacggatccggttcagatcattgatgccgcggttctgcgcacagtaagttgccatagtcacacccattgcagcaaagggctgtgtcaccagctgttccaccttgcaggacactgaataagatgccaccacggtagaacccagcagattcagtgctgcctgtaccagaatagtaccgatagctgtaatggaaaactgcagtgccatgggaattcccacggtcagctgatttttcacacactgactttccagtctgcaatgctccggacggatatgcagtgtaggtactctcttaataatataaatcagacacagtacaccggataatccctgagaaatgatggtagcataagctgcaccgcccactcccatatgaccgtaaacgatcagtacataatccaagacaatattcgtcaccgaagcgatcaccagcaatactaacggcaccacactgttgccgatggcacgcaggatactggacaacaggttatacaatacattgcaggcaattcccgcacagatgatcataatgtattccttcgtcatatcgaaaatatcttctggagtattcatcacccgaagcagactgtccatgccggccatactgactgctgtcatcacgatcgtcacgatcaccgacaggatggcagcacttccgatacttttgcgcataccttcccggtcccctgctccgaagcgctgtgccgtcagcacggtaaatccggtggtcagtccctgtgtaaatcccaggatcaggaagcttaccgacccggtggctcctactgccgccaatgcatccacacctatgaaccgacccacgataatggtatccaccatgctgtatagctgttggaaaatattacctatgataataggaatgataaattttgtaatcagcttagaagggctgcccttcgtcatatcaagttccataaatctcttctcccgaaaaaacaggaccccggaaggccccatatcttatactacatttactatatgatgccggg

SEQ ID NO: 5654 - DNA, 1551 bp, Unknown
  gut microbiota DNA sequence
aaaagtgggaacctacggcattgttccggggctggacagcatcagagagctgtgcagaaggctgggagatccgcagaacgacctgaaattcgtacatattgcgggaaccaacggaaaaggttccacacttgcctatatttccaatatcttacaggctgccggataccgtgtgggaaaatatatatcacctgttattattgaatattgtgaaaaaatccagatcggaaagcagaagatcacccataaggatctgtgcgatggtctggaaatcatccgggagcattgcgaggcaatggtgcaggacgggttccatcatcccacgccttttgagatcgagacggcgctggctttttggtatttccgggagaaacagtgcgatatcgtcgtgctggagaccggtatgggcggcagggaggatgctacaaatctgatcaccaccacgcaggtggcggtactggcatccatcggtatggatcacatgaagttcttgggtagcagtctggaggagattgcagcacataaggccggaatctgtaagccgggatgtcaggtggtctccatgcggcaaaaggaagcggcacaaaaggttgtggagcagacggcggcagagcttggctgcatgctgaccatcgcagatgtggcaaatgcaaagcatgtgaaatacggactgaaaaagcagaccttcgattatggaaattataaaaagctggagatcacccttgcggggaaattccaggtagcaaatgctgtgctggcggtagaagcggtgcaggctctggggaaatgcggttatgagatcaaagagactgccattcggaaaggcctgaaggagactgtctggaacggaaggctgcaaatactggaagaacacccgttatttatagtggacggcgcgcataacgaggatgcagccgcaaaacttgcggattccatagaattctattttacaaacaaaagaattatctatataatgggaatgttaaaggacaaggaagtggaccgcgtgatcgcgctgacggagaagtatgcggatcagattctcacggtgacacctccggacaatcccagagccatgcatgcttatgatctggcaacggaggtggcaaaggtacaccccaatgtgacggcggtggacagcctggaagaggcagtggagcttagtcacctgctggcaggacgggatgatgtgatattatgcttcggctctctctcttatctgggaagaatcctgaagctcatggagaagagacagacagcagggaataaacggaaagcgaggcggtgaaaatggtagatcagaagaaagtacaggaagcaataaagcttttactggaaggaatcggggaagataccgatagagaaggactgaaggagacaccggagcggatcggcaggatgtatgaagagatctgcggcggtatggatcaggatgcgggagagcatctgtcgaaggtcttctctgtagataataatgagatggtactggagaaggatattaccttctattctatgtgcgagcatcatctgatgcctttttatggcaaagctcat

SEQ ID NO: 5655 - DNA, 1032 bp, Unknown
  gut microbiota DNA sequence
atccgctgaacagtaccagtattcccagaataaagggaatcagggaaataatcacttccaccttataaagcactgccgcaccgaccacaatacctaccagaccgaatacgaactcattatggtaatagttctctctggcatccctaagcagataacacaccatggagaccagccctgctacgattagcacgataccgatcagataccccagtgtcttctgcatggtctccgggatcaccagtgccacgattcctaagagaatatacagcacaccggtaagaattgcttcccatttcaattctttcagcattttcatatgtaacccttcctttcctgtaaaacaatgttaaactcagggaaaacgaaaaaggggctctctgcaaacctgcggaaaaccccctttatgttcaatttactttctgccgcagcacttcttgtacttcttgccgcttccgcagggacagggatcattgggataaaccttctgctccttcacaatggtagtggaagacttctgctctttgtagagttccttacgggtctcttcgtcaaagatatcgttccactcttccagattgtacagccagtcggcttctgctgctaccatgttcttgtacagaagagccttatcgaagcctaagtttacctgagtatcctcttccagatcatcaatagggttctgctctaccaggctgtcgttgatgccatccaggaatccggtcatggtcatcagagatactttgaacttgtcagccagttccttcacggtaccctttactacttcatcgggattcttcagaagctgtgcgtagatttccttctcctcctggaaataagctgcccagagttgctgcagcttctctttgccggttgcctcattatatgctactgatctccactgttccattaaattcataattgtaataccatccttacataataattaaatatttaataatacgatttctccgcccttcgggctctcgaaatcgtcacatccattcgcatttcggactggcgtcctccatgctc

SEQ ID NO: 5656 - DNA, 6844 bp, Unknown
  gut microbiota DNA sequence
attattaatcatagtatataacaactcgtcctcaaaaacaacaaaaaaatatcaatcggggatgtataaacccacaaatccgggacagactactactatcatcggatcccctcctttgatcttacgaaagatacgataatacttaatcctccccttttgaaaagaggcacccgtgggtgcctctttttttgctatcagttcctacaggggaacttttccttctttgatcagttcaataaaagcatctgccacctccggatcaaactgggttcctttatttttctccagttcccccatagcgtattccacactcaggggctccttatatgctctcttggagatcatggcatcaaagctgtcgcacaccgccaggatcctgccaagaaacggaatctcttctcccttgattcctctgggataacccttgccgtcatatctctcgtgatgggaaacgactgcggggatcacatagttcatattcggcagatagtggatcatttcgatggatttctccacatggctcttcatgatctcatattcttcattcgtaagctttccagcctttttcaggatgctctccgggataccgatcttaccgatatcatgcaaaaggcctgccacctttacggtctggatatcgtttctggacaagcccagcttctgggccagcaataccgcatactgggatacattggtggagtgctggaaagtaaaggaatccttcgcatcaatagccgccaccagtgcatacaccgtaggcgccacctgctcgtaaccggtctccttatcctggctctcctcattgataccgccttcatatacctggatccggtccttaccattacgcttcgcataaaaggccgcccgcttggactgctggaacaattccagcgcatccgctgccagaccgggataccatgccacaccaacgctgaatgtaatgggctgcatgacctgtggtttatttgtagcattctcctgtactgcccgggtcagtttctccgccagtgccaccagtggttccctgccggtctccggcacagagaccagaaactcattggatcctacccggaatacctctccgttctccacattatccaaaaatctcttcgcgcaccattgcagaatccggtcgccggtctgttctccgtacaggtcattgtataacttaaaattatccatgtccatgtataaaaagccccgttcttctcccaaggcaccatcgcggcgcagatacactccacaatagctgcggttatacaggccggtcagttcgtcatgaatggatacctgatataccttttcataagcatcaatgtttttcagactgccggaagcaatatttgccatctgccggatgcagtccgcctcgcggtaattgagcttactctcccgcagacgctccatatatacaaatccacagaccatattatcatattttaacagggcgatctccggtgtctcttttgtctcttcctgctctacgatgccacagactctctccacctcatcttcgcccagcgggatatgtccgctctgtaccacctcatggtaaccgtcatcatttatattcttctcaaagattctggattcccagcccggaattgcatcatccagaatgtcatgcatattggcaaacaattccttacggtttaaaatggatgccgctctgtcctggaatttccgcagtccctccagcatatgcttcagcttctggttcaggatatcctccagacgctttctggcaaaagctaccaccagcaccgtccaggcacattgcagaatgatatagatcagcagtttctgcgttaccgcccgctccagacttcccagcacattttccagattatgagacaggatgaccaacggcagggatgccaccacaactgccagaaaatatactgcacctaccgttacacgataggaaaaatcaaacagatactgcttgtacatgatatagaccatgcacaccgccataccaacgccgcccagcatatcatacggaaagacgcttcccggaatcaggcagagcagatttcccatcaaaacaaacagggttcccagcaacagcggctgtagttttttacgcagctgtaggtctccaccgatcttgcaatgagccagataagtggcatagaccaataccgagacctcccataccgtcaacacccagattccggatgttgcatgatacatatagacataagttccatcggcacgggtcatcacttccggtgccggcaggatcgcaccactccaggcattgcccagaaccagagctgtcgtcaggactccatagatatagatcagcgcatcatgctccgtaatttccagaaaagcaaatagaaatgcatacataaacactggaatcaccagcagaccaaacagtgcaaaattatgccagaaacgaattcccggaaatacctgtagccgcatgagaatcgccccaccggtccacaccaggcaggaagtcagcactgccctcagactacggactgtccggctcttcatggtattgaaaaagcagaataacagaaaaagggagcacaaaaaggctcccaccggaacaccgatgtagagatttctatctaatgtcatatccagaaagctctccatacttgtattactccctcacacttttgtttttattttcgaaccgatatccctttttcgacccgaatcctcttatgtatgtaaaattataccacatttttcctttaaagacaatggtacgtccaaaatcctctgattctctgatccgcgaaaaggtagacgtaaattacggcactcttccttgtattctccgtccacgataacatccagaagcggtaaaagtttcgtgatcaccggatctcccgcttccatccaggccagaagatccttatcaaaatcatagccggtatagcaccagatcgtcttccggggataaatttcccttactttctttaccagagaaagcaccgttgcacggttctgcggttccataggttcgccgcccagcaagcttaagccccggatatagtccggggccagtgcctgtaaaatctcctgttctgtttccagcgtgtaagcctgtccgtactgaaaatcccaggccacactgttaaagcatcccttgcaatgatgggtacaaccgctgacaaacagcgatactctcacgccgggaccgtttgccacgtccgttttcttgatcgtcgcataattcataggacatttccttcccttttactatctgcatattacagatgaagaactcttgccttgatctccttggtcttgccggcattccagaagttctctcccagataaccgcaggttcttctggtgacattcattttcgcatgatccttgttgtgacactgagggcactcccattccatattatcattgatcatgatctcaccatcatagccacagacgtggcaataatcggatttggtgttgaactcaccgtactggatattatcgtaaataaaacggatgacttcctcgatggcttccacattattggtcaggttcggtacttccacgtaagagatagctccgcccaacgacttattctggaactcactctcgatcttgaacttggtgaaagcgtcgatcttctcccggacatccacatgataggaatttgtgtaatatcccttatcggtgacattggaaatatcaccgtatttttcccggtcgatccttgcgaaacgataacacagtgtctcagcaggagttccgtagaggctgaatgcaataccggtctcctctttccattttgcgcagcgttccttcatataatccatgacacgcagggcgaattccttgccgggttccacggtctggctgcatcctttcatcagatacgtagtctcatacagtccgatatatcccagagacatggtggaataaccattgtgcaagtatttgtcgatggtctcgcccttcttcagacgggcgatggctccgtattgccagtggatggggctcacatcggataccacaccttccagtgccttgtgacggcacatcaatgcttcataacacagttccagacgctcgtccagcagtttccagaatttctcttcatttccttttgccagaataccgatctgcggaagattgatgctgacaacgccctgattgaagcgtccttcccacttgtactctccgttttcatccttccagggagacagaaaagaacgacagcccatgcaggaaaatacatttccctcgtaattctcgcgcatcttcttcgcggagatatagtcgggatacattctcttggcagagcactgtgcggccagtttggtcacatagtcatattttccgccctttaagcagttgttttcatccaatacatagaccagcttcgggaaagcaggagtcacatagacgcccttctcattcttggtcccctcgatccgctgacgcaggatctccatgatgatctgcacggtctcttccacatattcgtcattctcatcgatatgcaggaaaagtgtgacaaaaggagactgtccgttggtggtcatcagagtattgatctgatactggatggtctgcacaccggatttcagttcgtcatgcaggcgcatctgcacgatcttgtccttggctgcctgatccagggtatccccgaattcttcctccagctgttttgcaaatttttccttactcttacgcagatatttccccagatgcttgatattgacgctctggccgccgtactggttgctggccactgccgcaatgatctgggtggtcacggtacatgccacctgaaagctcttgggagactcgatcatcttgccgttgatggaagtgccgttgtccagcatgtccttgatattgatcagacaacagttgaagatcggctggatgaaataatccgcatcatggaaatgcagcacaccgttgtcgtgcgccatggcaatatgctccggcaaaagcagacgtctggtaacgtcacgggacacttcgcccgcaatatagtctctctgagtggaagccagacgggtattcttgttggaattttcctccgccagctccttattctcattccggatcagttttaaaatagattcatccgtagtattggactttctgagcagacttctctggtaacggtatacaatatacttctttgccagagtatatttattgtgctctaccagatgctcttcgatcatatcctggatatgctccacggtctgggtctgtctgccctcctgctgtacatcctccagaatctcctcgatcagtccctcactggcacgataccgctcctccacttcattgttggccttatggattgcttcccggatcttctcctcttcataaggcactactctgccgtctctcttctgaatcttcattgctgtttccctcactttatatcattcccataagatacgaatttctgcataagccgaaagaaaagccgcatcggaagcaagttcccgacacgactttttctgcaaatcatagtgtctcactagattttgtgtttttcaagcaatttcgtatctacatcttgtatctaatattatagtgaggatacatggaaaaagcaagtatcttttttaaaacattcctcttccaccataaccgccgaagcataaaccgccaccgccacagcaaaggttgcagaacagattggccagacaaattttcaggcacaggtcgttgccacccacatggggatagccataggctgcctgtctgctctcataccactgtcccccgctctgtagtctctgcaggagcatctggtattccatattctggggatccagcgccaccgccttgtttgcatgttccagcgctgctacattatttccaaggcccatgtgtgccatggcactgtagtaataccatctggccgtcttctcatgttctcccatgccgtccaacgtatttctggcctctctgtaatagccgtttctgagataattaccggctgcccgcagtctgggctcttcttcatagccagaagtctgctgttgccagcctgcctgctgccagaagtctccaaatccctgaccgtagccgccatatccctggcttccaccgtagccgcttccgctaccaccatagctctgcctgccatatccgccaccgtaactgtagccttcggtccgctccttcatgatctgctggtaggctgcctggatctccttgaacttttcttccgcctgatccttattgggattgttgatattggcatcgggatggtatttccggctcagtgccttatatgctttttttatttcctcctcggaggcatctctgctcactcccagaacactgtatggatcataagtcatttcccgttacctcttttgcactgtctttcatccgtttcttccgcacgatctcataacggcaccatacaccggaatacagaatattccgcagaatatccacattctgtaaaataggaagctgttcgaactccttacagcactccgacatcatcatggtcaggatctgccggcattcctcctcaaagcccggttcctcataccgtttctttaacggattataggttccttttttgaggtcctgctcgatatcctcataggcatccaacagataaatgaattttcccaggaaaaatccaagtctctccagattgtccttccactcatccacacgacaggatacaatctgtgccatgactctgccaaacaatcccgccatggtatcaatatccgcattgccctgcttttccgcatccgcaaaatcctgcatggccagtgagatatttcttactttttcctgatataataacggttttttacggaattttcttcccaacagataactgtacaccagtcccttcagactatgc

SEQ ID NO: 5657 - DNA, 447 bp, Unknown
  gut microbiota DNA sequence
gcaccgttctatgtgtacatctcaaaatccaaaaacggatggcagtatctggactctctgggcggagcagcatatacctcggcaaaagaggagtatgtagagcatccattcctggtcatacagactgccatgcatcatgcaggagcacataacagaaacgaggtggattatgaataataggacaatgacaacagtttatgtggatcgggatagtatttccctcaagacccgttccagaagtggctgttcgccgcagcactttattattttgaaaaaggaattgcagcggctggaggagaaaaagtatttgatcacaaaagatatccattcctatgcagaactgcggctgtgtgatgccgtaggcggtgccaaagtgctggagttttccttcacatggctgaaggatgctggcagagacagcgtttccggttataccgagcgaataag

SEQ ID NO: 5658 - DNA, 2657 bp, Unknown
  gut microbiota DNA sequence
ctccatagctttctactctttactacttttactgctttatattacttattacacagatacgcttccagggtcttacagattcgtctgttgatctcgtctttctcccccggaaggttctgttgcatgctttgtatcaacgcatcctctgccgaagaatgtatgatctggatatgttttttctttttcttcttcggatgttccacaccgcgcagccttccgtcgcacagatagacccattcttcctcttcaccgacgatcatgtacagtctgtccttatcgtgtccggcctttgaagttgcaaattctcctaacatatcaaaatcttacctttcttctccgggtctgccgttatccgttccttaatacatggtcaggatctccggctcaccgtctgtgatcaggatggtattctcataatgtgcagacagggatccatcctcggtaactacagtccaatcatcgtccagccatgccacatccggtcttccgatattgatcatgggctcgattgccagcgtcataccggcctgaagcttcagtccacgtctatgctgtgcgaagttgggaatctggggatcctcatgtaagctggtaccaatgccgtgacctaccagatctcttacgattccgtagccaaaaggcctgatataggcatcaatggcattggagatatcatacagatgattgcctgcctttgccatctctattcctgcaaaaaagcttcctttggtcctctccatcagaagtcttgcctcctcacttacctgccctaccgggaaagtacgtgccatatcggaatggtatcctttataaatcagtcctgcatccagacttacaatatcaccttcgtgaagaatatgatccttgtgaggtataccatgtacgacttcatcattcacggatacacagatagatgccggatatccgttgtaatttaagaagttgggaatgcagccatgggcacggatcagtttttctcccaggttattgatatccagagtggataccccggggtgtactgccttctccatctcgctgaatacatccgccagaatcttacaagattctctcatcaactcaatttcacgctgtgatttgatagttactgccattttattcacctttctgttccggaccttactgctgctgatcagtgatccggacttttcctagccaagaattgctacgatatctgcgaatacttccttcatatccttggtgccgtctacggtctttaatacatttttcttggtatagaattcgatcaggggctgggtctggtcatgataaactttcagacggttcagtacggtctcaggcttatcatcgtcacgcagtaccagttcctgtccgcacttgtcacagatgccttccttcttgggaggaatatgctcaatgtgataggttgcgccgcaggacaggcatgcacgtctgccggacattctcttcacgatattctcatcgggaacatttacatcgattgcaaaatcaatggcatctcccagctcagtcagtgccttgtccagtacttctgcctgaggaatggttctggggaatccatccagtacataaccgttcttgcaatcatcctgtgctactctgtctaagaggatcttaacagtcagttcatcgggaaccagctgtccctgatccatgtatttctttgcttccataccaagttcggttccgttcttgatatttgcacggaaaatatcgcctgtggatacatgagggattccgtacttttcagcgatcatctttgcctgggtacctttacctgcgccgggtgcgcctaacatgataattttcatctttgctcctatctgcctgttgctacaggctctgctctttctatagataagctacaaatacagtccaacatttacattttaacttttatgcggcttttttgcaatacattttcctataatacaataatgcaaaaataaccggatgattacaaaccatccggttactgttatgctactaatcttccaggaatcccttgtagttgcgaacgagcatctgagattctacctgcttcatggtctccagtactacgcttacgataataatcaggctggtaccgccgaaggatacacttgcgccgaacacaccattaaagaaatacgggatcacagatacaatgatcaggccaatcgcaccgatgaatacgatataattcagaatcttgttcagataatcactggtaggcttaccaggtctgataccggggatgaaaccaccctgcttcttcatgttatcggcaatcatcaaaggattaaatgtaatggatgtatagaagtatgcaaaaaatacaatcaatacaatgtacagcaaaagtcccagggaataaatcggctgactgggtttgcaccagtaaccggaattcagacctttcaggatctctgcccatacgccggttccgttatatccgataaaggaacagataataatggggaactgcataatggactgtgcaaaaatgatgggaataacgccggaagtatttactttcaacggaatattggaagtctgtccgccgaccatctttctgccctgcattttcttggcatactgtaccggaatcttgcgcacaccatcatttaagatgataaccagtaccaccatggcaataataattgcgaagatgataa

SEQ ID NO: 5659 - DNA, 6354 bp, Unknown
  gut microbiota DNA sequence
gctcaaacaggttgctcaggtcttgaggcagtcgggaaatgatgttgatcaccagtacgatggaaataccatttccgatacctttttctgtgattcgttcacccacccacatcaggaaagcactaccagcggtaagtgctgtgatcgtggtaattacattcagagcgttgaactcgatcaagtagccctgtctgccaaaaccgattgccattgctgtggactggatcagtgcaagcgctacggtaacgtatctggtgatggcaaccatttttttacggccgtcttcaccgtcacgctgcatttcttccagctttggaatagcaattgtaagcagctgcatgataatggaagatgtaatataagggttgatgttcaatgccagaatagacatgttcaggaaagaaccgcccgtaatggcatcaaagaaactgaacgcaccgcctgtctgctgggcaaaccattgagaaaagaacttcgtgtccaccccgggtacgggaagctgtgatccgatacggatcacaactaacattcccagtgtaaaaagaatcttctgtctgatttctttgattttaaatgcgtttttcagtgttgtaagcattacatcacctcagcagttccaccaagagcctcgatcttttcttttgcggatgcgctgaaagcatctacctttacatcaagctttttggtaagttctccgtttccaaggatcttaactccatctctggggttcttaatgattcctgcttcaaccaatgcgtttacatcaacggtagcaccgttgtcaaagcactccagagcacttacattgatagcaacgatttccttagtgtttctgttagtgaaacctctcttaggaatacgtctgtataaaggcatctgaccaccttcgaaaccaggtctgggagctccggaacgagccttctgtcccttatgacccttacctgcggtcttgccatttcctgaaccgtgtccacggcctcttctaaaattatcactgtgtttggaaccttctgcaggtcttaaattggataattccattcctaacacctccttatctgattatgcttcttctaccttgatcaaatgattcacctgacggatctgtcctcttgttgcatcattatcaggcagtactacggacttaccaatcttacgcagtcccatagactccacgattgctttattcttcggcacagcgccgatggtggactttaccagagtgatctttaacttcttgtctgccatactctactcctttctgttggccctgtcaacttaacgggaagatccggcttacgccagaacttcctcaacagactttccacgattctttgctacttcttcgggagccttgatctggcttaaaccggagatggttgcaagaacaacgttctgcttattgttggagccaagagacttggtacggatattcttgatacctgcaagctcacaaacgacacgagcgggaccaccagcgatgataccggtaccttcgggagccttcttcagtaaaacgttagcagaaccatacttaccgatgaaatcatgggtgatggaattgttctcatccagattgatctcaacaatatgctttacagcatcttccttacccttacggatagcttcgggaatttctacagcctttcccagaccagcgcctacatggccgttgccgtcaccaacaactaccagcgcggtgaatctcatgttacgaccacccttaacggtcttggttacacgcttgatggtaacaactttatcatttaactctaactggcttgcatctatgattgtgtgtttcatggtgtattcctctttcctttcctagaattccaggccagcttctctggctgcatcggctaaagctgctactttaccctgataaatgaaaccgccacggtcgaaaacaacttctttgatacctttttcgattgctctctttgcgataacagttccaagatatgctgctgcatcaacgttattggtcttctccagctctgccttgatctctttctcaagagtggatgcagatactaaagtgttaccaactgtatcgtcgataatttgagcatacatatgattattgcttctgaacactgcaagacgaggtctttcagcagtgccgctgaagcggttacgaattttcatgtgcttttttgcacgtactaactgtctggactctttactaaccatcttcatactctccttatctattatttcttaccagtcttaccaactttacgtctgatggtctcatcggcatacttgatacccttgcccttataaggctcaggtcttctcttgtcgcggatctcagcagcgtactggccaactttttctttgtcgatacccttaacgatgatcacgttctggccttcaactacagcttcaatgccttcgggatcgatcatctctacgggatgagagtaaccaaggttcagggtcagcttcttgccggacttagcagctctgtaaccaacaccatttacttccagcttcttctcgaaaccttcggtaacacctactaccatgttgtggatcagagttctggtcagaccgtgaagagacttcatcttcttcagatcgttgggtctgcttacgagaacttctgcaccttctactttaatttccatctcagagggtaatactcttaccagagtacccttgggaccttttacagtcactttattattttctgcaacctctacagttacgcctgcaggaattgcgattggcattctacctattctggacatgcccgtacctcctataattctatagaaaacaatagttacatttttcgccacggagaattttacgcttgcggaaaattctcttaggagcaaaacttagattttattagtcagcgtattttgctgacttagaaaatctttttgctcttaccaaacgaatgctaatacttcgccgccaacctgaagctcacgagccttcttgtcggtgataacaccctggttggtagagataatagcaatacccagaccgccaagaaccttaggcagatcttccttgccagcgtatacacgtaagccgggcttagagattctcttgatgccggagatgatcttctcgttcttgtctgcgccgtacttcagagtgatgtggatggtcttgaaaccaccgtcttcaacgatgtcgtacttcttaatatatccctcgtccagcagaatctgtgcgatagccagcttcatcttggaagaaggtacgtctacggtgtcgtgttttgcagtatttgcattacggattcttgtaagcatatctgcgataggatcgctcattgtcatgatttagtttcctccttattatttgacttgaatcatgctaagtacatacactttgtatataccatctatattataagataattcttataaccaaaacttttagaaattcttactcgacgcctttcgacgccttagaatttctttttgtctcggagaattccgccaggaattctcttgggagtgaaatatagattttgttagccagcgtattttgctggcttagaaaatcttttcactcttaccaagaagccttcttaactccggggatctcgcccttgtatgccagttcacggaagcaaacacggcaaattccgtattttctcagtacagagtggggacgaccacaaatcttgcagcgggtataagcctgagtagagaacttaggtttgcgctgctgtttaatcttcattgatgtctttgccatcagaatttacctccttgattactttgcgaaaggcatgttgaacagtctcagcagctcacgtgcctcttcgtcggtcttagcagttgttacgaaaatgatatccatacctctggtcttgtcaatcttatcgtactcgatctcagggaagatgaactgctctttgataccgagtgcatagttacctctgccgtcgaatgcgttagggttaacgcctctgaagtcacggacacgaggaagagcgaggttaaccagacgatccaggaactcatacatcttctcaccacgcagagtggtcttacatccgatgggcatgccctcacggatcttgaagtttgctacggaattcttagccttggtcagaactgccttctgtccggtgatagcttccatatcagcaactgcattctcaaggatcttagcgttttcttttgcttcaccaacacccatgttgataacgatcttgtcgagcttgggaacttccattacattagcgtaaccgaacttcttggtcatagcatcgacgatctcattgttatataaatctttcagtctgctcacttatatttcctccttcctattgattagtcaatcacttcgcctgttgactttgcgaaacgtactttcttgccgtcttcaaccttgaagccaactcttgtggtcttgccttttacaacaagcataacgtttgaaatatcaataggagcttctttctcaacaataccgccattggggtttgcctgagaaggctttgcatgctttgtgatcttgttaacgccctcaaccaggactttatgattctttacgtctacagagagaaccttgccctctgtacctaagtctttaccagcgataaccttaacggtgtcgcccttcttaattttcattgtagacatgtggcaacctccttataatacttcgggagccagggaaacaattttcatgaactgtttctcacgaagctctcttgcaaccggcccaaagatacgggttcctctgggagtcttgtcatctttgatgataactgcagcgttctcatcaaacttgatgtaagaaccgtctttacgacgagcgccctttacggaacgaactacaactgcctttactacatcacctttttttacaacgccacctggtgttgcatctttaacggaagcaacaatcacgtcgccgatctgtgcatatcttctggtagaaccgcccataacacgaatgcaaagtaactcttttgcgccggtgttatcagcaactttcagtctactttcctgctgaaccatgttattcctccttcaccgcttccgcggtttcttacaaacttaatattcgcgtgctaatttatttagctctttctacgatctcaacaagtctccatctcttgtccttggacaggggtcttgtctccataacttttacgatatcgccaatgttgcactcgttattctcgtcatgcgccttcagcttgtaggtgtcctttacgatctttttgtaaaggggatgcttaacatgctcttcgattgcaactacaatagttttatccatcttattactgataaccttaccagtacgtgtttttctcaaatttctttccacggtttgatctcctttctacgcacccacgcgttacgctctagccttctcggtgataacagtctgaatacgtgcaatgtttcttctaacttctttgattcttgcagtattatctaactgattggttgcgttctggaatctcaaattgaaaagttcttttttagcagctaccagctcctgtgccagttctgcatcggactttgtcttcaattcttctacaaatttatttgatttcattctgtcacaccgccttccacatctgccttagcaatgatcttacacttacaagggagcttgtgcatagcaagacgtaatgcttcacgagcgtcctcttcgggaacaccagcgatctcgaacattacacgtccgggcttaacaactgctacccagcaatctacagcgcctttaccggaacccatacgagtaccgagaggctttacagttacgggcttatcggggaaaatcttaatccatactttaccggtacgcttggtataacgggtaagcgcaatacgggctgcctcaatctgattagacttgatccagcagggttctgtagcaaccagaccaaattcgccatatgccagggtgttacctctggaagcttttccggccatggatccacggaactgtttacgacgttttactctcttcggcattaacattatttatcgctcccttccatctgatttccttttgtaggaagtatctcgcctttataaatccaaactttaactccaactttaccataggtggtgtttgcttcagcaaaaccataatcgatatctgctctcagtgtctgcagaggaatggttccctcgctgtagaactcagcacgagcgatatcagcaccgcccagacgaccagaacagcaggtcttgatacccatagcaccagacttcatggttctgcccatgcaggacttcattgcacgtctgaaggatacacggttctccagctgctgagcgatgttctcagctaccagctgtgcatctctgtcaggtctcttgatctctttaatgtcaaccataaccttcttatcgg

SEQ ID NO: 5660 - DNA, 1899 bp, Unknown
  gut microbiota DNA sequence
aagctgcgctcgatgcttcggatcgctgtaccctcggttctgcagcagtctaccgtgtcgatcggtatgatgatcgtacaggcagtggtaaatcctttcggcacacaggctcttgcaggatattcggcgacgatgcgggtggagaatgttttctccctgatcttcgtgtccatcggtaatgcagtttcgccgtatgtttcccagaaccttggggcaggcaaaaccgagcgtatcaaaaaaggttatcatgcggcattggtgttggacgtgtgttttgcggcggttgcctttcttgtcattgaaacgctgcacacgcagatttccgcactatttcttggaaaagacggaacagcgctggcttatcaggtgtccggagattatatgagatggatcggttacttctttatctttatggggattaaaatggcgaccgatggagttcttcgcggactcggcatcatgcggccattcctcattgccaatatggtaaaccttgcgatccgcctgtctgtggctttgatctgtgcaccgcgttttggcatcgcctttgtctggcttgccgtgccggccggctggcttgccaacttcctggtttcctatgcggcactcagaaaatcctggccgggcgagaaagtggagccatcccgaatattttcataatccttgaaaatgtccttgaaatatgtcatcattagttcatggaatgcaaaaacataaaaggtttagaaagagcaggtatcatatatgaaaaagaagatcattgttgcagtagtggtagttgttgtgattttggcggcgattgcgattatctctgtcctggcacagacaccggcactgatctgaccggaaaggaagcaggacattgcttatgaaactgttatacggtaccggcaatccagccaaggcagctgccatgcagaaccgcatagccggacttggcattgaactgatcagtctgcaggatctgcgggcacaggggatgaaaattcccgatgtcccggagacaggcaatacgcctctggagaatgccaggcagaaggtccatgcttattatgaagcttttcgtatgcctgtattttcctgtgattccgggttgtattttgaagatgtcccggaggcggtccagcccggggtacatgtgcgtacggtgaatggtgtgtatctgacggatgagcagatgctggagcactatatcggactggtcaaacgctatggaaggcttacggcaaaataccgcaatgctatctgctatgtgcaggatgaggaacatgtatatgaggcgatggagcctgacatggaaagtgagaaattctggctgacggatgtaccccacagcagcatccgcagagaggggtttccgctggacagcatttccctggatcccggaaccggaaaatatttctatgatctgcctgagacagcggttgaccgggtggcggtagaggaaggttttcttacttttttccggaggatcttacaagagggaacggtgaatataaacggcagcagacggtgaaataacaagtgcgcagagcgtcccgtggcgctcagataggagaatatatggcagttgagagtgtaacggaaacagcaatgatctggggaaccgtaagcggtgcaagcatgttgggaatggtgatatctctgctattatccgtgagtttacccatatttttaggtatctttatctataagaagacaaaggcgtgggtgccggcatttttcatcggctgcggtatcttcgtgggctttgccatgatcttagagcagatctgtcatgccattgtgctgacggtgaccggagacgtgatccgggacaatatctggctgtatgcgatttacggtgggcttgcagcagcactttttgaggagtgcggccggtggatcgccatgaaattc

SEQ ID NO: 5661 - DNA, 9497 bp, Unknown
  gut microbiota DNA sequence
ctgaaaacaccaaagaccgataccagcgagcgcaaagtttatataccgggatttgtggcacagtgccttattgatataaagaaggaacaggatgaggtaaaggaggcacttggcagtgagtataccgattacaacctgataatggcgactacttttggaatgccgatcaatagcagctatattcgggatcagctgcagaaagtaattgatagagaaggtcttccggatgtggtttttcatagtctgcgccatacaagtgtcacatacaaactgaatgagcagaaagaggaagaaaataagattaccataccggagggagtaggtcccgaactgctgatgaaagtacttggcaatccggagatggcggctttgcttacttctctggcgaagacaatgaaagtataaatatagaagaacgatattgtgtggagtaagaaatctatgcagtatcgtttttttcgtttcttgtgaaaaaacttttttgaaaacttttttgaaaaaatttgcgttttgggtgagagttttttcgattttttgtacctatataagtgaaggggtttttaagccgcatttcaataaatccagagagaaggttcaaacgaaatgtacgataccgcaaaacgagtcgcactcgtcaagcagcgggtgcgggaaaacacccgccggaggcagtggcgcggcatatatgggctgagcgcagcgtgtatgctgctgttcgcggtgatgatgcaggcggcggatgtgtttgcagtgcaggagcagacagccgcatggggcgtgttcggcgcgatgctgctgcgggaggacgtgggcggctatgtgctggtggccgtcgtctcctttgcagcggcggtggtcgttaccgtgttttgcacacgattgagaaaaaacaataaacagcaggaacaaaccaaggaggatgaggaaacatgaagaaaagatttttagcggcgctgctgagcctgtgcatgacgctcacgctgctgccaactacggcgtttgcagcggtgagcgattcgctgggcaacacacccgaggaaaatcaggcgattttggagcaggtctctgccctgaccggcgatagcagcgaccaggtgctttccatgctgaacgctttggggctgctggatgaagacggcaatttcaaggtggatcaaaccatcacgctggacggtcaggtgttgacactggcggctgtcatggagctgctggaaaatcccgccacggatctcacccgtatagccgacgtggatgggactccggtggcgctgggcgatttgaagaccatgatccaaatcgaacaggagttgcagcggatcaaggacacctatttctccggcagggagtttaccggggaagctctggagaatctcaataacctgatggagcagttggagctgcagggcatcagtttgcagtattccgcctctgccacaaagcctgagggcgttgagacggtggatatgagcggcatgatgagccaaacgctgggggaactcgcaaccaacagctggagctccgggacttttactgtatatggcggaaaaccggtcggcttttcctaccgcattcaaaaaggccagctcagcgagtatatcaccggtgtggaggtctcgataggcgagacgagtggggtcgcccaaggcgacgggtcctacaagctgacctatgacgtaggctcgactttcagtttagatggttgtaaaatcactgtcaaggttacaaccaaaggagggaacccagactggctcgagggttcttattcctatggcgacctgctggggatgattgaattttacgatgcggaaaatctggtgttctatgacggtgccgcttatgccgaccactgtcagctcaagctaaaaaagacggttgacgcccccacaatacaaacatcagtgagcgcgccgaactatgaggaaagatacgaaagtacagaaacaatacagggggatatgtatattcctttgctggcaaatgaatacaatatcggcgaaggtgccaacaatcaggacttcgttgcgctaagcaataccatcggaattttggagggtgcccgcaacccggtgtcttccagcaactccaccaaatcttatcagccataccaaatcgacgccagcatcgagtttagctggagcggagacatagctgcctataatggctctgcgccgtatggcaattatatttctgcaaacccgataccctatgccccgttctgtctgacggagtacaagctcgatggaacagctctgacgctcaccaccgacggaaagaaaacggagaactgtacgattaacaatggcagtacggtcagcatctccctgcagtctaccacgcaaaacagagagaatcatcagtactatctgcccttcgaactgtatctgaagaatgtaaataataatatcccaaattccaccaccaccgccaagaccagcaaagttacagccaagctggtggacacggacaatcccaccattcaaagcgtcacggccccggcgggaacctatatcagcggacagcacgtgcccatcacagttacctttaacgagttcgtggatcttagaaacgcccgcgtgaccatcaatggcaaagagtataccgccgctgagctttccatgaacaactacggtgtcacggcaatgctctggtatccagtgcaggatacggatgccaccacggtcaccgtcaatggtatgaccggtgtggaagatgttttcggccatacgctggataccacactctatccaagcgactcgatcagcgacgttacgctgaagagcgtcttgatgcgcaacgctcccaccgagctgacggccacctacgccagcggcaaggcatcgttcacgatgaacgccaacatggagcaggtctacaagaccgtatacagcaattatcacaccccggcaggcacagacccgaaggaagccccgttccgcctcgagctgaggtacgactctgcggttgaaccaatccatctgcaggtctatctggacacagagaaggaagccttcaccattagcgactacgcaatcgcaccctctgctttggaccgcacctacacggtgacgctgcaggccaacgagggcacgaaagccgatcctgactgggtgaatgttcttcccctgacccagcagttcacggtggcaaagaaagtttccgcgagcacggtgaaggtcgtcccagaagagaatgacgccgactatacgatttccctcggcaaaaccacccgccccacgcttaaggcagaggttttgggggccggcggtgagacggccagctacaccaccggcaaatggagcagcagtgacacgctcaatgccaccatcaacgaggataccggcgttgttgccaccacaggaaccaaggtgggagccgtcacctttacctttacggcggacaacgggactgaggacactgccgatgatgtgacgggcgagtcaaagccctataccgtgacggcaggcgattccctggcactggtgattcccggcggcgcatccatcgtgacgcgggtaaatcagcccgccaccgtgctgtggagctccaacgccacgctgatggcgccgaacaaagagttcaattacaggattgacctgtatgagggcaactacgcgaatgaggcggcgctgagcggccgcaagcccgttgcgacttataccgtcggcaaggataaaaacagcgtgcggatcgaggagaatgtgctctccaagctctccaacggcaatacccctgcctacacggtattggtctccatgccgcaccccaacgccggcggtgaggacgtccgcctgtcggcacttgcctggatcatcgtgcaggcaccacctgccacagccaagctgacaccgccccagagcatttacctcaaggataccgatggtgctgtcaatatcgactggtcggtggaaaacaccactgagggcgcccctttgcagcccacgctgaccatcacccgggtcacagaggacaacaccaccaccaaagtggtggacagtgagcgcctatccggcacctccgggagcttccccctgtcattacagagtgtgaaagccggcaatctgaaggacacctatcaagtggttttgagcgtggagaatcctggtgaggaatctcccagcaccgactccttccccctgtatgtctacgatgccgacgcactgaaggtgcagaacgacaaaggagaaacgatttctaagctgaccatggacaatacctccaaggtcagcggcagcctgcccaccgttacagctgaaattatgcagctgcgccaggagttggggttgatcgagtacataggcatcaactatgacgagtacggatggaactcctttaaagacggcatccggtggctctccagcaacaacaatgccatttccgtcaactacaagcagggcggactgtatgaggacatcagaaacttctcctttgattcctaccttcccgaaaccaaaatggcgctgtccggcttggccaacggcaccgcaaccgtcacggctacccatgccgccacgggcatgaatgccgccgtacaggtgacagcgaaaacgctgcaaaataagttctatctcttccagctgacgcctgcagcggaaactacgctgcaatacaccgacggcaaaggtgtgcccaaaacggtcacgaccaacagtgaaggcgtgctggcgctttacgaacccaacggaatcgccagtgaggtgtctctgcggtccggctccggcgcggatatttatctgggcaccatctataaagaaaatctgcgttccggcgagcgggatgccacaaaactgcagctttatcccttgaataccttcagccttcggcgagtcgcccgggcatctgtgacgctcatcacgccgggcggcgatccgctggcgaacaagacggtgaccgttcgtggcggcgtttataaaaacggaggctactgcgagacagctctgctgggctccagggcaggagcacttgtcagcggcatcaccggcgacacctataccacggatgcggcgggaaatataaccgtctatctggattccacccagttctggtcggccgaaaagggcgagagcaacaccacggcgctttccgctctggatcagctggagtacattctggagatcagcgcaattgacggcgacaagtactatccgctgctgctgaccgtcaacggcaagctgggcgtggacgatgtaatgcgcaccgcagagggcgttgtctctctggagcgcgtgccggcgggggaggaaaacaaacccttcattgtggcgcaaagcgttgattacggtcttgccaacggtcagaaggtggatgtccgcagctcgactgggaagattggacctaacagcagctttaaaacagcaagactgcacaccaccatgttcctctggggcgagaagattgccaacgcgcggaattacagtctcaagctggcggacgaatacggcgttattcctgccgcccagagcagcagtaccaagcagtatcccttctcatccatccccgtagcggaaaacgatctgactctcaccgagaccaccatgaccacctctggatggatcgctgacggcaaggatgtgggtatgaaaacgcagctgagcctgaacggcagcctgctgcaagagaaaataatgcccttccgggtcgttgatctgacccgagtgcccaaggtgacagaggatgaccgcgtcaccggtattctggcgacgatgggatcctccagtggagtgaatcaagtcgactttggcggagtgggcgatagtaacattctcaaggtgctgaccggacggctggatgatctgagcggtccggtggacacttccgtgttcaaaatgattatcacccccagcgaagatccctccgtgttccgtgccatgatttgggccgggtataatacgctggagatggaggacatggattattctgaggacggcgtggcgttgggtgcgaatgtgctgacgcagaacctggaagtgggtgtgcccgggaccggggatctgagccagatggcccagggcacctatgatcccaagggggactacaaaaccaactccatagccgacaatgtcaccagcacggatctcaacttgcagttggagggcttttacgaagcggaaatccgctataacaccgaaaaaaaggagtgggaggttttcaccgtaggcggcggatttaccgccggcgttggtgtgggcttctccttcagcgtgaacgccatggctggccccgtgccgttgacagcaacctttgagctgggtggtgccattcagctggatttccgtaccgcagtgcgctacggccggcagggcgagggtacagagcttgcctggagcgatcccacggccacggcagtgaatgactttttgaccacgctgcgtatcaacgcctatgtccacgcgtttggcggtattggctttgactattcggtcgtggcgctgaagatcggtctattcggcaatttggatgtggacagtcagaataagttcctttcccgcacctatcttgccgacgagacaaagcgccagatcaacggtcaggccctgggaatccaaagcgaagtgggaatcaaatttgtggcaaccttcctgtttatctcctacgaggcggtgatcgcctccggaacccttggagccaccaggacttttaatgactggaaaacaatcgacgactactggaatagcgccaccagtgggctgagccttgcttcgctgcggatggcggcggcccagagcggaatgcaggtggcttctggcagtgcaacgctccaaagccgggactatctggagcaatatgcccgtacctggggccagccccagcagcggatgatgctgttctctctgaactccaccagtgggctggaaaacatccagactaatgccaaccccacatcctatccacagctcagcgatgacgggaaggtattggtctacatcaacgacggcaacagcagcagtatttacgacagccgggcacatttctccaccctcaatggcagcgtctattctacctccagcaaaattgacgatcctacagggttctccggctacggcgacacgagcgtttctttgtccggcactggcagcttcgcggcggcggcttgggttcgcatgggcaccgacctgccgggtaaaaatgccggtgatgccgtgacattggaagagcaaaacctgctgatgaacagcacggagatcgtagtgtccgtctataacggcacaacctggacttccacccgcctaaccaacgacggcacgccggatctggccccagccacggcagtgggcggcgacggcaaagccatcgtgttctggcgcaacgtctacacccccgatcccggtacgcagggcagcaacaacctgctgaacttcacgaccagagattgtatcatgtacagctgctatgacagcactaacggcacctggagcaaggaaaaaatgctttataacggtgctactggcagcgtgaaggcgttgcaggcggccatgctgcccgacggaaccgctatggcggtttactcgctggaccgcagcggaaccggagatacctccgcctacgagatcgcctattgtaccgtggctgctgatggaactcccggtacagccatgctggcgacctgtgacagcaatcttgacgaaaacccccaggtcgttgcagccaacttcggcagcggggatgaccgatttgtcatcggttggcacagtgtccgagacggcagcagcaatatccagctgttggctgtggacggcagcggcatcatgtccaacagttttcccggctctctgtctgccctgaccagcagcggcaacgccgtcgtgggcggagacttccgcttcgcttccctcagcgggaatcatcgcagccgcaatgatcttaccatcgtctggaatgagactgtcaataacgccaacggcgcggtagatcacggcattttgaaggcggccaagctgcgctatgccacaaatacctacactctgtccgcaccattggaactggcagagctgccggatcgcacgctggctgaccactttgatgtctatgtcagcggcaccaatcaggtgcaggccgccattcaggccacccggtatgacgatgaaaacccgcaggtaatcggcggcgtgaccgttccaggtgaggaaacgatcctctataccgctacctctgattttgtcaccgatgcggtggcagtggaacagatcggtgtggattatgcaacgctggcgttgaacagcctgacacccattcactttaccatccgcaacaccgggctgaacgatgtgacaaacctaacggtcagccttggcagcggggaaaccgctacccttacggaaaaactgctgcccaatgaaagcaccacccttaccgtctggcaccatgtgaaggaccgcgtgaccgacccgggctataccatcaccgccgccggcggcatccacgaaaacggcacagtgtatctggattatcccgacattggcatctcgcaaatggaagtgattgcggagagcgccggcaagcgcacggtgcgcatgaccctctataattcctctgccgccacgctggctggcggaaagaaccgcgaggtgaagcttgcgttctatgcggatgatctgcataccgaacctgcagaggtagcctgcaccacaaacggcgtatcggttaacggtaatgaaatcaccatttccgaagacagcgccctcacccgcattgatcagggaacctttacactggacctgacctatgatctgggtgagtatatgacattcattggcaaaaccgagatccccaatgtgggtacctatctgtacgccgaggcgtgggcggaaggcaaggtcggtggaacgggaagcaatcagcgcctgccggagtataacggcagtgacagcgaggccagcgtccatatgaccggcgcactggctcgcaccggagagcagctgacgatggatgtgacacaggggaacgacggcaacggtcacagcaccgccgccattaccctgcgcaacaactgcctgcagtctcagactggcgcagagctggtggccacgctgctggatgctgccgggaccgttctggaaacgaaaaagaccagtattggcggtgccatctccggggaaaccttccagacagaaaccgtcaccttctcccggcttggcacccgcgtagtggtgcgagccgcagtgcccggtaaagaccttctgacctttgaaggtctggcagtggggctcggcgattttaccgccaacggaacaaactatacctatacgctgcaaaatgatagcggagcaacatctacgctagtcacagcggtgtctggaaacggcgagcccgtgagcatcaacggacaggctctgtccaccggcggcagcgcaaccgttgccatccccaacagcggcacaaccgacattgtcgtgagaatcggtgctaaaacctacacgctgacgattctgcgcaatagcggcacaggcggtaatgaaggcggtggcggaagcggtaatgaaggcagtggcggaagcggcagc

SEQ ID NO: 5662 - DNA, 1954 bp, Unknown
  gut microbiota DNA sequence
ccatcaaggcaactgccggggctggcggctccatttctccctccggcaatgtcagcgtccgtgagggcagagatcagaccttcaccatcactccggataagggctatgctgtcgccaacgtcaagattgacggcaagagcattggcgcggcgaagtcctacacctttgagaatgtcagcagaacccataccatcgaggttatctttatgaaagccaacggcaaccctcagaccggcgtgtttgtggatgtagccaccggcagctattatgaggatgctgtggattgcgctgttctcttttcactacaagaaacaaattaatgacattttgagctgcgccgctatccaagcgcggcaaggagacagcattatgaaaagaatcacaagaatcattcgtccgatcatctgcatagttgtccttctcgttgctatgaccacggcagtcaggggctgctatcagagagagacagagcctatcgacattcccggcacatctgcgcctcagccatcagcgcctctcgcgggcgaagttatcccctcggtggacaggcagacagagttggcggaagccagagcgaagaatcccgacaccgtggcgtggctgtatatccccggtgcggaggtggacgaccctgtgatgcaggcggaggacaacggctattacctaaagctggatgaaaacggtgagtacgccatgtggggctgttattatgcccattgtgaaaacgaaatcggcggcagggataagctggacaaaaacaccaccatttttggtcactccgccagcaactgcgacccggacggtgtgcggttcaccaagctctaccgttatatggacgcagactttgtaaaggagcatccgtatatctatctctctgtggatggtgaggacatgatctttcagatcaccgcactgttcgtcacggatattggttttgactatattgcgcctgatcccacgggagatgatctgaccagcttctttgagacgattgcgcggaaaaactggcttgactttgatggcgtgaccttctccgaggaagatactgttctgaccctctccacctgctgccggaagtatgacaaggctaacagcggcaatcagcggctggtggtcatggcaaagctgctgccggagggtgcaaccgcacaggagttcagcgtatcccttgtggatagtcctgaaatgccctaaaagaaatcagaatacgacgataacaggacacccatccttgcggtactgaaaagcagcgtatgatatagggaaaacggcggccgccccgtacagagcagccgtggtttttgctgtccctacatttaataggttgcccaaataatttgatcaaaaaacatcgacatcccttgctctacacgctataatatagataatctaataagaaaacagtgttatcattactgctacagatggaatggtagccatatttatgaaaaatcattggaacggaatggctgaaccctcagggtgacaatgtcagcgatttgacagcgaaaaccatttttctcaggtgattttccgttttcttattttgacagagatttacaaaatagtcaggaaaatcaaggctttccttgactcatatttacttaaaataatcgttgttcccagtgtggactcgagctcctaagcactagttgagggttcgattccccctgggaacagtcaaattttgcaacaatgatgaccacaattcattgttgcttttttttatttataggtgcttacgagcaccgaatgccgcgacaacgagcgtgtaacgcgagtgagttcagggaaaaggagagaatgcctatggcagaaaaaaacagacgaacgagttacggatgaaaaagtggtagaaattgaaatggaaattttctaaatatgtgccacaaatcttgaaaaaatcttgatttgtggcataataaatatatattttgatttggagatgatgtta

SEQ ID NO: 5663 - DNA, 1985 bp, Unknown
  gut microbiota DNA sequence
aaaatctatattgttagagcagattaaagaagaatttattgaaaatgggtttgatagagcgcatattattaccattaattttgaagatttgcaatttgaaaaaataagaactgcagaaaaacttaattcctatgtgaatgagcaaatcaaggatcatgacaaatacttgatttttttagatgagattcagcatgtcaggagctttgaaaaggttttagcttcctttcgggcaacattaaattgctcaatttttattactggaagtaattcgaaattgctatccggcaagatggcaacattgttggttggaagatgtgttgaatttagaataatgccattttcctttgccgaaagctacgaatatgctacagctataggaagaaatatatctccggatgagtttatgattgattatatcaattggggtggcttccctttgcgtttttcgtttacaaaagaaagtgatattaagagatatttggagcagacatatgaaggtatcttagacaaggatattattactgacagatcaaaggttaatagacaaaactttgaaagagtagcaacatatattatggcaaatgcaggaaaggatttttccagtaaaaacatagagaactattttatacatcaaaatgcagatactttggataaaaagacgatatacagatatcttgataaaatggaaaaggcttgtctaattgatcgtgtaaaaagatttaatattgtaggaaaacaggcaatgtcgtatatagagaagcaatatgcggtagatactggttttcgcatgataaatacaaacttagtaaattttgaggataccttttttcttgaaaatataatttataacgagctaaaagcaagagattatgaagtctttactggaaaaacatataagggtgaaattgattttgttgcaataaatggaagaaagaaatgttttattcaggtggcatattatttggctggcaaggaaacgattgaaagagagtttggtgcttttaagccaattagtgatgcatcaccgaaatatgtgttttcattagatcgatttgattattcaagagatggaattgcacatatcaatattgttgattttcttttgggtaagaaggatattaatttatcataacgccacaaattaagaaaaaatttaaaattgtggcttctggaaaaaatcatataaaagggccaaagaaacggacgccagaagatgatgaacatttcagcgagtcatttgagaggatgatacgcatggcaattcagaacagagaaggagaaaacaatggcaaagaatgtctgagtactctgattgagtttttgaaagcgacgtcttgcacatactattagcagacagtataataaatacatcgaagcagtttcaaaaaatgaaaaatattcgacttttgaaagcgggtgacgatatgaaaacaattacaagagcaaagtatctcgacagaatcattgaactgaatggtactcctgacatcaagattatcacgggcattcgtcgatccggtaagtccaagctgatgcaggcgtatattgagtatctgaaaagccattttgaaaatatcaatattatcttcattgacttcatggatttggcgtatgaagaaatcaaggaataccatgccttacacgcttatgtggaagaacattatcaggaaagtaaaacgaactacctgtttgtagacgaggttcagatgtgtcccaagtttgagttggcaatcaacagcctgtactctaagggaaaatacgacatttatgtaaccggctccaatgctttcctgttgagtgcggatctggcaactctgtttaccggacgctatattgaaattcatgtgtttcccttcagcttccaagaatattgccaatattatgatgatgttagtgataaagataagctctttgataattacgctatcaagggcggtttagcaggttcttacgcttacagaaccgaaaaagacagaacaaactat

SEQ ID NO: 5664 - DNA, 703 bp, Unknown
  gut microbiota DNA sequence
agcagcgattttgagaacctgaaatacaacaccgccattgcagctatgatgtccctgatcaacgagttctataagaagaacgccattaccagaggcgaatacaagacactgcttactttgcttaaccccgtagcacctcatattactgaggaattgtggcagactgccggattcgagggcagactgtatcaggcagcatggcctgaattcgaggaagagaagaccgtagagagcgttgttgagatcggtgttcaagtcaacggcaagatgcgtgtgactatcaatgtttccaaggatgagaccaaggaaaatgtcatcgccatggcaaaagaagctctgggagacaagttgaccggcaacatcgtaaaagaaatctatgttcccggtagaatcgtaaacatcgtagcaaaatagttcagccatggacaaataagtgaaataaaatcatgcttgcatgattttatgatcgaatatgtccatgaggtaaacgccgtcttatgaacaaaggtagtcacgtagtgatggaaagcgtgataacgcgactttgcgaatggcgttggctgaacgttgaataaaataactcttgacagacattaagcctgccgggagttatttttttgtgatcggcttttctccagaatattttcaatctgacgaagctccgattccgtactgtattttttgatagcggtgatggcagcct

SEQ ID NO: 5665 - DNA, 484 bp, Unknown
  gut microbiota DNA sequence
tggggatgtccttcacgagatcatcctgcatccagaggggtgtcttggaatagtccatttttctgacctcctgtgtctgattttgcagtggaaaaaagaccggacaacatagacggatccatgccggagagatcggagaagccctccgggaacaattcctgcatggtctgcaccatttccatcatttcctggaaattatgaatattgtccatcatttgtgtgatttgtcgaagagctgatttctgagtctcgtcgcacaagggcatgagatcattacacagttcagtggcagtttcttcgtttgcagaagagggagcaatgcacagagaagtctccggatgcctgcgaaaaagtgtcagcgtgtattgcaactccgacatttttatgtaaacagcaagtcctttcagcagccggggatccatataataagccagtattttcagaatctgaatgcggttggaagtgaataatgtgtcaaaggccg

SEQ ID NO: 5666 - DNA, 933 bp, Unknown
  gut microbiota DNA sequence
agttaaaaaaacgtgtattatcccgaagaactggtagaagaagtcagagccagaaatgacatcgtggatgtgatatcgggctatgtctcattgaaaaaaaagggaagcaactattggggctgctgtccttttcataacgaaaaaacaccttccttttcggtgtcttcgaacaaacagatgtattattgcttcggatgccatgccagcggaaatgtatatacgtttcttatgaaatatgaaaacgataccttcccggaggccattaagatcctggcggaccgcgccggggtaaagcttcccgaagtggaggagacaccggaacagaagaaaaaagccggcaaacgtatgcggctgctggaagtcaataaggaagcggcaaaatatttttattatatgctgcgggatccccgtggcgaagtgggaatgcggtatctgacggggcggaagctgaccgatgagaccatgcatcatttcggactgggttatgccgggaaaaacggcgagcaggtggtacagtacctgcggaaaaagggctttacggacgaagagatcaaagactccggactggcaatgttttctgaacagcggggactgcgaagccagttctggaatcgtgtcatgttccccatacaggatatcaaccaccgggtcatcggcttcggcggcagagtcatgggagacggggaaccgaaatacctgaattcaccggagaccatgatcttcgataagagaaggaatctttatggactgaatttcgcaaggactgcccggacgggcaatattatcctgtgcgagggctacatggatgtcatagccatgcatcaggcgggatttacccaggcggtggcatccctgggaacggcatttacggtggaacaggctaaccttttacaccgttatgcggaaaacatcctgctggcctacgacagtgac

SEQ ID NO: 5667 - DNA, 1238 bp, Unknown
  gut microbiota DNA sequence
ccgggcttaccggtaaagtcatcaatatgcgtccttataaggacccggatgaatttatcaagaatctggggaaagaggcttttcaggagagaatcgatcaggcggagaacagtttctacttcgagatccgtatcctgagtgaacaatacgatcagagtgatccggaacagcggacgaagttccaccgggagatcgcacagaaactgtgcgaattttcggaagatctggagcgggagaattatttgcaggccattgccgaaaaatatatgatccgtcccgatgatctgcgcaaaatggtcataggatatgcttcccagacgggaatcgccagaccgattccccgtccccgcagcggagtgcagaacaagagcgatccttcggagagcggacggaagtcccagagactgctgatcacctggatcggagatgatccttctctgtatacgattgtacgcaagtacatttctctggaggatttcacggaggaattgtatcgcaaggtggcggagaagatgtttgcagagctggacaacggacagtttcagccggcggggatcatcagcatgtttgaggatgaagaggagcagaggcaggcagcggagctgttccatacaacgctccccgaattgtccacgaagcaggagagagaaagagctttccatgacattctggtgtcagtcaaacgcaacagctaccagtactatatggcgcagctgggtacagatgtcaacgcggtcaaaaaagcggtggaaggcaaaaaagcactggaagaattacaaagagcccgcatttctctggaataatagggtttgcggctcgggacagttataaaaaatacgaaatatggctataaataatggcaatgaaaggatggaaccacgaaaatggatgaaaacacacaggcaaaatttgcggagaagataaaagagctcctgaatatggcgaaaaagaaaaagaatgtgctggagtatcaggaaatcagtgacttctttgcggacatgcctctggaagaggaacagatggagaaggttctggagtatctggaccagaacaacgtagatgtgctgcgtattaccgatgacgatgatgtggatgacgaagagatcattctgaccgatgaggacgaagtggatgtggagaacatcgacctgtccgtaccggaaggcgtcagcattgaggatcctgtccgtatgtacttaaaggagatcggcaaggtgcctctgttaagtgctgaggaa

SEQ ID NO: 5668 - DNA, 1243 bp, Unknown
  gut microbiota DNA sequence
gaggccaacttacgtctggtagtcagtattgccaagagatatgtaggccgtggaatgctgttcttagacctgatccaggaaggtaacctgggtctgatcaaagctgtagagaaattcgattatcgtaaaggatataagttctccacctatgcgacctggtggatccgtcaggccatcaccagagcgatcgccgatcaggcgagaaccatccgtatcccggtgcatatggtagagaccatcaacaaactgatccgcgtgagcagacagctgctgcaggagctgggaagagaaccgacccccgaagagatcgcggaagagatgaacatgccggtagacagagtgcgtgagatcttaaagatcagccaggagcccgtatccctggagactcctatcggtgaagaggaagacagccatttaggcgacttcattcaggatgataatgtaccggttccttccgatgctgcagcatttaccctgctgaaggaacagctggtggaagtgctgggtactctgacagagagagaacagaaagtactgagactccgtttcggtctggatgacggacgggcccgtactctggaggaagtaggtaaggaattcaacgttacccgtgaacgtatccgtcagatcgaagcaaaggcattgcgcaaactgcgtcatcccagccgcagccgcaagctgaaggattatctggattaatggcggaagttatattatccaatcgaatgcaggctttaacagacatggtcactcccggcactgtgataacagatgtggggtgtgaccatggttttgtatcggtctatctcgtgcagagggggctctccccacgggtgatcgccatggatgtgcggtcaggacccctggagcgtgccagagagcatatccgggaatatggtctgcaggacaggatagagaccagactttccgacggtctgcacggcctgaagaccggagaggcgaacgggatgatctgtgccggcatgggcggacctctcatggagaagattcttaccgaaggaagagaacaggcacagggatttgcagagctgatcctgcagccacagtcggagatcccgcattttcggacattcctgatggatgagggatatcttctgctggatgagaatatcatctacgaagaaggaaaatattattttatgatgaaggtgcgctggctgggtgcgatgacggacgatgcggtacggcagaaagtcggggactcctggaagacggaaggtct

SEQ ID NO: 5669 - DNA, 3739 bp, Unknown
  gut microbiota DNA sequence
gcggagggaaccatcggcaacgcagaggagaaggcaagagagattattgatgaagctctgaagactgcagagaacaaaaagcgcgaatcactcctggaagtcaaggaagagtccattcgtaccaagaatgaactggacaaagaaatcaaggaacgtagagcggaagcccagcggtatgagcgcagagttcagcagaaggaagagaacatcgataagaaagcagatgccatcgagaagcgcgaggcaagtttagcatccagagaagaatccctcaatcgcatgaaggaagaagtctccagactgaatgagcagcgtgtgcaggaactggaacgaatttcaggattaacctctgaacaagcaaaagactacttattgaaaattgttgaagatgaagtgaaacatgaatcggccgtgatgatcaaggaaatggagagtcgggccaaagaagaagcagacaaaaaggcaaaggaatatgtggttaacgctatacagagatgtgcagcagaccatgtctctgagactacaatttccgttgtacagttaccgaatgacgaaatgaagggacgtatcatcggacgtgagggacgtaacatccgtacccttgagaccatgacaggtgtagacctgatcatagatgatacaccggaagcagtaatcctgtccggatttgatccgattcgtcgtgaggtagcgagaattgcgctggagaagctgattgtggacggacgtatccatccggccagaatcgaagagatggtagagaaggcgcagaaggaagtcgaagtaatgatcaaggaagagggagaagccgcaactctggaggttggtgtacatggcattcatcccgaactggtaagattactcggtaagatgaaattccgtaccagctatggtcagaacgcattaaagcattccatcgaggttgcacagttgtcgggtcttctggcagcggagctgggactggatgtgagacttgccaagagagcgggactgctgcatgatatcggtaaggcagtagaccacgagatggaaggttcccatattcagctgggtgctgaactgtgtcggaaatataaagagaacgctacggttatcaatgccgtggaatctcaccatggcgatgtagagcctacttccctgattgcatgtattgtacaagctgctgatacaatatccgctgcaagaccgggagctagaagggaaacactggaaacctatactagcagattaagacagttagaagatatcacaaacaatttcaaaggtgtagataaatcttttgctattcaggcaggtcgtgaagttcgtgttatggtagtgcccgagcagatttcagatgccgatatggtattgttggcaagagatatttccaagcagatcgaagctgaattggaatatcccggacagatcaaggtaaatgtgatccgtgagagccgcgtaattgattacgccaaataactgaccagtcagaaatgacaatttcatacgaagtaagaaaagctgttgtgctgttaaagcacagcagcttttttgataaaatttgtaactattcagagccatgcaaaactgcgttctgcgaatgcttgcattcaggcagataagcagttttatatggcgaagtaaccacatgagcaaaaagaaagctacgaagtagcggttttgcgaatggggttctgaatagttactaaaattttataaaaaaggtattgtacaaagaactttcttatagtatgatattcgaagtgtatgattgtatacgattatccaacgtccacagaagaaagcgtattccctatgggaaaaaacgagaaaggtatggtacgaaatgaaagcatatcaggaattatccaaggaagaacttttaacattgaaggcagagctgaacgctgcatatgaagatgcaaaaggcaaaggcctgaaactggatatgtccagaggaaaaccggcagttaaccagctggatatgacaatggattatctcgatgttgtaaattctcagagcgctatgaaggctgaggatggaatggatgttcgaaattatggtggcctggacggtattcctgaggcaaagaaactgattgctgacattctggaagtgaagccggagaatgtgatcgtttgtggcaatgccagcctgaacatcatgtatgatactgtatcccgggctatgactcacggacttttgggcaataccccctggtgcaagctggatcatgtaaagttcctgtgtcccgtacctggatatgacagacattttggaatcacagagcatttcggaatcgaaatgatcaatgtgcccatgacacccgaaggaccggatatggatctggtagagaaactggtgtctgaagatcccgctatcaagggtatctggtgcgtacccaaatactccaaccctcagggatattcctactccgatgagaccgtaagacgtttcgctgcattgcagcctgctgcaccggatttccgtattttctgggataatgcttatgcaatccatcatttatatgatgacagacaggatcagctgttagagatcctttccgagtgtgaaaaggcaggacatccggacatggtattcgagttctgctccacctccaaggtaaccttcgcaggagccggcattgcggctattgcatcttccaaggcaaacctggatgatatgcgtaagtccatgacgatccagaccattggctatgacaagatcaaccagttacgccatgtacgttatttcaaggatatcaatggtgtacgtgaacatatgaagaagcacgcagcgatcatgcgtcccaagttcgaggctgtactgcaagtgctggagaatgagctgggaggcttaggcatcggtacctggactaagcccaacggtggatatttcatctcctttgatgccctggaaggctgtgccaaggctatcgtggcaaagtgtaaggaagcaggcgtgactctgaccggagcaggcgctacgttcccctataagaaggatcccaaggattccaatatccgtattgcaccttccttccccacaccggaggagatggcaatggctacggatctgttcgtactctgcgtcaagatggtgagcgtagataaattactggaaaacaggtaagtattcgatttggatgagaagggatgataagtcatggaagaattcaagcgtatcagccgtgatctggtagcaaagggtgctattatcgactattatcaggataccatgcagattcccaacggtaatattgcaaaatgggatctgatcgaccataagggtgcagctgcggtggtagccgtgagagaagacggtaaacttctgatggtgcgtcagtaccgcaatgccctggagcgtgagacgttagagatcccggcaggcggactgaacgggagagaagagcccacggatcaggcagctatgcgggaattgcaggaagagaccgggtatcatactgaccatgtggaactgttgacctctatttataccacagtggcattctgcaatgagaagatcgatatttatctggccagaggactgaaagacagaggaaaccagcatctggatgaagatgaattcatcaatgtagaggcttattccgtagaagaattaaagcagatgatctacgactgcaggatccaggatgccaagacaatctgcggcattttaacttacgcgtccaaatacctgagtgagtaattccgttacagacaaaagcagtcacgaccggctgctacataatgattttag

SEQ ID NO: 5670 - DNA, 3429 bp, Unknown
  gut microbiota DNA sequence
ccgacaaacatcttcgacatggcaccgcatacgccgggagttctgcgttttggaaagctttcaaaaaatcagtagccccggctgggtataagaataagcagtgccgtaagcagacgtcggtacttagcggtcgtattgtgaccgcttatgtaccgctacgctctgcgacagagcgcgagcgtgccgcgtttcttataccctgccaagggctacgggattatttcactaactctcaatttagtactcttccgcaatatcaatctcttcctgctcggcagctgtcgtgtctgcagagtagggtgttctgtggaggtatgccagccagtaaccgcatccaacaattccggcaccgcctacgatgttacccagagtgataggcaggagggcttttacaaggaaattgaaccaggtcaggctctctgctgcaatgccgtagacctgcgctgtcagaagaccgcatacaccgaaatacatatctgcgatactgtgctcgaagccgcataatacaaatagcatcacgggccagtaactggtcagaagcttgccggagacccgcttcgcagcaaaggacatccataccgcgatgcacaccagaatattacacaggatacctcttacgaaagcctcactcacacttaaattcgtccgggatgccgcggcattaacaatggcctgtgccagctgctctccgaaaagatccggtgtccgtcccaccactaccagtactgccacaaaagcagcaccgaggaagttgccgatgtaaacaaacagccagtttttcagcatcttccataccgtgactttcttctccagcactgccagtatgatcagattgttgccggtgaatagctcgctgcccgctaccagtaccatagccatacccgctgggaataccgcagcgcctaccagcttcgccaccgatgcgatgccgatggtgctggatgccgtagtcgaagcaattcctgcaaaaccgatgaacataccggcaaaaaatcccaacagaatcgtcttaaagatcgacagatttaccttatggatcccgacttctatataatttcttgcaatttccaaaggtgaatgcataaccaaattcctccttatcctttttgaacagttccatcttgccatatttccaaaactcttgcaagcaaatccgaaaagaatatttccctctcttgattttcgcacgttaatttgctatagtgtttaaaggacaaacggacatcttccgactttgtcatactatttatttgcagcaaaaaacagaatcgaggaaatctacatgagtactcttacatttggttttatcggtctgggtctgatcggcggttccatcgcccgggcgatccgtcagaatctccctcagtctcagatcattgcatacgatatcaatgcagataccctgcgggaggctgcccagtgtggtgttgccaacgtgatcaccacaaggatcgatgcctccttctccgcctgcgattatcttttcctctgtgctccggtacagaaaaatgacgagaacctctcagctgtaaaagaaattctctcaccaaagaccctgctcactgatgtgggaagtgtcaagagtgagattcatacagagatcaaaaaagccggtctggaaggacagtttatcggcggtcatcccatggccggaagtgaccgtataggctttatcaattccaaggccgttcttttggagaatgcctattacattctcacgcccacggattccgttccggaaaacaaagtcacggattataaaaatcttgtacagcagctgggtgccatccctctgattctggagccggcacagcatgattacgttactgcagctgtcagtcatctcccccatatcattgccgcatctctggtaaatctggtgcgggacaaggattctgcggacggactgatgaagatgatcgctgccggaggtttcaaggacattaccagaattgcctcttcttccgctgcggtatggcagcagatctgcctgaccaatacagaaaatatctcgacactgttgtcctcctacattgcttccctgcaggggatccagcaggaattaaatgccaaaagcggtgatgacctgtatgaactgttcgacagtgccagaatctaccgggattccttcattaacactgccagcggcccgttaaaatcttcttatgcaatcaccattgacattgccgacgaacccggtgagattgccgccgtggctacgattcttgccctgaaaaatatcagtatcaaaaacatcggcatcgtccataaccgagagtacgaaggcggcgttctgcgcattgaattctatcaggaagaagccatcgagagatccacaaagatcctttgcgaaaagggctacagtctgcacaacaggaagtagaaaccctgtatctggctcatcgcactacacaaaaagagatcacctacaaagtgatctctttttccttatctttccgcttctgtttccttcgccgcactattttctccacacagccacatacgagcagtccaaacgcaccgccacaggtatccagcaccacatctgcaaaacacccatagcgtcctgggacaaataactgatggaactcgtccgctccggcggagacaaacacccagagtacgatcagcagatacagtttccggttcctctccttccagggtctccacacaccgtacagcagcactcccatacatgcatactcggagaaatgagccagtttacggattggatgttcaaaataagctgccatactgtcgatcacattctgtgtccagtgtttcccggaaatagcattcagaagttccgcacatttttctgagatcatagaactcagtgagccggatttttcaccgtcctgaccagaaaaagcgaaaatcaacagatataacagtacaagtaaaatagcagccacaacactgactgctatttttttcttattgtttttcatcgtcattaatcgtctggtatacgcggattcttgccgcatcactctccgacattccgatgaagacagccccgtacgtataagaatctcccttcatttcgatcctgacgatctgtaagaacgcatgcagcacttcatgcgtccaaatcctcagtttcgattcatacactgcaccgatacttaacacttccttgcacaaaaagcccactccgttgggagatacatctacgatgtctatgctgacttcctgcatgtctccctggtccaggcgctttaccatcagggttgaactcatttctgtacgcttgcttcgtcttctttcttccattatttttctccttttaagtcagcgatgaacatagcgtctccaaagctgaaaaatctgtatttttcatggattgcttcttcgtaggcgtgcagaatatgttctcttcccgcaagtgccgataccagcattaccagagtagactccggcagatgg

SEQ ID NO: 5671 - DNA, 46574 bp, Unknown
  gut microbiota DNA sequence
cagccgggctgtaccatgccctgctcgtccgcggcactctccacggtacggcaactggtggtacccacgcagatcacacgccccccatttttcttcgtctcattgatggtgttcgccgcttcttccgtcacctgataatactcagaatgcatatgatgctccagtacgttctcttcctttaccggccggaaagttcccagtcccacatgcaatgtcacataagcgatcttaatgcctttgtccgcaatctgatgcaacaattcctgcgtaaaatgcaatcccgccgtaggtgctgctgcggagccttcatatttggcataaacggtctgataacgattcttatccttcagcttatgggttatgtaaggaggcaggggcatctctcccagcttgtcaagcacttcttcaaaaataccctcatattcaaaacgtatcagacgattaccttcttccacagtctccaggacttctgcctttaatagtccatccccgaaggtcaggcgctgaccgggcttgcatttcttgccgggctttaccagagtctcccagacatccgcttcttttcgttttaatagaaggacttccacatgtccgccggtaccttcccgttctcccaaaagtctcgctggaatcaccttggtgttgtttaacaccagacagtctccgggatgcagatagtcgataatatcccgaaaaatgtgatgagagatctctcccgtatttttatccagtaccagcagtctggaggaagaacgatcctccagcggatcctgtgcgatcagctcctggggaagatcaaagtaaaaatcggattttttcagttcggtcgtctctgccattacaggctcgctccttccacaaatgctttatatccgcgatatgcctcatatacatcggccttgctggtagcttcccagggtgcatgcatgttcagcactgccacaccactgtcgatgacattcatgccatacagtgccagaatatatgcgatggttccaccgccgcccaaatcaaccttaccaagctctgcagtctggaagttcacctctgctttgtcgaagatatggcgcaaatgtgccagatactccgcattggcatcgttagaaccggacttgcctctggctccggtgaatttgttgatgaccataccgccgcctaagtatgccacgttctttttatcgaagctggacgcataggtaggatcaaaagcactgctgacatcggaagacagcatacagctatgtgccaggcatcttctcacgttcagttcgctgtattcgcctgccagattcatcacctctgccacggcattttcaaagaaatgagactgcatgccggtagcacctacggagccgatttcttccttatctaccagaatacagcacatggtacggtcggtcacatcgctgtccagcatcgcctgcatggaagtgtaagcacagaccctgtcatcctgaccgtaagccagtgtcatgctgcggtcaaagcctgcttctcttgcttttcctgcaggaacgatctccagctctgcggaaacgaaatcctcttcatgaatatcgtaggtctctttcagaatatccagaacacctgcctttactgcttcttttccggcttctttctcgtccttcttcttatctttcttatcgatcagcagaggcttattgcctacgatgatatccagagcttcaccctcgataacctttgctgcctttttctccagttgctcctgtgccagatggatcaacagatcggatacgaagaatacaggatcatcctcgttctcaccaatattgatttctacacaggtgccgtcctttttcacgatgactccgtggattgccagtggaatggtcacccactggtacttcttcacgccaccgtaataatgggtgtccagataagcgaatccaccatcctcatacaggggattctgctttacatccagtctggggctgtcgatatgggctccgaggatgttcatgccatctgtcatgggcttacgtccgatctggaacatggcgatggatttgttcatccatacgctgtataccttatctccggttttaagagcagcgccctctttgatcagactctccagttcacggtaaccggacttctcaatagtattgacaatggtgtcaatgcactctctctcggtcttaccgttgtctaagaaatcacgatactgtgcgtttattttctccagctcttttaactgtttggaagaataggtctcccaggtgtttttcttttccatatttatcctcatttccgcatccgtcttccggatactcttttactataatcataacaggagaggttcctcgccctctccgtatcagtgtactacatttgcgtccgcagttcaattcctgtctgtcagattttcatcctgccccttaggatccctgtcgatctccgtataatgtttttttctgcgctggatcttcttgatctcccggatgcgtctacggttctctcttgccagttcgctcttactgctggcatgatccaccagtacccggttcaccggacggaaataacggttcagataagcaccgatcagaatgatatacatgcagaaatacatccacaacataatgatcacaataatggtcagacttccgtaaatactatacccatttccataagacacatacatggaaaatccccaggaaaatatactccatactaccgcagcaaagcaggctcccggaacctgttccgtgaatttcagctttgtgtccgggatatatgtataaatcaggccaaacaaaagaatcagcaccgcccatacgaacagaaagcggaaattcatcaggagactcacaaacatctgcagctgcggaatcctatgtaatgcaatatccaccagctgattaccaaataccatgaaaaacagtgacaaaatcaacactacaagcatgatcaacgtataaaagcttgcaataaaacggatcacgaagtaattacgcttctcgcccacaccattgaccgcatttaatccccgcatcagtgccatgacacccttcgccgccgaccagaccatagcgatcagagccaccggcagaattcccacagaactctcatacacatcaacgaccagactctccaccatggcatctgcaatatccggcgtcacatccgtcagcgccgtgaccagattctgctccgtcaccggggtataaggaatcaccgcacagactaccatcagcatcggaatcaccgacaaaaacaggaaaaaggctgtactcgatgcataagcgctgatattctgttttttcatctggctggaaaaatcacgccagatgctgattattgtcctgagcatatctcgcatccttcatagaaaaagttaaggatctgttccgcgccaagcccctgtagtgccatatttttggcaccgttctggctcattcccacgccatggccgaatccaccgccgataatgttatatcctaccacatttttcttatcatggctaggttcaatcacaaaaaatgcactgggaaggagattcggcatggccacctcactaccatcctgccttaccaccttcgtaaccccgtcacaaagtactgctctgatattatattccgagatcaccttaaaggttcctttgtccgtgacaatgaccatttcgtctgccacaccaccggggccacgttttacaacggagatatcgtttacttttgaaaaagcttttatattttgactgacatagtcatcgtccttcagagtcaatattaactttccgttggcttcataacgtttcttcagcgtctccactatccgatccacatcaatctcttttaccgtatatgtccagcggtaccagccttcctgcgcttcataatcttccgcatgtgtctctgtgataaaatcccggaaagcctcttcttccctcagatcctctggacctgcatctccgtttacctcattggtgtctgccgcgattgccccaccgtccgtctgcatcaggctctccggattcagccggctgctcttcagataatcaagtgcctccgcctccgctgtcttccatacatttgccgtagttcccacgccacaggaggtagagtaataataagtgttcgccaccgttccttcatctgtcaggatcatctgtccgtaggtctccttcaccgccgtggtagcactgtcagcttctgtgatattattgtagacctgataggaagtgctgtcgtccacatgggcgccgtaccggggatagcccgcccgcagcatatgtccgtaggcataggtcctggcacagatagcctgtgctttcagggcttccagcgggtaggatgccggcatctcacttggcactacactgtagagatattcttccagcggaagctcatttaccactgcaattccgtctgcggtccgcagcagctctatatgccctctgtaagaaggtgttccctgacttcgattcacattgatcagccgtacccggccggtcagcactgtcggtactatacggatccgttctcccacgaaataatcgctgtctgtgtcaatggtcacctcgtctcccctggaaaacaattcttcctgcatttcctcaccggttccgtactgtagtagaaaatcactttccgccgtcagtgtcaccgtctggtgcaaaacatccgaaaaatccgaagttttgatcaatacccggattttgtccatgttatcttctctggccagcaggataccgcagatctcgtcatttttacgaataaagtccgcatccatatagccgaatcgcagatcttcagtggtacacatggtaagctcccggtacaggcgataccctttgtaatcctcagccaacgggatccggcccctgccctcgatctcgataccgctttcatctgccgacagcacccggcctgtgaacttctctgttttcaggataacggcactcacgaggtcatccgtaagttccacatctgccagctgttcccgcatctggtccggtgtcggcagcctgcctgcctcattcgcctctgtatccagatcataggtctctcttactccgtcacagaataaagtgatctgcccagcttccgcctccgtgatccagacgtttttcaattcccgtactactggaatatgctgaggcagggcctcttctgtctccggtgcccccggctcctcccgaccgcagctatgtaacaaatttatcagaagtaaaaaaagaagaaatgccgtacctaacacacacaggtatttcttccactgtattctctgttctctggaaagtttataataattctcaagcagtctgtttttcttcaaatcatttcccgcctattcagaatctgttttatgactttaaaagagcagtcccaaaggactgctctctcttttgtattgttatccccaaaatgccgcctcttaccttttgactcctagcaatgctaggtgggtaaccgcaaccaaccttttgccttcccttccaatcctccttgcggagtgagggcttgacagccacttggcaatataggaatcccgtttaaagtaaatgtaggttcaaaactggtaagagttatcgtacatctcaggttaagtatattatagcgagttgagatccattttacaactgaaatttttaccaatattattatctgcaaaaaaggctgtctccgaagagacagccttccatatttgcatttgtctgtaaagtaagattacagctgaggaccagcagcaaccagagccttaccagcatcatttccttcgtatttagcgaagttcttgatgaatctctgagccagatcctttgccttctcttcccactgggaaggatcagcgtaggtatctctgggatccagaataccggtgtcaacaccagtcagctcggtaggaacttcgaaatcgaagtaagggatcttcttggtaggagcggtcttgatagcgccatccagaatagcatcgatgataccacgggtatccttaatggagatacgcttgccggttccgttccatccggtatttacaaggtatgccttagcaccgttcttctccatcttcttaaccagctcttctgcatacttggtaggatgcagctccaggaatgcctgaccgaagcaagcagagaaggtaggggtaggctcggtaataccacgctcggtaccagctaacttagctgtgaaaccggacaggaagtagtactgggtctgctccggagtcagaatagatacaggaggcagtacaccgaatgcatcagcagacaggaagattacgttcttagctgcaggtgcggaagaaataggacgtacgatattcttaatatggttgataggataagatacacgagtattctcggtaacgctcttatcgttgaaatcaatcttgccgtcagcatcaacggttacgttctcaagcagagcatctctcttgattgcgttgtagatgtcgggctcggaatccttgtccaggttgataaccttagcgtagcatccaccttcgaagttgaatacgccgttgtcatcccagccgtgctcgtcatcaccgatcagcagacgcttaggatcggtagacagggttgtcttaccggttccggacagaccgaagaagattgcagtgttctcaccgttcatatcggtgtttgcggagcagtgcatggaagcaatgcccttcagaggcaggtagtagttcatcatggagaacatacccttcttcatctctccgccgtaccatgtgttaacaataacctgctcgcggctggtgatattaaatgctacacaagtctcggagttcagacccagctccttgtaattctcaaccttagccttggatgcgttgtaaactacgaaatcgggctcgaagttcttcagctcttcctcggtgggtttgatgaacatgttggttacgaaatgagcctgccaagctacctcaacgatgaaacggatagccatgcgggtgtccttattagcaccgcagaatgcatctacaacgaacagtctcttgttgcacagctccttcttagcgatatcctttacagcagcccatgtttcctgagacatacgatggttgtcgttcttgtactcatcggaagtccaccatacagtgtccttggagttctcatcttcaacgatgaacttatctttgggagaacgtcctgtatatataccggtcataacatttaccgcaccgagttcggtctcctgacctttctcgtagccttccagttcaggcttcatctcttctttgaacaactcttcataagaaggattgtgaacgatttctgtggttccggtgatgccgtacttacttaaattgatctctgccatcttacattaacctctttcctttttatttatgtgtgtctttatcttctgccacatcgtctgtattatctcaaaccaacgtagaaaagtcaagaaaccgttaaaaattttatattgattttatattgattttatatttcagcagcctgtttccttcgcaagccactttttttcctcttcgttcagataaggggaaatcttttcgtaaacagtcttctgatactccctcagatactttttctgggtatcgttcaggtacttttcttcgacagcttccatatcaatgggcacccatgtcagggtctcgaaatgcatgaactgaccatactcgttcttcacatcatttttcgccaccataacattctcgatgcggataccgtggctgccctgaatatagatgccgggctcattggtgatatccataccatcctcaaacactgcctccaccatacctccggtgaatctccagcgcatgttctggggaccttcgtgcacattcagaatataacctacgccgtgtccggtaccgcactggtaatcaatgtccatatcccagataggctgtcttgccagaatgtccagattccgtccggtacagccgtagagccagtgtgcatgggtcagctgcatcactgccgctgctaccatggtgtaatgctttttgatctcttcggaaatgggacctaaaacgatggttctggtcacatcggtggtacctcccagatactgtccgccggaatctaccagaagcattccttccggctccagagtcgcacagttgtccggggttgcttcgtaatgcatcatggctgcattggacttgtaacctgcgatggtcgggaaggacagatctaagaattccgggatctctcttctcttctgttccagatagtccgctgcggtcacctcagtgatcttctctttgcccacatgggtcttcagccagtagataaatttcgttacggccacgctgtcctttaaaaagatctcctgcattctcgcaagttctaccggattcttaatggcctttaacagttcggtggggttcttgccctctactaacttctgattcttctgcaatgtcttgtataaagtatagctgcaatatctgttgtccacgaggatcgcattgcccgcagggagtgccttcaggaaatctacgacggtgtcgtattcctttacctcgatacgatgagctgccaggtattccgtcacctgtgcatccagtgctttctgctggataaacagagttgcggactcttctgtaatataggcataggacattgctaccggattgcattccacatcacaaccgcggatattgaagagccacatcagatcatccagtttggtcagaagcagtgcattggcaccgtccttcgccatcttttctctggtctctgtcagtttttcctctacgctcttaccggcgattttctcatccagtacggttacttttccggcaggaaaatccggtctgtctgtccagatgctctctgccagatccttctcataagcgatgcggatctgcttcttttccagtaccttttcgtattttttgccgtccatggcagcgataactctgccatcaaatcctaaagtctgtccctgctgcatgttctgctccaggagttcctcgatggtgggaactccctcctgtaacatacggaacagttctacggtcgttccctccaattctgcttctgcctggatgaaatatctgccgtcagtccacagtcccgcgccgtctttccagactaccagtgtgccgttggaaccggtaaaattgcagaaatattctcttaccttaaaataatcgtttacatattcggaattatgaaaatccgctgtgggcatcatatagaaatcaatgccctcttcctgcatcttcttccgaagaagtgcaagtctgtcctgaatcactttgttttccatgttatctccattctatgatgtcggggtcaaaagcccccgactttgatgcctacggattgttccgtgctacgcactcccacgtctccgctccgcttcggtccgtgctagacatgtgccactggcacatagcaccctacccaatattcgcatatcgtgggattatcatcccacttttatgctcatatcggggcgggtcctaaggtctttcacccacctatgagcaagctcatgtgggcttagaccttttgaccctggcatcattctatatatcagttaatcaatacccttccgtaagttcacccttgcagagtcctacagctctggaagtaccgattctttcacagccaagtcctaagaacatttccagatcttccatgctggatacgccacctgccgctttgatctttacgttagggccaatgtatttcttgaacagttccacatcctccttcgtggcgccgccggttccgaagccggtggaagtcttgataaagtccgctccggcattggtcactgccttacacatggcgatcttctcttcctcggtcagataacaggtctcaatgatcaccttgaggatatgatgtccgcactctttcttcagtgtacggatctcttcctccaccttgtcaagcaacccgttcttcacatcgctgatattcactaccatatcgatctcgttgcaaccatcctccagtgccttgcgcacctcggccaccttggcttccgtcacactgtatcctaaggggaatcctactacggtacagatattgattttgtctccgtaagtgtcatggattctcttgatatagcaagggggcacacatacgctggcggtatgatactgaatcgcctcatcgcataatttctggatgtcctcccaggtagcaaaggctttcaactgggtatgatccacttttccaagcatttcttttgcagtcatgttgttctccttccggtatctattttcatattattgttacagtctgctaaccttacctattatagcaaagaacccccgcaagataaaggataaagtttttacacaaaaacaataccgcccagaaagccgttgacgtgacttgggcggtatctcactaatttttaattcttaactacattccaagaaaactcttcaccgtgtctttcatcttgtccacgtcacactgggtatcgtgcagcaccggtgcggtacggatttcttcgatggcattgggtactttcaccttggcgatcttagacagttcatccaccagttcaaagtcacccatggcatcatacttgatgtcaatggcatccataacgcttctggtgaacttgaaggggcttgcggtggaagcgatcacggtggtcttgtgatctccggtctcaaccacatacttgccgtacactgcggaagctactgcggtatgggtatcgatgacataaccgcatttttcatacagacggcggatctctgcggcggtctccgcttcgcttgcaaagttgccgtagaaatcagccagctgtgccttcatctcttcggtgatctcgtatttgccgttgccggacagagcgctcatcagctcacggttcttgtctgcatcattgcctgcaatacggtagatcagacgctccagattgctggagatcagaatatccatggacggtgaagtggtcagtacgaattctctgttgcggtcataggtgccggtgcggaagaaatcatacaataccttattgtcattggaagcacagatcagcttatcgatgggcagtcccatattcttcgcataaaatgcagccagaatattaccgaagttgccggtgggaaccacaacattgatcttctcaccctctgtgatcttaccatcttttaataattgtgcatacgcataaacataataacaaatctgaggtaccagacgtccgatgttaatggagttcgcagaggaaaactggaagcccttctcatccatttcttttgccagttccttgtcggagaaaatcttcttcacaccggtctgggcatcatcgaaattaccgtgaatgcctaccacaaaagtattggcacccttctgggtcaccatctgcttctcctgaatcgggctgacaccgttcttcgggtaaaatacgatgatccgggtacccttgacatcggcaaagcctgccagagctgccttaccggtatcaccggaagtagcagtcaggatcacgatctcattcttgatattattcttacgggcggaagtgatcatcaggtgaggtaaaatggaaagtgccatatccttgaacgcaatggtggaaccatggaacaattccagataataagcatcatccgcctgtaccagaggagcgatcttctccgtatcaaacttggaatcataagcgttgttgatacaatttttcagttcttcctcggtaaagtctgtcaggaataatttcataacttcataagctacctgctgataactcattccggccagttctgaaagactcttgtccaatgcaggaatatgatccggtacaaacagtcctccgtcatcggataatcccttcagaattgcctgggatgcggttaccggttcgctgttgctgcgtgtgctgcgataaattacttccatttcctctcctccgtgtctatgtatgaatgtatgctggaatatctccctggcatctccatctatattttcgaaaagtatagcatactttaaacactgttgcaaggtgaatcattgaagcgcttttttatccgaaaaaaattcatgtccgccatgtcggaataatagcgtcaatttttcatcgaaccagcgcatactttcactgtcggcatattttctggcggcaaaatacaatgctcccctggaaatgtcctcgcccgccagagcccgtccgacagcttctaccgtctcttcactgacacttactttgtaataactgccgtcggcaatgggagaaaactgtgacaccccgttttcccgctggaatacgatctccgtaatgctgtccggaaatttttcggaattcagacggttcaggatcacattggccaccaacagcttcccatcctcgtcttcgcacccggcttccgcttccacgatccgaagcagcacttccagatccgcctgttccagctggtacttactctcccgctgtaattcactgcaatccactactctctgtccggaagaagtccgggaagcaatccccatcatgatgctttccttgtccgccagcaggctttcttccatatgtacctccgacaccgtctgctgcaatttcctacagatttcttccatgcggcagagacttaaaacaccgatcagaaatatcagatttattacaagtagtccgcttaatgctcttttatacatacaggctttgttcctttccccaattctcattttggctctaacttcattttatgcagctcgtccgaaaaatatatctgttgttctccggagaaaaatgttactatagaaatatgagtgagcaaaacattgaaaaagaacaattatataaaggagtcttccgggccgggaaaaaagacggaactgtctattaccgtgcttctctgaccaaaaacggcaagcatatcagtctgggcagtttctccgatgccttacaggcccatcgggcctacgaacaggggcttctcctgctgtccgatccttccctgacactgcagtcctacgagaaggtgtcccctttgtccttcgaaaaatgggtcagtctgatcaatctgcgggacaacggactatacatcggcaatccgatctatctggggcagcagctcttctattattatttgtccccccaccatgtcttaaaattcgacatggaagacctgttctattattcttcccataagatcatgtgccggggaaatcattattttgtggccgactacggaatgcagcagacactgacctcacgctatggcatcaaaagctacggagttcccggcgtggattattgttttgtcaacggagatcctacggacttccgcagggaaaatctgcagatccacaacatctatcacggtgtccggaaaacggcagcaaaaaacggacagtacgtttatactgtccgcattcatatccgtggtaattatattgtggggcgctacgctactgatatcgaagcagccattgcctataacaaggccatcgatattttgcatagcaaaggagtcaccagtaattttacccccaactatgtggaagccatcactccacgccgttatgccgagatctattctacgctcgacattgcaccgggaatcctgaattatgagcctatttctccgaataatcaataaaactgatattcatattggcatagcctgcaatgccgtcgatggtgacatcattggcatattgccacatggtaaaacgataaggataatccggcacgtcttccatctgggaaagccatacgtcatatgccgataattttgacaggtcaatttctttgatcagccactccttgtctccgtaaagcaggggcttatatccggctgcctctatggtatccaggaaagccttggtgatcttcgtcttgtcagcacgactgacagtctcgattctcgtcgtatcattgtccacaaaactcatatcaaaagccaccggataggtgatcttgtagtctttgatattctccagaacgatattggattcctccaccgcctcttcttccgtgatggcctgtgaggtaaaatacaccccgatctgtaatccagcatctgtggctctcttgatattgtctacgaaataatcatccaatacgatctgtccgctgccatagcctctggcacctacccgcaacatcacaaaatccactccggcttttttcagtttcaaaaaatccacataatcctgatatttggaaatatccaccccgacataggaagtcagtttgccgtcctgataatatttcatcaggtcggactggcacaccagtttggtgaaatcatattcgtgcttgggaaggtacgggctgatcagcacccattcttccttgccgtcccggttggtcaccagggtatgttttccatcggtggagggatccgcttccgctgtttcctttttgttatccttttgggaaggctccgcagacggcaatggtgttgccgtagtctccgggtacatgtcccagaaatccagatccgaaggagtcaatgtgcttccggtgatcaggtcctgcgtgtccggatatttgtctgtctgattattttctgcctgttgtacattctccgtctgtgcagccgtattgttctgttggtgggaagtgggctgtctgttcatgatcagcaccaccgtaaggatcactgccacgaaaattgtaacagcaacgatggcactgatcaccgtaggtgtcagccctcctccgtgatcttcataatcgtccggaagacgcatatcttttctcctcttgtactttctttatgcttttacgatacatttcttcgggcatttctccatgcaggcaccacagcccacacatttctccggatcaatgattgcatggaaattctcgaccttcacagcatcgtgctggcaattctttacgcagataccgcagcccacacagccggtcttgcaggccttcatggtaacagggcccttgtccgtagaactgcaggctacctgtaccgtattggaataaggccgtaagctgatcagatgcttggggcagacctccacgcactttccgcaggccttacatttttccttatctactacagccacaccgttctctacatgaatggcatcgaagggacagacctgtgcacaggttccgaatcccaggcagccactgttgcaggatttcggtccgcctccgggcacaaagctcatcatacgacagtccttgatgccataataatcataatccgttgtggtccgctcgcagtcaccctgacaatgcacataggctaccttgcgctcggaagcctctgcttctacacccatgatggctgcgatttttttgccgacttcctctccgcctacgggacaggtgttcaccgcagcctctccctttgcaatggcagctgccagaccggaacatccggcgaagccgcagccaccacagttatttccgggaagggcagctaacaccgcctcttccttctcatctacttctactttgaatttaatgccggccacgccaaggaacagtcccacaaagatgccgacgattccgacacaagccgcagcaatcagaattcctgttatactcatctatgttactccttcctagatcagaccggagaatccgcagaaagcaatggccatcagtcctgctgtcagcagtaccatgggcattcccttgaaagattccggcacttcattgtattccatcttctcacgcagtcctgccaggatcacgatggcaatggtaaagccaagcgctgtggcaaagccatttacgataccggtcagaataccgtattccttctgcacgttggtaatggctacacccagcaccgcgcagttggtggtaatcagaggcagatagacgcccagtgcctgatacagggaaggcattgcctttttcaggaacatttccacgaactgtaccagtgcagcaatgacgagaatgaacactatcgtctccagatactcaatgtgtaacggctgtaagataaatttgtagatcacacccgctaccgcactggccagcgtaataacgaagataaccgccgttcccatgccgcccgccgtcttgatcttgcgggacacgcctaagaaggggcacagtcccatgaactggcttaatacgatattgctgacgatggaggaactgatcagtaacagaagcatatcttttacactatccatttatttgtcctccttatctaaatcgatggtctccagatcatcctctgccgtctgaggttttgctgccgcttttgccgcatccttcacagcctcttccgtggtattggtattgtcataaaaccgctccgagcagccgctctcgccacagtgcagacagtcatgtccgcagccggactggatcttctcgtaatccttgccagccagctttctcttattcttgatatagttctgcaaagcggtcagtgcagccagtacgaagaacgcaccgggagccagtccgaaaatattgatcgtcacataggaatccggcatgatccgaaatccgaagatggatccggccgccaggatctcacgtactgcaccgatacaagtcagtgccagagagaaaccaagtcccatgccaagtccatcgaacagggaaggaatgggcggatgggaatacgcatagctctctgctcttcccagaatgatacagtttacaacgatcagaggaatatacacacccagagcatcgttcagtgacggcagatacgcctgcaacagcagctgtaccgcagttacgaaggatgcaatgatcacgataaatgcagggattctcacccggctggggatcactttcctaagcagcgaaatgatcaggttactcatggtaagtaccactgccgtggtcaggcccatgccaagtccattcatggccgatgtggtcaccgccagagtcggacacattcccagcatcagtacaaatgtaggattttccttgatgataccgttataaagtctttcacctgctttattcattgccagcacctccctgtacataatcactaaatgccagaaggcttccgttgacagcgttggtcactgctttcgtggtgatggtcgcaccgctgatggcatcgatctcactgtcagaagtggatccggtcttggtgtaggcaaagctcttcacgttcttgttgtggaactgcggcaccagcacatctcccgctttcatacccagtccgggagtctcggaaatacttaaaatagaaatatcattgaccgtaccatccagacggattcccacatacagcacaatatttccgccatagccttcggaggtcgtggtctggatcacatagcccaactgcgttccggaagcatcctgcgcttcatagacggtaccgatagtgattccggtatctgccagcttctgcgccgtatccgcagaaggtgtataagcatccagttcttcaaaatgctccgcatccgcaaagaccgcctgacaggcttcctgcaccgctttttcctcctgctgacggatgggctccttggtcagttcatagacaaagccaagcaaaagtccggcaatcagagtaattgcgaacaaaatgcccgcttcttttaacattgcctgaatatcattcttatttttcacgtttcgcacctgcctttctgccaaaagccaccggcatggtgaatttttcgatcagaggtaccagaaggttacctaaaatgatggcataggacactccctctgctcccggtccgaagatacggaagattccggtaagaagtcccagtaccgcaccgtatacatactgtcccttgatggtaatcggtctggtgacataatccgttgccatgaaaaaggcacccaggatcaggccgccgcctgctaactgtgcagacagataggcaggatcaaagccgtgcccgccgaagattcccgcaaacaggatcacggtcacaatatatgtaccggggatccgaaggtcgatcacaccgatcaggatcaggaaacaggcaccgatcagcagtgcgatcacggaagtctcgccgatggtaccggcggtcttacctacgatcatgttcatgacattgacactctctcctgccttcagtgctgccagcggtgtagccccggtataggcatcacaggcaaaattcgtcatctgggacgggaaagagatcagcagaaagcatctggctgccagtgccgggttcataaagttctgacccagaccaccgaacagcatttttaccacaaggatggcaaacacaccgcccaatgccgccatccacagcggaatgctcaccggcagattcagcgccagcagcagtcccgttaccactgctgacatatcggaaatcgtgatttttttcttccagagccagccgaataataactccgtcaatactgtactggcaatggtcacagccatgactgccagtgctctggggccaaagttatagattccgaaaccggcagccggcagcagtgcgatcaccacggctgtcataatgctgctggtcgttacttttgaccggatatgaggatttgaagatacttttaaaagtccgctcactgttcttccctcctacttctttttcttcttggcaagctggatcttacgcatggatttgatctcctgcgtcagaggacgctttgccgggcatacaaaactacagcagccgcattcacagcattccataccgttatgttccacgaaagcctcttcatcaaaatgctccgcataggttgccaaaaggctgggaacaatacgtccgggacatgcttccacgcaacgtccgcagttgatgcagggactgggctccatagcggatacatcgtcctgggtcagtgccagtaatgcggtagaggtctttgtggtaggtacatccagctggaacataccgaatcccatcatgggacctccgcagatgatcttctccggctcctgcttaaatccaccggctatatccaacagttcctgataactcataccgataggtacacggaaattccggggattggccacagcatctccggtaacagtgatgatacgttccatcagagggcgtccttccgtcaccgctctgtaaatggcaaccacagtatctacgttatctacaatacaacctacgtccgcaggcaacatggaggaattgatcttccgtcccgttgtggcatagatcagctgacgctccgcgccctgaggatacttggtcttcagtgccttcaccgtgatctcaggatcgttcttagtcatctgttttaacagagagatacaatccggcttattgtcctccacggccagaataccgtgggcattgtcaaacagcttcagcatgatcttcagaccaccgatcagcttgtccggctcttccatcattctgcggtaatcggaagtcagataaggctcacattccgcacagttagcaattacatattcaattttgtcaggatccttgggagacagcttgacatgcgtaggaaatccggcaccacccatacctacgataccggcttccttcacaatgtcgatgatctcttccttctgcagtttgtccaccggtgcataaggatgaaattcttcgctctcatacaggccgtcattgtcgatcacgatactctgtatcagatctcctgttaccacacgtctcgtctcaatggtttttaccgtacccgacacagatgcatagatgggtgccgacacgaagccaccactttccgctatcttttgtcccgccagcacccggtctccttttgccacgatgggcttcgccggagcgccgatgtgctgggacaacggatagaccatttcccctttgggcaggacatcctggatcggtttgtccttggacagatcttttccatcatagggatgtattccgcctacaaatgtcaactttgccatttcctaacatcctttctaaatagttacttgtattgcaaatcacattatgataattgtactatttttatcaacttttatcaacaaaatgctactgcaaattctaaaattatggtaaaataaattcacccatagaaagtctgtgtgactgcttgcaggcagcacagattttctatgaggtgaataaacaaacataagtaagtagggtgatagcccggattacgcatgtttgttacgctttcgagagttcgaagaacgaagaaagcgtttattaacttgcccacacggcagaaagaggtcatacatgaaaaaatcagaagagactctggaggatttcgcgatctcctatcccttggataagctggcgcctctggaacaaatcctttttctcgatattgagaccacgggattcacttcccgtacttcttatttatatatgattggctgtgcctactatcaggccggcaaatggcggaccatccagtggatggcggatgactattcccaggaaggggatattctcactgctttctttgattttgcaagagactatcgctatctggtacatttcaatggcaataattttgaccttccctttatcacccagaaatgtgcgcagttaaagcttccgttctcctttgacggatttcagggtatcgacatttaccgccggatctccccttataaattcttcctaaagctgccgaactgtaagcagaaaactttggagcagtatctcggaattgcccggaccgatgttttctccggcggagaactcattggtctataccatgattatgtaaaaaatccttcggaattcacagaaaaagcattgtttttgcataatgcggacgacctgaagggaatgttggaagttcttccgattctggcctactatgatctgttcaacgagaattgtgtgaaagccagaaaagtacaggccaactattacaaagatgtcagtggcgcacaacgcaaggaactgttgatcaccctgcagattcccacttccctgcccagactggtaaccgcttctgcggccaactgctatttccgtggagaaggagaatcggctactttaaaggttcccatttacgaagaagaattaaaatatttctattccaactacaaggactattactatcttcctacggaagatgtggcattgcacaaatctgtagccggtttcgtggacaaagagcacaggctccaggcctccgcagcgaactgttacacccggaaattctcctgctatcttccccaatgggagattctgttcacgccattcttcaagagagattataagagcaaggaattattcttcgagttgacggatgaaatgaagaaaaacagagaaggatttacacagtatgccaatcatgttttgtccatgatcgcatctacttactaaccggaacgaaatgaggcatcgtcccttagatgtacttatagcacagaaagcacaaaaagaggaaagcaaaactgctttcctctttcttattttgtcattttctgtactcactacatcggtttcacataatagaaagaactctttctgtcaaatccgatttcgcgataattcataatctgttcggtacttccgataaacagcataccacccttggccagtgactggtaatacttacggaatacttcatcctttgcttcttctgtaaagtaaatcaatacatttctgcacacgatcagattacagtcggtaggataagtatccttcagtaaattgtgctggtgaaaatccactcttgccttgatctcatctgcgatcttgtaagaaggaccgatcttcgtgaagtatttcttcttcagatcctccggcacaccttctatgctcttctctccatacaggccggtctttgcctttgcgataacctgtttgtccagatctgtagcatagatacgaatctgctgtaacggaatgtgccgtgacagagccattaccagagagtaaggctcatctcccgtggaacatgccgcactccaaaccttcaggttcttgccgaagcgttgaatcagttccgggatcacggtctcttccagatatttccactgttccggattacggtagaattctgaaacattgatagtaatgtatcctacaaattcctcaaaaagtactttatccgtcttcagtgcctgtacatacttgtcataacctacgatcttatgtttggcgatcagagtatcgatacgccgtttcatctgcttctctttgtaagcattcagatcgatcgtagtcagagaataaatctcctttttaaaatactcataatcatatatcatgaatatctaccacctaacggttgattatttctcagagttctcagcctctgcagcgataacagcgtcaatatctacagatacaacatctgcatcggactcttcctctgcctcaacggtttctggagctgtcagagctttaacgctcagggaaatcttgtgatcagcctcattgaaatctacaaccttagctgtaacttcatcgccaacgctcagtacatcggaaggtttctcaatgtgctcctttgcgatctgggatacatgaagcagagcatctacaccgggctctaattctacgaaagcaccaaagtcggtcattcttgcaaccttaccagttacaacattgcctacagcatacttctctgctgcattcttccaggggttagcgtcgtcgaatttcagggacagtgcaatcttattgccgttgatctctttgatcaggactttcagcttatcgccaaccttgaataccttcttgggatgctcaactctgccccaagacatctcggagatgtgaagcagtccgtctgcgccgccaagatcgataaatgcgccgaaatcagttacgttcttaacaacaccttctacgatatcgccttctttgatcttctcaaagagttccttctgcagctcagccttcttggctacgatcagctgtttgcggtcaccaatgtatcttcttctcttgggattgtactcgctgatcacgaattcaatctcctgtcctgcatacttggtcagatccttctcataagtatcggataccaggcttgcggggatgaagattcttacttcgtccacgatcacgcttaaaccaccgtccagtacctgggatacggttgccttaagtacctcgtgattgttaaatgcttcttcaattctcttgttgcctctgtctgcagcaagacgcttgtaggtaaggagaacctgaccctcaccgtcatttactttcaggaccttgacttccatggtgtcaccaaccttggcaaccgtggtaagatccacgctggagtcgttggtgtattcgttcttggtaagaataccgtcagatttgtatccgatgttcagaatgatctcttccggtttcacatcgatgactgtaccttcgactacctctcctgcatgtattgtctttaatgattcttccagcatttgttcaaaagttaattctgacataattttgaacctcctcaattaatttatttggggtggaagcccccgcggtaatacccactagtcgaacagctttaggtagatctaaatgcaagtcatccagtgtctgtataaaataggtgtgcacacattccctttggcagatttcgtaaagctttctgctattagaactgtgcttccctcctattacaatcataacgtcagcttccgctgcaatggcctttgccgatcgctgtcgctcttctgtagcattacagatagtgttcacaacactatcattgtaaccttttttttcaaaaatttcaactatatattgaaatttattgtagttatatgtcgtctgagacacaatacagagcttttcaccttctgttttcacaaaattttctgcctgttcgggagtttccagaacggttaccgggccctgacaccagccgacgataccctctacttccggatgtttcgggtcccccacgacgatcacatggtacccttctgtgctcttttgttccacgatacgatggatctttttcacaaaggggcaggtggcatcaatgcactccagaccattcgcttccatgatatcatagatttcttttgccactccatgggcacggatgatcacagtgggaatggtctccccggctttcaggttttttagttcttctttgctttccagaactcttactcctttttccgccagttcccggaccacttcctcattatgcacgatggggccataggtatagatagtcttcccgttttttaattgttcatacacagtatctacggcgcgctttacgccgaagcaaaagcctgcgcagtctgccagtcttacttccatatcagatctcctgtttaaccgatcagttccacgatccggtcgatgacctgctcgatcgtcatatcggaggtatccaccagtaccgcatcctcagcctgttttaacggagaggtctctctgtgcatatctctatagtctctgtcttcgatatcctgacggatcttctccagatcacaggtctctcccttggcggtcagttcctcatatcttctcctggctctcaccatactgctggcggtcagatagatcttcacctgagcattcggaagaaccactgtaccgatgtcacggccgtccatgatcacatcgcttttagctgcaagtgcctgctgaagttctaccagcttggtgcgtactgcgggttgtgcactggtattggatgccatattgccgacttcttcggtacgcagataagcattaacattctctccgtttaataaaacgacctgctcaccgtccacatactgaatggtgatatccgcctccttgcatttatcggcgatggtcgctgcatccgtgggttccacgccctctcttaacataaacagtgccatggcacgatacattgctccggtgtccacatagataaatccttttttctttgccacagctcttgcaatggtactttttccggcacctgccgggccgtcgattgctacattaaaactcatagtctagtcctcttttctttatttctattaattataattgatttctattaattattattttttcacaaatcttccggttttcattcgtaaaatctctctccggacttttttgtgcgcgaatttattgtatgctgtcccccgccagatgtcccgtagaccaggcgatctgcaaattaaagcccccggtcatggcatccagatccaatacttcccctgcaaaatacaaatgccgtacacgtttggattccatggtggaaggattgatatcctttaccgagattcccccctgagtgatgattgcttccgcaaaagatctcgtccccgtcaccgtcatgggtagttccttgatcaatgagccgaaagcttttctctcttcccggctgatctcgttcactttcttctccggggaaatgtcggacaactctatcataacaggaatcagctttgcagggaacaggtggtccagcgcatttttaaattgtttgttctttgcttcctcaaaatcccgaagtaaacgcttgtccagctgttccggtgtcaacgcaggtttcagatctaagaaaagctttacctcatcgctgcctttacgcttcgaaaaattttttgaataaaaactgctggctgacaggatcagggggccgctgacgccaaaatgggtaaacagcatctcgccgaacccttcataccaggtctttttcccgcactgcatccggatctccacattttttaaggaaaggcccatcagttccctgcaccagttttcccggatctccaaaggcaccaatgccggtttcctctccgtcaccttatgccctgtctcttccgcgaaacgatacccgtcccccgtggatccggtgctggcataggaacagcctccagtacagacaatgcagtcatccgccgcgattttctcatggtctgcacattccacgccacagaaaacaggattgccatccgtttccttcgttaggatctttttcacctcggtatgcagatgaacatccacctgatatttgcgaagttctctctggagggcggcgatcacgtccgaagaatgatcggataccggaaatacccggtctccccgctccgttttcaacgggcagcctgcctgctccagcagattgcatacccgtgtattgtcaaagccgtaaaaagcactgtacagaaacttttcattggtacaaatattctgaaataagacatccatgtccgccgcgtttgtcacattgcaacggccttttccagtgatgaacagttttttccccagcttttcgttcttttccagaagtattaccttatgccctttttgcgctgccgcaatggcagccatcatgccggcagcaccgccaccgatcacaatcaccttactcatttctatcctcttttgccgatctgtccgtccatcatttttccttgcgccgcagggaatagtccagcatcggttcatcatctataaagtcgatctcatcattcagatatacctgataattattccaggtctcttccagtgtctccagatttttacgcacctgctccggacatttcaggcacaatgccactaccagcgcattgatcacgcttaaaggtgccaccagagaatccaccaccgacaccatgtcgcttctggccagcagattgcaggaagaatacagattcatgggggaatggatgctgtcggtaatagcgatcaccttggcattccggtcattggcaaactccatggcctttaacgtccgcatggagtatctgggaaaactgataccgatgaagcagtccttcgggccaatatggatcatctgttcaaaagtctcactgacactggtggtattcagcaaaaagactttgccccggatcatattcaggtaaaaatgcagaaacgctgccagcggctcattgctgcgaagtcccatgatataaatggtctctgcctccagaatcgtggcaacggcggattcaaaggccgccggatccagattgtctatggtatcctggatcttttcgatatctgcgctgagtacggaggtcaggatctccgactgggagcttcttccgtatttggcatccattttctgaatgccgttgagctttccctgcacgcagctttccagtgccttctggaatttcggataaccgtcataaccgattcccgctgcaaaacgcactacggtagattcactgattcccaatgtctcacccagctttgctgcggtcataaatactgcctgatcgtaatgttccgatatgtaatccgcaatggctttgtggcctttgctcatttttgcataatgttcgttgattcgggtaaaaacatcatattctgccacggttcttaacctcgcgttgtctcattgtaaaaagcgtaataggaatgctctaatagctgcattgtctgtaagtctgtcagatcataatctccggtcagagacatacaggcagctccgtgaatgaaaatccacattttcatgaacagatcaccgggatccgggcagcccgccactctggccaggttgatctcgtagaccacgtttccggcatcaccattcaagatctcatacatactctttttcttatgtttgccatcctggttatccgatacaaacagaagctcgaacaggtgtctctcttttctagcaaaagctatgtaagccatgcccagattggcgaaaggtgtcttgccggtacggggatacaagctgtaataatccagaaaataagctgtagctctctcatagaccgcatcccacagctcttccatattcttatataccctgaaaataggctgtgtggagcaccctgctttcgctgctacctttctggctgtcacattggcaaatccctcttctcttgtcatggcaaatgccgtatccaggattttatcaatcgtgatcatctctttacgagccataatccctctcattccgctgtatttacagcaaacaatgtgttcttctataacacttgttattttagtgggtgaagaggtggtttgtcaatatgtaaataaactcattcgcatatcgggctgaccaggggctgaccaagggcatgtctaaataacggcttctacgcgcttcgcactctcgaagccgcaaccacattcgcaatccgggctatcgccccggttcgaccgaggacatgtctaaataacggcttctccgcgcttcgcgctctcgaagccgcaaccacattcgcaatccgggctatcgccctacttgctcatgtggttttgttcgtctaataaaaaagccgcactgactgcgagcagtcgtgcgactttttattgacgaattatttagacagggtatgcaccgttcttggtgtcagcctgggtcatatcaaccttttcctgctgtgcctgacgatacttgaagaagtcggtagcaacctgagggaacagagcgtagctcagaacgtcctcatcctgctgtttccattccttcatttcgccttccagcttatccatctcattgtcgagcagatcagcgtaacggcaggtaattctctcctcaccggggataaccttgtcgataacttcctggctcatgggcttaacggtctgaccgtactcaccacgaagaactgccttggtctccttggtagccatcttgtaacgctcaccaagcagtacgttgaagactgcctgagtaccaacgatctgagaagaaggggtaaccagagggggctcacccagatccttacgaaccttggggatctccttcagcacatcgtagtatctgtcttctgcattctgctccttcagctggctaaccatgttggaaagcataccgccgggtacctgatacagcagagtcttgatatcaacacccataaccttgggattcagcaggccgttagccaggcactcatctctgtaaggtctgaagtagtcagcgatctcagctaacaggttctgatccagaccggtatcgtaaggggttcccttgaaggtctcaaccataacctcggtagcaggctgtgaagtacccatagcgaaggggctcatagcggtatcgatcacatcaacaccggcctctactgccttcaggtaggtcatgcttgcaacaccggaagtatagtgagtatgcaactggatggggagcttggtaacttccttcatcgccttgatcagttcagcagccttgtaaggtactaacagaccggccatatccttgatacagatggaatctgcacccatctcttcgatcttcttggccatgctggtccagtactccagagtgtaagcatcacccagagtgtaagccagagcaacctgtgcttcacctctgccttcctgtgccttgaacttgttggtagcatttaccgcttcctgtaagttgcgcaggtcgttcagacagtcgaaaatacgaatgatatcaataccgttggagatggacttctgtacgaagtaatctaccacgtcatctgcataaggtctgtaacccagaatattctgtccacggaacagcatctgtaacttggtgtttttgaagccgtcacgcagctttctcagtctgtcccagggatcttccttcaggaaacgaagggatgcatcaaaggtagcacctccccagcactctacggaatgataaccaactttatccatcttatcaacgatgggaagcatgaattcggtcggcattctggtagcgatcagagactgatgtgcatcacgtaaaacagtttccgtaatcttaatcggtttcttttcaatttctgacattacgaatatcctccataataatattttctatagttagtatgacgcgatgcgttattctaagtccttcggacttatttcatcgtgcatcgctttaaaatacaccgaagatagccatgaatgtaccggctgctacggcagtaccgataacgcctgctacgttaggacccatagcatgcatgagcaggaagttggtaggatcggattctgcaccaaccttctgggatacacgtgctgccataggaactgcggatacacctgcggaaccgatcaaaggattgatctttccaccggaaaatacacacatcagtttaccaaacagaacacctgcggcggtaccgaacatgaatgcgatcagacccagagctacgatcttcaaggtatctgcattcaggaatgcttctgcgctggtggtagcacctacggaagtacccagcagaataactacgatgtacatcagagcattggatgctgtctcagtcagctgacgaacaacaccggactcacggaacaggttacccagcatcagcatacctaccagaggagctgtggtgggaaggatcagacatacaacgatggtaacaacgatggggaacaggatcttctccagcttggatacgggacgaagctgacccatcttgatctttctctctttctcagtagtgagaagcttcataatagggggctggataatgggaaccagtgacatgtaagaatatgctgccactgcgataggtcccaggattgccgtctgtcccagcttaccagcaaggaagatggaggtagggccgtcagcaccaccgatgatggagattgctgcagctgccttgtcgttgaatcccagccagattgctccgaagtatgctgcgaagataccaaactgcgcagcagctcccagaaggaagctcttggggttcgcaatcagaggaccaaagtctgtcatggcacctacacccatgaagatcagggaaggcaggattgccagttcatccagcttgtagaaataatacagtaagccgccggcaccgtttgctgcattttcagggtgcagcatgatatcgggataaatgtttaccaacagcataccgaacgctatcgggagtaagagcaaaggctcgaactcatgacggatagctaaataaaggaaaaagcatgcaaccagaatcatgacatagtttccccaggtcaggttaaaaaacgctgtctgatgaatcaggttgttaagcgtactagctatatattccatttgatgacctcctgttgtttatagagctgatgtaaaatgcctagttcagagttgccagaactgcaccagcctcaacagtatcaccaactgcaacgtcaatgcttgctacagtgccgtcttcgggagctactacagggatctccatcttcatagcttccagaatgatgacagcatcacccttcttaacagcctgtccaacacttgcctctaccttgaagattttaccagctgcaccggcctcaaccttgatgctgcctgctgcgccgcttgccttgggagctgcgggagccttgggtgctgccttgggagctgcgggagcctttgctgctacgggtgctccggtagatgcgccctcttctactactacatcatatacgttgccatttacggtaatggtataatttttcattttaatatcctcctaacgtttttacgattatcttactttgcggatagaacgaactacaaatccgtcagtgcttaccgcaccttcgcttgctgcgatcgcagctgcaataacagcgaccaactcagtgtcatctgcctcgggttcttcctgtgcaacgatctgagttacagccttatcaatacctgcgttctttgcttcttcctccttatccttcttgctgaatgcagcctggatcttcggaatgaagttgaacagggaaatgatcagtgagatcatgatcagcattacgaatacagttcccataccgatcagagtgttcagtgcagctttggtcatcaggccacccatggactccacggggttcagcgctgcagactccatgctcaggaacatatcgttggtgaagatcacttctgcctgtgcattctgtttggcaccggtcacatctacatgtacaatgatctgatcatcatcgatggcagcttctgcatcaccgacagcggtaatgccgccaatggactttttagcggagttgaaggactcgatagcagttttgtatgcataaccatcaacggtgatacctacattttcctgtaccatatatgccacttcatcagcggtatactcagagaagctctccagtgcagcttcgtcttcaaaattctccagagaaggaatcacatactgggtagctatctggattgcagtgtccatcttgcgctgctcataatccgtataggtctcctcactgccgcacgcggtcaaaccaaagatgcaggtaatcatacatactaagcttaaaaatttcttcattttacaatcaccctttcttatacagttccgtgtttcttggcaggacggtcttcactcttggtgaatagcatctcgaatgcgccgatcacatattttctggtatcagcagcatttacgatctggtccacatatcctctcttggctgcgctggttacattcagagtaagtgcttcgtactcagcagccttttcattaatcacatcagcgccctggccatcatacatgatcttggcagccagcttgccgtccatagcaccaatctgtgcatccggccatgccatggtgatatccgcaccgattgccttggagttcattaccacataagcggttcccagagccttgccgatcacaacgttcaccttgggaacggtagcgttggcaaatgcgtaggtcagctttgcagcagcctttgcgatagccttctcggaagccagagttgcttcgtaaccctttacattggtcagggtcagtacaggaatgccgaaagcatcacagaagtttacgaactcagcagccttctcacagccctctgcagtcagaactgcatccagcttctctgctaccttgccttcttcgtcgcagatctcggaacggttagctaccgcaccaacggtaacgccatccagacgtaagaaaccggttaccatgttcttagcatatccggccttcacctcgaagaagttgttgtcatctgccagaatggacagagcaacggatgtgtcgccgacgcagcctgcgatctcaggatttacacggttcagatcatcagtgcaatcctctaagaagcttgcatcatcctcgttgttggcaggcaggaagcttaccagctctcttaccttctccagaatggttgcttcgtcagctaccacgtcaacaataccgctctcttctgcctggaatttagcggaagaagaatcacacttggtgatcacattaccgtccagagcgttaggagcatttacgaacagcttggcattcttctcttccatgaaagtgaaatcggtcatggtagggaacagtcctaagccaccgccacaggttccgaatacagcagtgatctgagggatcacgccggaagccatggtctgctttaaatagatctcaccaaatgcagccagtgcatcggttgcttcctgcagtcttaaacctgcagattcgatcagtccgatcacaggtgctccggtcttcatagccagatcgtagagattggtgatcttctttgcatgcatctcgccgatggttccgttcagtacggaagcgtcctggctatatacatatacaagattaccattgatcactccgtagccggtaatacaaccgtcagaaggagtttcattgggtttcagattgaaatccgtagctcttgcggttacaagtccgccgatttcaacgaaactgttgtcatcgagtaaagctgctattctttgactcgcttttgaagtagtactcatatgttttcagccctccgttgataatataataaaatataatagaaaacgtttattaatatagaagcacaaatgcccccatgattaacagtttgtagtataacataaaatctgcaactcgcaaagaacgaattgcagatttttacattttttatatattgtacctcattttgaacaatttccccgtcattttttccattccatttttctgcaatccctacgggaatgctaccagaaaacgtttcaggatctgtctgccgcaccaggaaagatccacggcctccactgtccaagcagcatacagccgctccctgcgccagatttcgccatccaccagataacagatttctcccaccgtcgttccttcctttaccggtgccttcagttctttctctttccggtagagaatctccactttctcgtctgcgcgcataagcaggccttccgctccttccgcctccggatccagttccaccgccagctgcacttctcctgtcaattcctcatcctgtgcctccgtcaccgggatcggcataaggtactgttcccgtccggaaaattcttcctctccgaacttccggtaaacaaaattttccagtccatatccaaacaactctctgctgtcactccatttataggtcttatgattcggccacccacaggccagaagtgccacaatcatacattttccatcccgttccagtgctcccacatagcagtaccccgccttgttcgtaaatccggtcttgccggtaaaagctccgtccatcatctgcaaaaaggcattgtggttgtggcactgaaaggagcgtccgttttccgtgaaacaatactcctgtgtccgggtgatctcccggaacagatctctctgggaagactctctgatacagtaccgtaaaatacaggccagatcctttgctgtggtatggtgctccttttccagaatactcccgtcaggtaatgtcaatgtctctgtggcatccagcccgttgggagtgataaaccaggtatcctcgcagccgatctccaccgccttttcattcatcgcctgtgcaaatctatgtaatgctgccttactctcttctgtagtatgctccgaagcctctttcgtctcacccagaagctttccgccgatatattccgccagtgccgcagcagcatcattatggctttccagcatcagggaaaacagcagttctcttaccgtataatgctccccctttttcacatagagctttaccttgggcatagtggctgcataggcggaaatactgacctcttcctccacctttgcattttccagcaccagaatgcaggtcatgatcttggtggtgctggccattgccatgggagtctcttcattttttccatatagtacccgcccggagtcggcatccagaagcaccgccgcctgtgcatacaggtgtaaatcctcctgcagctgcccggcttccttttcctctgtttcatgaaaaaggtgcgtagcctgttcccggattccctcgctgacatacccctgccgacagaatccgcctatactttccagacacagaattccggcgaaaagggcacaaaaaaagcctcgcataatcatcactcccaaaagagtcccttattactatgattattatgaggctgattctttgtcctattctattatatgtttaatgtgagctgtacttcctgctccgcctgctgtttgaattcctccacctgcaccgggttcagttccggcagttcctccaggctcttcacaccaaagcagcgaaggaactgttccgttgtgccgaacagcagaggtcttccgggagcatccagccgccctaactccgtgatcagatcgtattccaacagcttattgatggcatgatcgcagctgacccctctgactctctcgatctccagtcttgttaccggctgcttataggcaatgatggacagggtctccagaaccgtatccgtcaatgtcatctttcggggagtcttggcgatcttgatcaggtattcatacatatccgacttggtacacagctgtaccgaattgtcgaactgtgtcagtccgatgccacggttctcttcctcatacctcgccgccatatcttttaaaatggattttgtggtcttcacatcctcttcgatcacttccgcaagtctgctgatctccacggaatcccccatggtaaaaaggatggcttctattactgcttctgctttactgcgttccatgttccgacctcactgtatcttaaacgttagatgtaatcataatatcatcgaatatattttcctgactgatgttgatcttgccggtcttcatcagctccagaatgatcaggaaagtaacgatgacctccattttgctgttctgcttctccagaagctttcggaaactgaaggtcttatgttctctggcataagcttccacatacagcatcttgatgtccatatccacctcgtccttttcgatattgccatactggctgcggacagggtcgatcttgtcctcctgtttcttcacaatagatttgaatatttcatgaagcttgttcaagttcatatcgccgatcagctcttcgtaatcgatgggctgtctgtaggcttccacttccttcggaagtctctgttctctgtacatatttctggcagcatccacctgccggtctctgagttcgaaggacatatatttgtacatcttgtattccaacagcttctgtaccagctccgctctgggatcctcttcctcgccgtcctcgttcacttccttgggcagcagcattttgcacttgatatcgatcagtgttgccgccattaccaggaattcactcatgacgttcatatcttcccgttgcatctgcctgatgtaatccagatactgggccgtgatctccacaataggaatatcatagatgtctattttgtttttctcgatcaaatgaagcaacagatccagaggaccttcaaatgcttccagttttacagatattgccatgtaataaaactcctatttcccctcatcactcccaccggcctcttctccccccggcagcagatccacttccaggacctccccaggattgaacagccggatcggaatcgtatgcattcccagtcctctgctgagcagcattctggtttcccccagtgtgaactctccgccatcatattttggaaaaagtctcacattgggagacaccacgccttttccccagatggggactctcaccataccgccgtggacatggccggccagcaccagatctgctccccagtccgcgtatttcggaaaataatccggattgtgggcgatcaggatcgtatacttttctgcggaaggttgtcccaacagacttttcagatactccggatccatgggttggatcccgaagcgcttgtaatacagcttgtcgatctccgatccgtaaatgcagatcccggattcttccagaacggtatgttcattcaccagcctccggattccgatcttctgcagggcctcctcgtaccgctccgccatatctccgtagttctccgggtacagtttcaaacggtgttcatgattgccgttgccgtagtagatcggatatttcccggcaagcttcgtaagcaggtccaccgccgtctccagacttgccttcggctttgccgtcagaatatctccggcgatcaggatcatgtccggccttatctcatcaatggcctgcagcaggcgctcattttcttttccgtatctcttattgtgcagatccgccagaaccactgccttaacaggctttttgattctctgatcccgcaggaaataatgccgtaccacaaaacgattgctgtcgtacagcattatccatacaagaaccaccaggatcactgcgatcacggtaatcaccacatccaaattctttgcccccatggtctatttccagttaattgccaatatgttctatagtataacatatttttcgggcttacaaaagataaaattccattattttaaagaggtagtccttgtataccgctttcgccacatcattttcatacaggatcggaacgcttccgatctccactccgttcaacagatagaccgctctgcctgcctccgccccctttgcgacaggcgcctgtgcctcctccggtaattctatggttttcttcactccgtccagcgaattgccttccgtatccagataccggaattcgctctggtatctgacaggtacagtatcttccacgccaccttctatccgaaggtcctccaatgcatccgtattcccatccagatacaggtcactgacattgaaaccgtaacttaacagtgtctgagcatccttaaaacgtgccttgtagtccggggctcccatgaccacggcaatcaggtcaataccatccttcgtggcagtggcagacaggcagaatttagccttggaggtggatccggtcttcagtcccgtagcccactggtactgtttcaacagcttgttggtactgttcagggtaaatgtagagctgccctgtctggtctcatgggtgatgtcttccatccagataccggtatattcaaagacctggggatatttcaccgtaagctctctggacataatggccacatccatggctgtcgtatagtgtccgtcggaatccgtcagtccgcaacaatcctcgaaatgtgtatccaccattcccagttctgccgccttttgattcatctgatccacgaaagcctcttcactccccgctatgtattctgccaccgccacactggcatcgttgccggaagctacagcaatacatttgatcagggtctccaaggtctgtacctcgttctccgccaggaatacctgggagcctcccatggaactggcgtaagcactgacggtcaccggatcctccagttttatcttcccctgatccaatgcctcgaatgtcaatagcaatgtcatgatcttggtaatactggcgggacttctgcgctctctggcattctgttcaaagatcactttcccggtagagctctccagaagcacggcactgggagcttcgattgccgccggctccgcagatacactgatcccgtcccaccagaatacctgtatgctgaccgtaaaaagtaagatccatgtgaaaatccttttcctgtttttttgcataaaaaagccacactcccttatcctttcttctaaaagatatggtcgtatggccttgtatatacctgtaatccaaccgtccggaacactacagtctggtgatcagtgcctgacagcgttccttcagggcttcacccttgctgcgcacatcgatgtgaaatactttgatcagctggaccacataatccacagctacaatcgccagaattacctgaatcaaacggatgcccacctggatctgtactctgtcaataatgtgatacatggcatcgtgaacgaactgtacgattcctattgcataaaagccccaggcaacagtactttccaggcagatgataccacggtaattgaagggcttgttattataatcccaccagagctctccgaggaaacggatcataccgattcccaccagatattcaaaagtggtggccagaatggctccaagaaaatacagctttaccagtttcccgcgcaggggacttaaaatcagatatcccagcactccgccgaaaccgtagatcgggcaaaaggggcctttgccaaagccacggttggtcagcttgtgattgcagaaagacatataggtagattccaatgcccagccaagaatactgtacaatacaaacgctgctaacagatgatagatatccgttcccagtatttcataattccacattttgtttccctcataagtacaaagtccccggtgattacgccgaggactgttgttttgcattagttatatttacgttttcttgctgcttcagacttcttcttacgttttacgctaggcttctcgtaatgctctctcttacgaatctcctgctggataccagccttagcgcagcttctcttgaaacgacgtaaagcgctatctaaagtctcgttctcttttacgattacgtttgacatcttacacccgacctcccttcagtcccttcaagtaacatgactgactgggttattctaatgcgcagttgttctacacacatttgatattatagcataaaaaatacattcgtcaactacttttttaattttttattatattatagtctccgtagcccgcatgaaaataaggacaagcagactctaagcaaccgtcggtacttagcgagggtattttcctcgcttatgtaccgttacggttaagcgtccgaagcgaaagcgggtctgcggttcttattctcatgcgagctactggctttaacaaaatcttatttaaaaaacttatcataaattccaaacaggaaaataaagatcacgatcaggggcagtccataggtcagataaccgcgcatccagtcgtggacttttaagcctttgccggtatttacttctgtcttatagttctcccatccccagccgtatctggtcacacagaacaacagatataccagagatcctaacggcaggaacagattacttaccaggaaatcttcgaaatccagtactgctccgccgaagatggagaagccgtcccagctccatacattgtagcccagtacgcaaggtacggacagtacgatgatcaggaacaggttcaccagggaagatttcttacggctggcaccggtcagttccataccacagcagatgatattttcaaatactgccagtactgtagacagagctgcgaacgccatgaacaggaagaacaggcttccccacaggcggccgtaaggcatatttgcgaaaatattcggcaaagtaataaagatcaggctgggcccggaagtctgatccaccccataggtaaagcaggcggggaaaatgatcagtcctgcggtaattgccacgaaagtatccagtaccacaactctgacggactcacccatcagggaatgatccttgccgatgtagcttccgaagatcgccatggcaccaatgccaagacttaaggtaaagaatgcctgattcatggcacctaccagtgtagataccacaccaacctcctgcatacgtccaaaatcaggtaccagatagaacttcagaccttcctttgctcccgccatgaagaagctgttgatggcaagtactaccatgatggcaagcagtgcgatcatcatgactttcgtcacacgctccagaccgttctgcaggccaccggcacatatgacgacaccgatgactaccaccagtaccatccagaacatcatgacccctggatctgccagcatccgggtaaactgatccgctaccgcatctgcagaaaggccggaaagtttaccggtagccgtcatataaaaatagtgtaacatccagcctgctacggtagtatagaacatcattaacagataacagcctgccagcgtgaaatacccgtggatatgccacttctgtcccggcttctccagtgcctggtaagcctttacgggacttttcttacttgctcttcccacagcgaactccatggtcataatcggcagaccaaggatcaccaggaagatcagataaaacaatacaaatgcgccaccgccgccctggccggccatgtacgggaacttccatacattgccgataccaatggcacagccggcagacagcaatataaagcctaaacgggatttcagattctctcgttccattatgcgagctgaccctccagtactttggacgcttccgcgatcgctgcgggaatgcctgcgggattcttaccgccggcctgcgccatgttcggacgtccgccgccgccaccgccaaccagtgcggcaattcccttgatcaggttgcctgcatgggcaccggcctttacagcaccgtctgttgccatggcgatcatattgaccttgccatcctgtgcagagagcagtacgacaacgccttcaccaagcttatccttgagctggtcacccaggtctcgcaagccattcatatccacaccgtctacgctggttgccagaagctttgttcccttgacttccactgcctgatccatgacattgcccagtgcggactgtgccatcttggctttcagggactcgttctcagcattcagagccttcagttctgcctgcatatgctggatcttctcggtcagggctgccggagctgcctttgcggctgcggctgccttattgaagttctcttccatagcctgatagtatgccatcacgttggcaccggtcagtgcttcgattcttctgacgccggcagcgacaccgctctcggacaggatcttgaagtaaccgatctcaccggtatgctttacatgagtaccaccacacagttccttcgagaagtctcccatggataccacgcggacagtatcgccgtatttttctccgaacagagccatagctccgctcttcttcgcatcttcgatgttcatgacatcggtaacgactgcaatatcctctgcgatcttctcattgaccagagcctctaccttagcgagctcttccgcagtcacagcctgtccgtggctgaagtcaaaacgggttcttgcgccgtcctggtaagaaccctgctgttctacatgatcacccagtacgatctgcagtgccttctgtaacagatgggttgcagaatggttcttacatacgctctttctgttgtcggtattcactgccagctctgccttgtctcccacagtaactgttccggatacgaccttacccacatgtccgatgcgtccacctgcgatcttcacggtctcagtcacttcaaaagtaccgttttcggtgcggatcacaccaaagtcacccttctgtccgcccatggtagcatagaacggagtcacatcggtgatcagtgtaccggtctcacctatctttaaggtgtttaccagttcagtctcggtggccagtgctactacctttccttctgcggtcagtttatcataacctacaaattcactggtgatcttgtcatccagtccatcgaatacacctgctgcagtggtaagcttctgggagaagttctgtccttctcttgccttctgcttctgctcttccatggcagcggcaaagccttcctcatctacggtcagattctcttcctgtgccagctctacagtcagctccagagggaatccgaaggtatcgtataagtagaatgcggacttgccgtcgatctgctttttaccttcacttctcttctgctccagaatcttgtgcagctccttcatgccgttctccagagtgctctcgaagcgggcgatctctttctgcagctcgcttaagatgaattcgcggttcttcttcatcagaggatagctttctgcatagatctcatcaatatatatagcggcaatgtgcagcagctgctctgtggtcatgtttaaagtacgtccgtgtcttactgcacgacggatcagacgacggagaatatagccggcaccggtattggagggaagcagcttcgcctcatcaccgatcagcatcactccggtacgcagatggtctgccagaatacgcatggatctggtcagcttctcatccgcattgtatttcacaccggaaacctcttcaatgtaagcgatcaccggagaaaacaggtctgtctggtatacatctctggtaccgtttaagaatgccagaatacgctccagtccccagccggtatctacgttcttctgctttaaaggagtcagatgaccgtcatgatgcttctcatactgcatgaatacatcattacccagctcggtgtatttgccacagtcacagccggggccgcagttcggtccgcagtccggtctgtctgcaatatagaacatctcactgtcgggaccgcaggggccgtattccagtccccaccagttgtcatcggcaggcagataatatacattctccttcttgaaaccggaagcgatacggtagtgtgcgccttcctcatctctgggtgcattctcgtcaccggcaaatacagtagcagccagatggtcggcatcaaatccgaatacctgtgtcagtagttcgaaactccactggcaacgctctttcttgaaataatctcccaggctccagcttcccatcatctcgaagaaagtcacatggctcttgtcacctacggaatcgatatcgttggtacgaacgcagccctgcacattgcagagtctggtacccagagggtgcttctgtcccagcagataaggcatcagaggctgcatgcccgctacgttgaacataacaccggtggatccgtcagataccagggatactgctcccacatccacatggccacggtctatataaaattgtttccaagcttttctcagctcatcagaagtgaattgtctcattctctcggtctccttgtctaaaaattacacctttcggaaaataaacctacatttctacattataatgttatcgtttcgccgcgtcaaggataaaacatcactcatcctcgtcttccaggatctcgttcaatgcctctctggcctcctcgatctcctcttttatgccttttttcaatgcagcctcgaaaacagtgatataacgatccagttcttttctccggtctcccagtgcttcctcatacatccgctccgctctgagaagcaccagacggttctcctccaggtctctgggctggatcttcaggtaggacaattcttccattcgcttctggatctcatcatccgtcatctggttgtcctgtcccttgatgatcattttctgggtcagtccggtggataccaccttgacttccacttccagcagggaattgatgtcataggtgtaagtcacatccacggcttcactgcctctgggccccttgggaacatcaatgttcagttctcccagaaacagattatttctggcgaaacggctctctccctgcagtacccggacgcgcaccttgtcctgattgtctctgacagtgtacaaccgctccgtatgactggcggggatcacggtgttgcgctcaatgatgggacagaaacggccgtcttcaaatttgccttcctcgtattccaccacgacttccgttcccaatgtaaaggagcatacatccgtcagaatgacttcctttacctccgcccggcgttccttcatggccgcctggatcgccgcgcccagtgccacggcttcgtccgggttcagtcttgtatccgggaatttgcggaacagcctgatcaggaaatccctgaccaccgacagtctggtggctccgccgatcagcaatacctcatcgatgtccgacagcttcagtcctgcatccgccagactcttcttcaccggttccctgatcttcattagcagttcttcgcactcttcctcatattcttttaaggtgatctctgccgttttgttctcttcacccagcataagttccatggtcaccgcagtctgatcactgattccccgcttggcttcttctgcctttttatagagacgcacctgttctttctccgacagatccttataatgcagtcctgtcttttgcagaaaaagtttcgacatcacttccgtaaaatcttcaccgccaagataattgtctccggctaccgcccgcacctccagaatattgtgatacagctccagaatggagacatcaaaagttccgccgcccaggtcaaataccagaaatctggtgtctttttctttttcgtacaggccgtaggccaccgccgctgcagtaggctccgagatcatacgctccaccttcagcccggccagttctccggcccgcttggtggcttttcttctcttgtcgtcaaaataggccggtacactgatcacggcctctgtgacttcttcccccagataggcttccgcatcttctttcagataacgcaggatcatgctggacaattcttctgggcggaactttttgccggacaggtcataagtgcgatccgttcccatgctgcgcttaaatgcctgcgccacactgtcgggatagaggtttctgcgttcctgtgccgtctcccccacatagacattgccgttctcatccacgctgaccacagagggggtcagatgttttcccagacggttggggatgatcacaggtccttcctccgtaaatactgccaccagactgttggtggttcccaaatcgattccgactatcatatgttttcttctctcttcattttaattttttacttcttcccgaacagcctctgccagaatccccgtttctccggctgcggcttttccttgtgaaaagcggctacggcaggatccgtatccttcgtcacctgttccgaatgataccggtgccagatggcctgcaatcccattccgggatgttcctgcatctgctctttcagccgctccagtgcttctttctcccggccctttttcagcatctgcagtatccgtaccatctccagttcctcgcagacgggatgtacacagccatggcagaaggaacagtctttgtccagttgcaggagcgtatcctgttcctcatcggtggccgtataatatcccgccagatattcgtgtacgatccgaagcttcggatatttcagatacacatccttgccgcttttatcttctctttccatgcaggctttcagcgcctgtgcatagtcagcacctttcttcttatctccgtacaggatgcatgccaggatcaggtccgcaatgtcatcctttttgctgagatcctccttattgaagatcagtgccttatccatattctcgatggccacctttccggaaccacagatcagcccataccatcccagatggaaaaagtaatcttcgaaatactcctgggtattcccggtatttttcccaagcagttcgatcttctccggccacgatgtcagaatatttccggcgatcgtcttttccccgcaccagacacacagatccagcttttctcctgccgcatccagtacattgacgaatgccttctccagaacttttaatccctccgtagtcttgtcattgcaggccagacatctggcgaaatccctcatacggttccggtcccggtctccggcacttcccatcatctcacggtatctccggtaaaactgttccgccatttccgtattgcccagcaaaaaataaatttctgcctgttccgcaatcagttccggccaggcatgattctgtgttccgctcttttcatagaaaaaaacacattttctcatgcagatcatggcttcatcgtatttgccgcg

SEQ ID NO: 5672 - DNA, 8168 bp, Unknown
  gut microbiota DNA sequence
atgacccagaccttatatttcctggatctgatgcagaacgagcacaggcattaattgcctgtgctctttattgtctgtgctatcaccgtgatggtgtccagtaccatatctttctgcgcatcatccgtataatttccggtatacacataaatttttccatttttcaactgatagatctgaatctggtccgaagcaatattgttacttaaaagtgcctcacggccgcccatggcttctatcgtttcctctgtccacgcgccggtatctaccatcatatccagtccttcctgggtcagtgacatattgtcctccagatagaacaccggtgtaccttccatactgcgcatttcactttcctttatcaccatataaggagcctgttcttttaagccatccaacattacctgcagaagttccggtttcaactgtgtgaccacggtgtcattctccgccaccgagatacttgtggagccgtcatccgctgtccctttatagaagatcgtaagcgggtgataatccgtcgtcacctgctcccacacttcccagtcttctgccggatagctgaaactgaactttccatcacttaagctctccagttccattccctgcagatctgccagctcgatcaccggatattgggaagtctgtacccgattccggaccaaagggatcacttttgccgccgtaactatcacagccacaacgatcagggcaagcacaattctgctgcccatggactctcctatcgcttttttgccctggtttgtctctttgttttcgtttctcatatgtaattttctcccttataaaaaatcacattccagaaagctttcactccttctggaatgtgtcatttacaaacttgaatttgttaattctctgtgttcttcttatctccctgcacgctgatccatttcagatagccattgatgaagatatccagtccgccatccagcactgcatccacattgcctgtctccacgtcggtacggtgatccttgaccagtgtgtaaggctgcaatacataggaacggatctggttgccccagcctatctccttgacttcgccacggatatccgacagcttctcggcatttgcctcctgttttaacagatacagtttggctttcagcatctgcattgccttgtccttgttctggaactggcttcgttcgttctgacactgcaccactgttcccgtcgggatatgagtgatacggatagcagatgatgtcttgttgatatgctggccaccggcaccactgcttcgataagtatcgatgcgcagatccttctcatcaatatccacatccagatctccttcgatatccggcataacatccagagatacaaaggatgtctgacgcttaccctgggcattgaaaggagagatacgcaccagacggtgtacacccttctcagacttcagatagccgtaggcattcagaccattgacctggaaagtcactgacttaatcccggcctcatcaccatccaggtagtccagtacttcgatggtaaagcccttgcgctccgcccaacgggtatacatgcgatacagcataccgcaccagtcacagctctcggtaccgccggcaccggcattgagctttaagatcgcattgttcttatcatattctccggacaatagggtaccaatcctaagttcgtcgaattccctgatgaattcatccagttctcctcggatttccgggatcagagactcatcgttctcctcatatcccatgtcgatcagagtcaggatatcatcgtactgtgtagaaagcttatcacactctcccaccgtatccttcaggttcttcagttctttcattttctggttggaacgctccgggtcatcccagaatccgggagcctccatctcacgttccatttcttcgatccgctttgccttgttagcaaggtcaaagtgaatccctcacttccgctaaaggtgtttcgtaggacagaatttctgtcttcatctgatctaattcaaccacttaacgtcacctactttcttattctattattttctattattgtaattctcactttttacggcaggtaacccatctgtacacgctgccgcactgtcttccgctgccatcagaaagcgtcaggctttccgcccgcaacagttcttgtattttttaccgcttccgcaggggcagggatcattcggatagacctttgcattttcacgctttacaggtcccttcggtaaggaatcgtccttgttcgtgccggtgatcttcgcctgctgctcacgctctaccttctgttcgatcttgatatggaacagaagtctcactgtctcttcccggatgttctgggtcatctcatcgaacatctcgtaaccgctcatcttgtactctaccagaggatctctctgtccgtatgcctgtaagcccacgccctgacgcagctgctccatgtcgtcgatatgatccatccacttacggtcaatgaccttgagcagaaccacacgctccagctcacgaatcgcttcaggttcggggaactcggcttcttttgcttcgtacagcttcacagcttcttcctttaactgctgctttaagctgttcttcttgggcttcttcacacgctccggtgtcagaggctgtaacgggatcgtaggaatgagcagggtatttaactcattgaaatcccagtcggagatatctgcatcgtcattgatacagatatctacacagttctctgtaatatcggtgatcatcttgtagatcacatcgcgcatgctctcgccgttcagtacccgcagacgctcctcgtagatgatctctctctgttcactcatgacacggtcatactctaacagattcttacggataccgtagttgttgctctcgatcttcttctgtgcagattcgatggcattggtcaatgctttgtgttcgatctcctgtccctcagggatgcctaaggtattgaacatgctgatcaggcgctcggaaccgaacagtctcatcagatcgtcctccagagagatgtagaacttggactcaccgggatctccctgacgtccggaacggccacgcagctgattatcaatacgtctggactcatgacgctcggtaccgatgatcttcagtccgccggcggctctcgcttcatcatccagcttgatatccgtaccacggcctgccatgttggtagcgatggttaccgcaccgtgtacaccggcatcggctacgatctctgcttccagttcatggaattttgcattcaataccttgtgctggatgccgcgcttggtcagcattctgctcagttcctcactggcttcgatcgtgatcgtacctaccagtacaggctgtcctgtggcgtgtgcttcctctaccgcattcacgatagcgttcagcttctctctcttcgtcttgtatacagcatcctgcagatccttacggataacgggacggttcgtagggatcacaacaacatccatgccgtagatctcacggaactcggtctcctcagtgagagccgtaccggtcataccacactttttatcgaatagattaaagaagttctggaaggtaatggatgccagcgtcttactttctctcttcacctttacatgctcttttgcttcgattgcctgatgcagaccgtcggaataacgacgtcccggcatgatacgtccggtaaattcatcgacgatcagtacctggtcatcttttaccacgtaatccttatcacggaacatcagattatgggcacgtaatgccagaatgatgttgtgctggatctccaggttctcgggatcagcgaagttatcaatatggaagaatctctcaaccttctccatacctgctgcggtcaggttaatgatcttatccttctcgttgactacgaagtctccggtctcttcctgtaccacacccataatggcgtccatcttggtcagttcctgtacatcatcaccgcgcttcatctgacgtgccagcagatcacacatttcatataaagcggtagacttgccgctctgtccggaaatgatcagaggagttctcgcttcatcgatcagtacagagtccacctcatcgatgatggcataatgcaatccacgcagaaccagctgttccttgtaaataaccatgttatcacgcagataatcaaatcccagttcgttgttggtaacataagtgatatcacacttgtaagcttcctgtctctcctcggaggtcatgctgttcagtaccacgccgaccttcagtcccaggaactcatgtacctgacccatccactccgcatcacgctttgccagatagtcattgacggtaacaacatggacacccttgccttccaaagcattcaaataggcgggaagggtagacaccaaagtcttaccttcaccggtacgcatctctgcgatacgtccctgatgcaggatgataccaccgatcagctgtactctgtagtgttccatgttcagaacacgctttgcagcctctctcacggttgcataagcctccggaagcagatcgtccagagtctctccctcagtcagacgcttcttgtactcctcggtcttccccctcagttcctcatcggaaagtgcctgcatcgcagggcggagtgcctcaatcttgtctaccagaggttcaatacgcttcagttctctggaactgtgcgtgccaaatatcttctcaataacgctcattttttcctcgtttccgcacccttttgacaataaaatgtccatgggtcttcgcataattcaaaggttattgtagcagattttcctctatgtttcaacctttctgtgcgcccgttgccgtgaaaagactgtaaaaattttatgaacagctctcttcatctattctgtcccggaaaattgacagtccggggaaaaattattataattgaaataagtaagatttacgaaagcacctgatgattttcaggttaccgaaaggcacaaggattacggtctatgaagagattatccatcacacaattgattcccggaatgattgttgcagaagatgtctacaatctggatcatgaacttctgattccgaagggcacggttctcacggacaagctcatcacgaagctggatctgtacggtattctcacaatcttcgccgaagatgtactcccggcatcggatctttctgaaacggaatcctcctactatgaacggatcaaaagttctccggaatttcatctgtttaaagaagattttgagaatgaagtcgaacttttccgggaaaatatgaatctggtcgttcagaagaatacagccctggatgtgaaaactctgctgaaaaacacactttccattgtttcgaatcattccggcagcatcagtattctggatatgcttcaaaatatgcgggaatacgatgattccacctatacccacagtctgaatgtggcactgatctgtaatattctggcgggatggctgaagcttccgaaagaagacgtggaactggctactgcctgcggtctgttccatgacatcggcaaaatgctgattccctattccatcatcgccaagcccggcagattgtccgaggaagagtttgccacggtaaaaaaacatcctgctctgggatatgaattactgctgtctcaggatgtggacgtgcatgtgaaaaatgcagctctgatgcaccacgaacgtagtgacggcagcggttacccctcgaaattaaaagggaaccagatcgatccttatgcacggatggtagccattgcggatgtctacgatgccatgacggcagcccgctgttacagaggacctttgtgtccgttctgtgtgattgaaatgttcgaaacggaaggcttccagaaatacgatgtttccattctgcttcctttcctggaaaacgtggtaaattcctgcctgcaaaaccgttgtctgttgaacgatggacgaaaagtcacaatcatttacatcaataaggaaaaattgtcccgccctgtagtacagtacggcgaggaatatatcaatctggcagaccagccggatctgaaaattgaaaagctgttgtaagttatcatttgaaaattattttttacgcacaattttgtacctcacattgtactataatacaaagcactaaagcatatattatgtgccagtggcacatatttagcacggatcgaagcaaagcggagaaatgggcttgaaaatgcggaggtacggaaaggtataggtattctatttatgtcagacacaattcatttgtatgtaaatatgtccggaaatacaattccgggcacttcttttgccaccatcggagaagcattggcttccctgccggatgttcctgcctcagaatccggaaagcagttcccggctcccgtttcggagctgccgccggtgatcctgcatatcggtaaaggaatttatcgggaaaagctggtaatcacccgtccgaatattacttttgagggtaccggcggtgacgagacgatccttgtctatggagatgctgccttcgatctcatgccggagggggataagcgaggtaccttccgtaccgcttccgtccggatcgacactcatgactttaccgccagaaacctgactttccagaacgattccggctacggccacaccgtagggcaggcactggccgtctatgtggacggtgaccgcaatgccttttataactgccggttcttaggcagtcaggatacgatcttcgatgcacccctgccattaaaagaggctcagcccggcggattcaagggtcccggagaattcaagccccggaccataggacgccattattatgaaaattgctttatccagggtgatgtggatttcatcttcggcagtggaatcgcctggtttgagcattgtacgatctactcgaagcttcccggagaccggattccaccggaaagtccggagtctgaagtaatctacggctatgtgactgctgcctccaccccgcaggaagagccctacggctacgtgttccatgaatgcaaattagagagcgactgcccgcccaattccatctatctgggacgtccctggagagaatgggcaaagacagtgttcctgcactgtgaactgggtgaacatatccaccccgccggctggcaggactggaaaaagccccacgaccacttctactacggagaacacaactcctacggccccggcgcctcccctgccacccgcgccgacttctcccaccaactgacggatgcggaagctgcggagtataccgtggaacgggtgatgaagggttgggagccacagacattctgaacctttgcgcgaaatgctttttcgagcattcaaaccgtccgatgcggtccattgtgaaaggagttccgacatttatgtatggagaagaattgtctcgtcaactggcactggattactgctgtagtgccgcagatgttgctgattcggagaaccatttttcaatttatgctccacaggaaggatgccgccgctttcaggaggctttgatccgtggcttgaaaattgctgtcgtcaatgggaaattattatttaccggttccgaagaaattgttgcagaatgtagaaagcgttatgccaatgtaaccggtgaatggttcttcgatgcgaaaagacttcgggaaatagaagaactgctgttgccgttccacctccgtgttgcgcaggcgcatcctttttttcttccggaagccgatgtcatgccttcctctggcattcctttgccagatgcgtctgatgctctcgccttcgatttgattcggtatgaccaaaatgccattctgcagttccgggaagacaaccgctttgatgaggcatttgccttcgatccctatgccccggatgttctgggtattgccgcagcaaaagacggacatatccttggcatggccggtgccagtgccgacagtcctctgttctggcagattggtatcaatgttgattcccatgctgtcggaatgcatgtgggttctactctggtaagacttctggcgcaggatatcatcgctcaaggtgccgttccctattacggcacaagcatgtcacatattgcctcccaacgggtcgcccacagagccggatttgctgtggcgtgggcggaattggttgcggaggaaataaagtaaatggaaagttagcatagctacgagccatgcaaaaatagagtggaacacctcgatgggcgctt

SEQ ID NO: 5673 - DNA, 3231 bp, Unknown
  gut microbiota DNA sequence
aaattcgtatctctgtttaacaacttacagagacgcacctttgcctgctctccaccgctgagtacacgcacctgactttcgatatgcttcgttgtaagtccgcattttgcaagcgcggaacgcacctgatactgtgtataagaaggaaattcctgccacagttcctcaatacaactattacgattttctccttttacttcctgctcaaaataaccaagttcaaggttatcaccaagttcaacacttcctgataaagaaggaatcaatccaagaatactctttagcaatgtagtttttccaattccatttgttccaacaagtgcgattttctgtccacgttccatagagaaattcaacggtttagataatggttcatcatatcctgtcacaagatccttcgtctcaaaaagcatcttaccaggagttcttccatatttgaaatggaattccggctttggtctttctgccgcaagctcaatcacatccatcttatccagctttttctgacgggacatcgccatatttcttgtagacacacgagctttatttcttgcaacgaaatccttcagctcgctgatttcctgctgctgacgacggtaagccgcttccaactgtgctttcttcactgcataaacttcctggaaatgattataatcgcccacataacggttcaattcctgattttccatatggtaaataatattcacgacttcatttaagaacggaatatcatgtgaaataaggataaatgcattctcgtagtctagaagataacgcttcagccatgcaatatgctcctcatccagatagtttgtcggctcgtcaagaagcaggatatccggtttctcaagaagaagttttgcaagaagaacttttgttctctgtccaccacttaagtctgtcacatctctatccaatccaagatcaagtaatccaagtgcacgcgcaacctcttctacctttgcatcaattgtatagaaatcatgcagcgtcagttcatcctggatcgtaccaagttcttccatcaacgcattcatttcttcctcatctgctgttccaagcatatcacagatttcattcattctctgctccttctgaaggagtggatcaaatgcggatttcaaagcctgacggatcgtcattcctttctcaagaactgcatgctgatccagataacctgcatgcacattctttgaccactcaaccttcccttcatccggtaacattttccctgtaacaatactcataaaggtggattttccttctccgttggccccgacaagaccaatgtgctctcctttcaaaagtcggaatgacacatcattgaagattgcacggtctccaaatccatgtgtcaggtgttctacatttaatatgctcatatcgctctccaatcgtattcttgtttcttctcttgattttgtattttacttcttattcctgatgactctccagccatttcactgcacactgtgccagacatgccacaccgatcgggcagacatcttcattaaactgtaccttcggattgtgtgccggataagttccccgctcgtccgtataacctgctgagagatacataaatgtactcggaactttctctgcgatcactgcaaaatcttccgatgcacttgcactcacatccggaatcggagtaaggcccggaatatccatctctttcatatatccaatcatttcgtccgtcaatgccggattgcagatcagcggcgggacttcggagatcatctcgattttcacactgccattatacacagctgcggtcttctctgccacttctttcattcggcgaacaagaagttcgcgctctttcgtattgtttgtacggatcgttccctgaagaactgctgtctccgggatgatatttgccgcctcgccggccttaaactgtccaattgtcagaacgcatgcgtgcgccggatcagtctctcttgctatcaactcctgcaatgcgagatgaatgtgtactccgatattaatcggatccacacccgcatgaggataggctccgtgagaacctttccctttgaccgtgattttaaatccatcaacagaatacatcattgtgcctttatcattatacataaaaagtccgaccggcatctttcccggagatacatgatacgcaagtgctgcatctaccttcggattctcaagaatcccatgctcaatcatattcttacttccctgaaatgtctcttccgccggctggaacatgaatttcacagttcctttcagcttactttcctgttctttcaaaatccttgccgcactcaaaagcattgccgcatgaaaatcatgtccacaagtatgtgctgtttttcctgttggacaggcaaatgcttcaccgcttttctccggcatcggaagtccatccatatctgcacgcaggagaagaaccttaccgccatttccaagcattgccgtaactccctctccgcattcaaccggatccagaccatactctttcaacttatccatcacataagctttcgtcttcggaagctcaagtcctgtctctgcattctgatgaatgtatcttctgtctgctactgtttcgtcttttaattcaagtgctctcttatagaaatccatcgtgattgcctccttgtgataaatataattttctgcgtccatttttcccaggcgcttttgtgattataacactattttgatgcttatgcactaaaagaatacgccccagatctgcaactgcttttttgcattttttaactatgctaaccactggacaggcgtctgcatcaacaaatatttacatcatcatttccacactttccatctatatatgactaataacaaaatccggatcatttttatcgcaacaaaccttgtctccttcattgatattgtttttataaagcagggcatcctctgctttcaccctcaattcttctccggatgaatctacaagtgtaaccactgccataaccggagcgtctttggctcgttcttcgcaaccaaaatctaaatcttcatcgattctctttactgtataaatcataataatttatcctttacttttcctaatttccacgctttccaggcatccggctgataccctaatgttgattgctttccatttctgacaaccggagttttaatcacctgcggatttttaagtaccttttccagcttatcttcatctgcaatatacttaatgagagcaagaagatctttgtcttttccttccca

SEQ ID NO: 5674 - DNA, 590 bp, Unknown
  gut microbiota DNA sequence
tggtctgcataaggaactgcggccatttcggcaggacaagggacttctgatggcactgttggcggatatgtatgaaaatattccagtgatcaaaaaggacaagccttcggatctgaatatcacgcagaagcttttgcaatatatcaacgacaatatcaccggggaactgacggcacagaaggtggcaaaagagttgggtattagtccgtattatctgtcccatattttttcctcccagttaaatatctcttttccttcctatgtagcgcagcagcggatgatcctggcctgcaatctgttgaaggacagcagaaagacggtgacagagatcagttacgaatgcggatttcctaatatgcggaccttccaccgctgttttcagaaaaggtatgaatgcacccctactcagtggcgggagcggagtcacaagggaacggatgaaaaaatacgacaccagctctggaatcaggaaaaagtggaaagtgaaaattctctggagtaaaatatttccttttctccgcccgagaagtgtagtatactgtctgtgggaaagatataggacaagtgacagcgaaaggcggtaaagatat

SEQ ID NO: 5675 - DNA, 3723 bp, Unknown
  gut microbiota DNA sequence
ttttgccacggcctcctccgcctgctcagcggtaaaaccgtagaattccataaagctgtcccgtaagggcggtccgataaaaggctccagcttgtccagatcaggttcctcaataccgaaagagtgcagcgcatactgcacgcaggtcgtaattccaattttgggatctgtcagtgtaccgtccagatcaaacagcagatattttttcattcttataattcctttttttgtatctgttccaagccctgtaactatcgcaaaatattcattgaataccgggatccgcaagaatattctgtaattgttatgaggctctgaatagttaccctttctttctatagcttgtggggtccgcaaagcattagaagctgcggatcttgtccccgtcatcctcagtgtttttcagcgccttgatctctacgtcatagcccacattggcattgacctgcacatggaccacatcacccacttttttgccaagcagtgccttgcccagcggagattcgttgctgatcagaccttccagtgagtttccgcgaacggtggtcacgatcttgtaatcctcttccgtgccgtcgtcgatgaattccacggtaacagtgttgttgatgcccacctcatccacggcggagttctcggagatcacctttgcggtcttgatcattctctccagataacggatccggctctcgttctgattcttgtattttttcgctgcataatattcaaaattctcactgagatctccgtgggctctggcttccttcacgtcctccagtgccttgggacgcaccaccagcttacgatactcgatctcatcttccattttcttaatgtcagtgggggttaattcatcgtacataatttctccatttctatctgttcaattacttatatcatttattgacagtttttctcccggctcggcacgctgattttctaccaacagccgtccttctttttcttcggcgaccgaccttcttttccttcggcagacgcctttcttttcttctgacggccgacctttttccttccggcagccaaccttcttttcttgcagaggatgaccggtcgcagtctctatgctgtcccggtgtgcccagcattctacaactgcattgcgtagattaccgccagagacagaatgatctgaataatggcaaaacggaatacggtctgtgtattggaccagtcccacaccttacgcacatgatcatgcaagggagtacgcacatttttcaaaatatgaatcttcaggaaacgaagcagagacaccttaagaagtcccagtcctccatccaggatcagcaccagtgccagcgggatgaacaggaacgggcagccgctcttcaaaatagcgatgctgatgaacaatcccatagcccgggaacccgcatcccccatcatcagcttactgggtgtggcattgtaccacaaatagcccagaatacatacggcaaacagcaggatcaggaaagaataggtctcattgacgtccttcatacggtccacgatatagatggacatgatcgtaatgatcgacagggttccggagagtccgtccacaccatcggagcagttggtcacgttcacggaggtccataccaggatcaccgtgaggattgcgaatactacgggaggcagcgtgaactttacatggaacagtgccagttccaccacgttggagttgtatttcaggaaggtgatggctaccagtgccgccacgcacagatccagaaacccttttttgtattcaccccagggagtcttggaggcgtcatccagaaaaccggtcatcatgcataccacgatcagcagcagatagatcaccagctctgcgcttaagggtgcaaacagtaaaacagatgccacaaatgccagcacaaaaatgattccggcgcctcttggctttcccgcggacaattttccatcatgggcaaattctcttccggcgtccttcggcagatacgggcttaattttgccgtcgccagtactgtcgctccgaaagcaaaaaggattccaaaaaaagcaaggagagaactgcttccctccggcaagatcatctgtaacatactatccctcgtttccacatgagatactcacttttgtactctcatgctgtattttctgataaattccgtgactgttcacaggggcattcgagaaatgaacacctcagaacagtcacaaaatattttaacacaaatatcccggaatctcaaataatttccacaacagttcagttctgaacatatctgggagcagaaatcatgcttgcatgattttgcgggcaaatatgtgcaggagctaagcgccaatctatgagcaaaggtagtcacgaagtgacataaaagcgtgttaatgcgactcccgtgaacggcgcggctgaactgttacgtttgacagttctcccacggtggactactatattcttatgaacactttctgaaaaatagccataaaaggagaaatgcctatgatgatccataaaattgaaccacataaatactatccggaattccgaaatcaggagccaaagccttccgattatctgctgttatttgacggagaaaaggtctatctgccctcccatacagaaaacagtgatgtaacggatacttccgccggtgccggcatctcggagcattctcaagtatatcttcctacttttgaagaagtccatggactcttgggaatccgtcagcctatggaacgtttttttctggactgtgaatatctcttttccattgatgaccgagcattcttccgcaagacgacggaggacgccggtgctctcatgctcccggaagaagacctctacgcctccggtatgttccgtaattttgagccggaatatctggcatttgctggaatcactgccacccagatcaatcgtttccgtctggaccggaaattctgtggccgctgcgggcatcccacagttcccagcactacggaacgggcctgcatctgtccggagtgcggtcagattgaatatcccaagatctctccagccgtcattattgccatcgtggataccgagcgggacaagatcctgctgacccgttacgccggcggttcctatcgtcactgggcactggtggccggcttcgtggaagtcggtgagaccttcaaaggtgctgcccgccgggaaatcatggaagaagtcggtttaaaggtcagcgatctggtctattacaaatcccagccctggtccttcagtgattccgccatgatcggcttcttcgcgaagctggagggggatccttctattactttgcaggaatcggagcttggcgaggctgtctggttctccagagaggatgtcccggatctgccctccactatcagtgtcggtcaagaaatgatcacattattcaagaatggtggggatccgttctgcaagagataattgatacatttgaaagtttttcatttctattccatgatataccttgactttgtgcccccgtggtttcatgccccgggggcttaatcagcttcttttcctctctgcgccccgctctctcgatctccccggggcttatttagtttcttttcctctctgcgccccgctctctcgatctccccggggcttaatcagcctcttttcctctctgcgccccgctctctcgatcttcccggggcttatttagcttcttttcctctctgcgccccgctctctcgatctccccggggcttaatcagcttcttttcctctc

SEQ ID NO: 5676 - DNA, 1878 bp, Unknown
  gut microbiota DNA sequence
ctcactttttatccggttttggtaaatagcaaatttaacttccgttttgcaaaggtaacttcttcttgaattatttttgcaagattaacttcgggatcagcaccttgaaaacagaaataagtattgcgaagacagcgccaactggaaattagtattgcaggagtggactttagtattacaaaccgcttgaaatagggctttttagcatgttactatactcttgaagtcatattttactgtatgcaaataagaagtcgtcgcttcgtttgcatgtttgcaagggaaacttccacctctgggatatgggtgacatgatcaggagatgacattggcagttttacttcagcagttcaggttttagtatgatttcattagcaggaacagcttccaggttaagcttagaggctgtatccgcgccataaaagaagctgaatagttgatgtgcggatcgattattcagcttctttcttgtataggagttaatgtgactcatcatcaggttgactttatcctgtgtaagaaaagcaaatgatgttttcttaggaacaatccttctgatgaattcatgagttacttcaatacttcctttttgatcaggacgttgcggatcacagtaaaacacataggttctgcgtcttccatcctcatcaaactctattgccagcggatccgtaaattcgcttccgcgatctgctaagatgacctggaacatctcacagaattgttcccgcccaagtatctcataaagatggttcaccgcttctgttaccgacttggctgtattcgcttccctaagatatgccagcataagggaacagtttctaaagaatactgtaagcagcacctttgtggaatccctggtgccttctaccgaatccatttccaccacgttgaaatcaggatgtcctttcataaaagcttcaaaatcttcgtaggtacgcccgatatggcatttcttatcgacacgtacaacctttttggatttgcgttttttataacgcacttttcttggaagatctatatttccagcagaaagtatgccggcatctatgtagttataaatggtcctttcatctaccatgatttctgctgcattgttcatacaaatttgatgaatcgactggccttgtctgataagaggcgaaaggatggcatcaagccgatccagttcttctggtgttatatcgatacccttacgggaatcagaacgtgtctcttcgtatgttttatgagcttcctttgcatcatagaactgtttggcaagagtacaggaacgtacctgtttacatgaattgcaaacatagggtgctttctttagacttgaacatttttcctcttcaaaatcaggacaattgaccatgcacaaagcacactcagaacagtatgtttttccgtgccataaccgattaataaacccacagctatcttcgccacagatatactgcttagtgcatctctttctgtgtctgcatggattatagcctctggaacgcgtaccagtatttcgataatcaagatgggctttcacttctttagaaacagttgatggatccttgcctatcagagcgcctatttcaacgaacgtctgcccctcttttaaagctttctgtatggtaatgcgatcatccagtgtcagatgcttatatttataggatgacatgtatttatcctccttagtcttgctgccatctcctgacactactgaagtgattaccattattacacaaaaaagaaaaggaagatcatctatttacaagactatcttccatcttcatgtttgtatgacttatttctgttttataaaatataaaaaccttagtaactggaagttactttttcaattgagttttatccggttttatccggttttatccggtt

SEQ ID NO: 5677 - DNA, 6875 bp, Unknown
  gut microbiota DNA sequence
ccccattttgccaatataacccatatttcgattgaaaataccatagtcaatgatatttgccattaccagaggaaccatcagttcgaaaaatgcttccagcagtttgaacagtggtgccagtatggactctttcttataatctttcagatacatcattaatcttttcataaagtcctcatttcttcgcgctttccatgtaaggcgcatccgcttttcatgcttcctatccctgtacagctttctcgttccctatcttttacgcttctgctgttccgtaacagaccgccagcgaatagctatcctccagaacccgttcccggaaacatatctgcttttcctgccagttctgttcgtcggagaaatcttctcccactgcactgccgatcccctggccggtgtatttgccgtaggcttcttttctgctccacaatcggtaaaacagttccgtgcgctgtgacgcaggcagttcctgcagcagtttccattccgttggcgcaaaaaaacgctctgccgtccgttccttatagggaacccatttctgaatgtccgctcccacttctccgtctcctaccgcgcagaccacatagtctccggaatgagacagattgaattttttcgggatattcacgatctgtggcttccccagttctccatattcgtaggaaaaggataacgcccccgccttgtcccggtgcatccgctcctgtaacaccgcaagcagctcatcctcttccagaaacaggattccggtattctccgtaccgtctatcagatccagagccatcttctgcaacagcattcccgcgccgagactggctgcctttgctccggtgcttttcagccgttgtaccttcttacaccgcaccggatccacacattctgcagcttcccgcaggaatgtccgcctgatttcttcctcacctgggtgcaaatgcaatacataaattcctacagccatattcttctcctgacaaattgccatatatacccaacataaaggctgtcacacagaaatcgtgcgacagcctcattattattcttccggcttggcggtgatggccagatgcagttcatccaactgcttctgctctaccgtacccggtgctcccatcataatgtccatggcattcttgttcatggggaaaggaatgatctcacggatgctttcctcaccacagatcaacatgatcatacggtctacgccgggagcgattcctgcatgagggggtgctccgtaacagaatgcattgtacatggcagggaactttgccttcacatcggcttcgcctaagcctaccagttcgaatgccttgatcataatctcaggatcatggtttctcactgcgccggaggacagctctacgccgttgcagaccagatcgtactggtatgccagaatctccagaggatcctgattgttcagcgcatccataccgccctggggcatggagaacggattatgacagaattccagttcgccggactcttcaccgatctcatacatcgggaaatccacaatccagcagaactcgtagcaatccttcttcatatgtttctcgctggctgcacccagcagctttctgtatacacctgctgtcttctgcgcttccagcttcttgcctgcggcaagccctacaaagtcaccgttcttaaggccgagagccttgatgacttcttccttgcgatcctgcaagaacttggagataccgcctacgaactctccgttctcgtctacacggaaccagaatcccttgcgtgcggtctgtacttctacctctgcgcagatagcatcgatctgcttacgggtagcggtgaagccatccaccacgatagcctttaccgtctgaccttcgaaagcagcaaagccacagccctgcattacctcggtggcatcggtcagcaccagatcgatacgcagatccggcttatcggagccgtacttatccatagcctccagataagggatgcgtacgaaaggcgccttggaagcttctttataaatgccatacttttcaaatacgggaggcagcacctgctctacgatggaaaatacatcttcctgggaagcgaatgccatctccatatccagctgatagaattctccgggagaacggtctgctctcgcatcctcatcacggaagcagggagcgatctggaaataacggtcaaaaccggaagccatcaggatctgcttgaactgctggggtgcctggggcaaagcgtagaacttgccgggatgatttctggcaggaaccagataatctctcgcaccttccggggaagaacaggtcagaataggggtggtgatctccatgaagttcagagcatacattctctgacgcagctctgccacgatctgacttctcatcacgatattcttcttcatgttcggatttctcagatccagataacggtatttcagacgggcattctcgtctgcatccttggactgattgatctcaaaaggaagtgcattgtagatacacttacctaaaatctcgatcttgtcaggcactacttcgatctctccggtaggcagattggcatttttgctggaacgctctcttaccacaccttccacggagatggtggattccttgttgatgccatccatgacattcatcatttcctcggtctctactaccagctgggtggttccgtagaaatcacgcagaatgacaaagccgagatttttactgacttttctcatgttctcgaaccagccgaccagtgtgactctctcaccgacattgccgatccgaagttcattacagttatgtgttctggactgaatcattgcttttgctccttcgtctgttgcttttatctctttaattcttctttatagaattccacgaattcttcgtagccttccttattcagctgttccttttggaacttcttgttcttgttcatgcgggctaccagcacctgggtaccgtccttacgggcttcctgggcctgtgcaatcacttcacacaacctttcgccactgacacccttctcgatcagatatgctacctgcttcggtctcgtaggcacctggaaccccctctccatgagcagcatgatgatacgctcgaagccgatggagaatccgcaggcgggcacatcattgccggtaaacttgccgaccatcttgtcgtaacgtccgccgccaccgcagctgccaccgaattccggcatagcgatctcgaaaatggttccggtataataagacatacctcttaccagcgtagcatcgaacacgatctcgaaatcggaagccttcgtcgctctgacgctgtccatgatctctctgaggctctgggcgatctcgggctctaagaatccttctagggtatccgccagataagccacaccatcctctgcactctccagacccttgaacagttccagatacttgtctacacatgtcttatcaaaaccgttctccaaaagctcagcttccacgccttccagaccgatcttgtccattttgtccaaagtgatgaatacactgtcataggactcttcggggaatccgctgtaagcagccattgccttcagaatacgacgttcattgatacggatctggaaatttttaaatccaagcctgcccagtgtggtggtggtcgccaggatcagttcgatctccgctaagttagacggctcaccgagaatatcgatatcacactgcatgaactgacgatatcttcctctctgaggtctgtccgctctccatacattgcccatctgcaatgccttaaaaggagaaggcagggatgccgcattattggaataataacgtaccagcggtaccgtcaggtcataacgcagcccactgtcgactacctcttcctcggtggtcgcagctgctacattcagtttctcgccgcgctttaagattttgaagatcagcttctcattgtcaccgccctgcttactgcttaagtttgcaatattttccacacagggagtctcaatggaagtaaaaccgaatttgccgtaggtgtccttgatgacgctgatcacgtaatcacggatctgcatctcctccggcaggatatctttcatgcccgttgtaggcttcttgctaagtgccatggttttctacccttccgctcgtatattttatatctgcaaattgcctttcccgcaattttagctcaatatcttatatatgatactttttttcccgataactgtcaaccctcccgtgccccgcttctgccagaaattcaagcatttttctatagaaaaacaggacagtgatctctcactgtcccgccttctctttcatcttcttcaaataggcatctttcaatgcacatttttcctctaactgacggatctgcttcttcagatcctccagatattccgcggtgactttcacgcctccgcggaccgctacatcttcatgtctgctcatatcctccagccattgtctgatggagttttcccgcagatcattatacgtattgtcttcctgtggctgccacataatttccctccaaacttactcagacacggaactgccgcatattctgctgaagtttgccgatgctctgtaatacgcccttggtctctgtagacatattttcactggaataggtgatcccctgaaggttcttattcactccggccaccgcatccgccagttccgcctgcgctctgttgatgtcacctaatatgccattgatagtatgaatggactcgctgacaccggaagcattctgccccagactgctgctgacttccgcataatatccggcatcgtttttataatccttcgccagattcacttccagataatccatgatctgatctgtatccttcgtgttcataaatgccacaccgttgcggatcgtgtgcacaatgtttccctcttctaccagccattcattcactacattggcattggttccggcctgtgcctccacgaaatttctggcctgtgtcgtcatattgttctgtaaagtgctcacactgagcagttcgcagagcaggatcgccagaaccagtgagatcaccgtctgcatcgtaatttaccttttgatcgttttccccatagtacaccatcccttttatccttattttgttttgcgtaccgtagagtacttttgtcttaattgtactttttctcatacaatgtgtcaagaaatcaccgcgtcaaatcgccaaagtttttagttgcagaaaagctgctacccacgatcggataacagctttctgactgcctgttatgattttcagactattttttaatatttgatctctttgccttccagtctccactgtctgaactctgcggatgcggacagtaacaggtcggaggaagaattcagtgcggtctccacagaatcctggatgacaccgatgatgaagccgacacctacgatctgcatggcaatgtcgttggagattccaaacaacgaacatgccatagggatcagtaacagggatcctcctgccacgccggatgcaccgcaggctgccagggttgccagaatactcagcacgataccgcttaagaagtctacgtgaatccccagagtatttgccgctgccagtgtcattacggtaatggtgatggctgcaccgtccatgttaatggtagctcccagcgggatggttacggaataggtatccttatccattccccactcttcacaggccttcatattcacaggaatattggctgcggagcttctggtgaagaacgcagtaatggcactcttcttcaggcacttgaaaatcagcgggtacgggttcttgcggatacaccagaacacgatgatcgggttggtcacaaagtagataaacagcatggaacctaccagtactaacagaagttttccgtattcggagaagatctccagtccgttggaagaaatggagctgaataccagacctaagattccgaaaggagccatactgatgatccagctgactacctgggacagaccgttggaaatgtcatccagtactttcttggtggtatcattggctgctctcataccgacaccgatgatcacaccccaggtcagaacaccaatatagttggcatttaacagagaggataccggattggctaccatattcattaacagagtcttcagtacttccacgataccgtccggcgctgccatatcggtggctgcgtctgccagtgtcagtgtcacggggaataaccggctggcgatcacggctaccagcgctgccagaaaggtactgaacatgtacataataataacggtcttaatgatgccgccatggctcttccctgcatgacacaaggcactgatcagcaggaagaataccaacaaaggcgcaatggccttcagggcacctacaaaaacatctcccagaatggcaataccggttgcctgcggcacgaccagtcccaggatcacaccaatgaccagaccacatacgatacgcaggatcaggctgatgctgttccacttttcaaatagttttttcatacttacactcttctttcccttttttctgatgtatacatgtactccattgcacacattatgtgctattatatagtatttctcatataaagacaagtgtattttccctgcggacattttgaggctatttgtttttcgatttttagaacagaaaaaaacggatccgcaaaaagcagatccgctttccgcattttcctattacattacaaaacatttgtcattgcggagattcccaccttcatgacacccgccagtaccatgacccagatgggattcagtttcgtctttcgaagcagcaacacacagattccgaagatcaccaccatgctccactccgtacccgtcatggaaatcgtccctccgcttccccagaacgcatttttcaggatcaggatccctgccgatgcgatc

SEQ ID NO: 5678 - DNA, 8915 bp, Unknown
  gut microbiota DNA sequence
tgccggacgcagagactttaatactccctgcaacagatccagattacgatacttcaggtatagtcttgccaggatcgtcacaataatgcaggacggcagaatacacccgaccgttgccaccacagctccgggaatcccggcaatcttcagtcccacgaaggtggcggaattcactgcaatggggcccggtgttatctgtgatatcgtgatcagatccgtgaattccgacatggtcagccatccgtgagtcgtgactacttgtccctggatcagaggcatggccgcataaccgccgccgaagctgaacattcctatttgcagaaaacttaaaaataattgcagatagatcattttccagacctccttttggaaagaagtgtccggaccaaaccaatcagtccgcagacgatcacaatgtagaccacattgatctccagaatacatgctgccaaaaaagcccccaacataatgacaagtgacataggatctttttcttttacgataggtgcacccatatcatacgtcacggaagcgatcaccgctcccactcctgcctgcatcccagacagcatctgcgccacgaagaagttactgcggaacacattgtagcagacagatattgccgctataatcacaaagggcggcaggatcgttccaaggatcgccaccagtgcccccgggatcccggccagcttgtaccccaccacgatggctccgttgactgcgatcgcgccgggcgaagactgggcgatggccaccagatccagcatttcgtcttctccgatccaatggtattcatccacgaatttcttcttcatcagcgtaacgatgacataaccgcccccgaacgtgaatgcactcagatacagtgtggatatgaatattttccacaatatttttccctggaattctttttcttccctactttccatgctacttttctccattctttttgacagtgccttcccgcatccttgctgttctgtctgtcaaccgtaaaactgcaccgcatttttcaatgctccacacacacaacagtatctgggcgtaaccgaaaaacaccgccggagtcccgatcagcgttaccagccccagtgcccagcttcccattctctgtacaaaatcccacgggaaataccgcagagacattacagtgagcaatgccgctgctcccagccagatatgatcatttttggcgcatatcttttttccttttacaaagctttgatagagcaaaaacaacagacagccaagcagcagaattcccattccggggtgtccgttcctataaaaataagtactgaacagaccgccgatactgtatccctgctccatgatgctggtatattccaatccgctctccgcaaaggacccgtcgaacagccagtgtttccacgtcatataggtggggtatgccatggcaactcccagaattccgatcaccggatattgccattgtctccggcagataccacccacgcagatcaggaacaaaagcgtcaacgcggctacgccatccagtcttccgataatccccagggccagtactgcggtcaatccgtagcctgtcttccagaacattttctccgtatccgacatttttaccagagacgctgccaggatcggcaccaccatccatatcagaatctgtgaccgatccacactttccgttaccacatatacatgataaggcagcaacagataccccaatgcccccaccagtgaaaaccagtctttcttttttctctttaaaacgcaatggaacatactccatgcggttccaaaggtaataatctgggtcaatatgataaaagtactttccatctgttattctcctgtcatgaaaggttcttcattgtaccagtactgaacatccgattgcagtataatggtattttcataatataccacctgtaaaacaagtattaacagtaccgcaaacacgatccaaggggaaattttgttctggctttttcttttttgaagaagtatccataccacactgcccagtactgcatatcccaacacacagacaacaaactttccgggatttcccattacatataaggtcttcaccgccagaggattccatataccaaaagctgctgccgccaacaccagtcgcgcatcctttccccatttggaaaacaggaaataaagcaatgcaagtgcagctccggataaaaatgctatcatgatcttataagatgttgcgaccggaaatccaatccaccgcattcctgccggaatccataaatatagtaaatgggctgccggaatccttccccattctccctgaagcatatactctgtttctctcaggcactgtacactgtcagtccccagaacaagataatccaccagcaaggggatacaggctatcatccagattcccaccattgcacagttaatccattttttctgtccgctcacttctttacacaatacttttctgcggaatatcgcaattccatccagacaggcaaaaagaaccagcactattacaaaaagaatccttcttccggcggttgtcttctctactttcaactcataggaaacatttcctccctccgaaaacggctgtatctgcagatgtgctgcatcaaccgtatctgccacataataggtaatccttttatgctctgtatctgcagacaaagttgcccggttgcccctgatcgcacgaaaagtggtctcctccgcttccagactgatctccattccgcttccgattccgccatttgcaatatccgactctactatgatacgatatactcccgggttcaatgcaaaatctttgctgacgatcccccctgtttcttccacccgatacaattgctgatgatctgcctcgaatacaatatccgatcccccaaaagacagcacgaacagaaccgctaagagaagcccttccgctaataaaatccatttctttttcatctctgtctcctcttccgaatcccgaaaaacacaatacccgctactgtgatcaaagtaaccagttccgccgttctccaataccacggttccacaaaacgcactctgactgttccggcatatccacccggaatgcacacttgcaaaatatgtccaccgtcgtctgtgatctccaatacttctcctttgtcatccctggctgcatatcccttatacatgagaaccggaagtgttactatttcctcccggggcgaatcattcctgcaggaaaagcttatatttaaaccgctcttttcatagtcttcgatctgaatattttcattaacttccggtcttgcaaaagtcagctttgtactgtccgttccatagatcaggtattcttctccggagatgtaaccaaatcccatactttcccgattatataatgtaacgtccctctcctgtactcccgaatccatcataaacagataggatgcagacaaagacactactgccgtgatcagactcatctgatagaagattttccggttgttctgaaaatatcgaatcacatatcccgttaccgtcaccaacagaatcgtaccccatcccagaaaacgattggggaactgcagactgctcaccagtgtcgctgcaatgccggaaattttctgaatgttatcccagggaaaggaatttgtggacatccataatgcaaggcatccgaatcctgctgcctttatcgcaaagctcttctcagcctctttttgtttttgcaaatctcccaaaaataacagcagccagaaaatcatcattcctattaccagaaacaatcctaccccaataggattcagtaaatcccctgccttgccttccatggattccggaattctgctgaaccagaactgctgtaatatttgcgcaaaaatggttcctctgtcctggatagttctcgccgatgcatggcgtatcctgacatcctgtgtcaaataatagtcaacaaacggtaccagataccacaggcttaatcccaacgcaaaaaatgctccacatgcaagctgccggaatcttggccatgtaaatactctgcgaatataaatcagacagaacagcactgtgaacaatgccgtaatctcacaggtcagtacatgggtctggatcaatccggcatatcccagccccaaaatgatccagcttttatgaaactctctgtcttccacatctttttcaaagacaagataaattccgtataccaccagcggcagaaacgtataggcgcttccctctcctacagctccaaccattaccagcttaaaaaatctgaatatcgataaagtatacaatgcgctgcagaccagacctatgatccggtctttgaatattccgttaaagcagtaccaggctatcgctgccgtagcaatattaagtcctatgcaatagaaggcatagctttctgtcatcgtaaagcctgccatgcgcagaagtgccggaaaatacaataacagattacaatagaaaataccattggcatagccgtggtcaaatacccatctgggttccagccgtaccggaaactgcccagtcagaagtccatcctttacaccctcaatgcgatgtaaatggtaggtcagatctgcccctgacaccataccgtcatataaataaggaatggacgctaaaaaggcgatcacaccgattccaaacaagatctggcgtctctgctcatttctgccttttaccgcctcccgacgctccagccacatggtcgcaagaaccaacagtgctgctgccgcaaggatcacaagatatcttgtccacagaagattcgtctccacgatccgcagattcccggtggtcagcttttcccgtccggaataatcgattgtcaccgtcagttcttctgtgggctcataaagccagaaatcataggaagtatgccccagtgcactgtacagatgctcgccgttgcacaacaggcctccctgatacacagtgccgtctttcacagtgcagaccgcgatggcatccccggtgcattcgtaggacagctccacccggtatactcctgtccctagagaaatatgctcaaataccggctcttctgtataagattccccttccgcaaaagtatagcttccggtatagttccattcccggttgggcatggcaatacggatgatacaacccaccatcaatgtagccagaatccccagaatcacatatctgatataaggttttttcttcacctttcccattctcctttggtcacatgttgtaaatcatttgaaataaaacgcaaaaatccataatgagtatagcacaaaaaaaagataatgaaaactctcttcattatctttttcctgtatttatgcgattcctatgcctgttttgcatgatgttccacatgttcgaaggtgaatacattcaggaactgttttgctctctctgtctccggatgttcgaaaaatttatcgggagcggcctcctccacgatcttaccctggtcgatgaaaataactttgtccgctaccgcctttgcaaactgcatctcatgggtgacaatgagcatggtcttgccctgttttgccagatccagcataacatccagcacttctcttaccatctccggatccagtgccgcggtcacttcatcgaacagcaggatctccggatgcatgcacaatgcccggacgatggctacacgctgcttctgtccaccggacaactgtctgggataactctttgccttatctgccagtcccacgcgcgccagaagctccatggcctccttctgtgcctctgccttatcgcgcttctgtaccttgaccggtgccagcgtaatattgtccagtaccgtcagatgcgggaacagttcatagctctggaataccataccgatcttctgacgcagggtggtgatatttttactgcccttgcggatatccatgccctgcagctttatcgtaccgccctgaataggttccagtgcattaatacaccgaagcagcgtactcttaccacagccgctgggacctaccacaaccagaacatctccctgttttacttccagattgatgccgtccaggatcttctggccttcatattcttttgtcagattttctatcttcaacaatgtctctgccatgttttcactccattctcattccgactccggttccatttctaattccactttttctccagcactctggccagaacactgaagggccagcaggcgaagaaatacagaacaaataccacaaggaatactccgaacgcagcattgggactgctcatacgattggcctcaatgatctgctgtgccaccttcagcatttccaccacgccgatcatgagcaccaggctggtggtcttgaccatacgggtgatcagattgatggacagcggaatcagtctccgcacagtctgcggaataatgatatacagatacgtctgtattttactgaatcccagtgcttcactgctttcgtactgatgcttcggaatactgatcagcgctccacgcaccagatctcccatctctgcggtgccccacaggacgaagacgatgacggatgccacctctccggacagattccagcccagtgctctggtagatccgaaatatacaataaataaaagcaccagctgcggcatgatacggatgaattccagatagacccggaagatagctttgacgaaccggttcttcaccgtcatcaacgctcccaccagaatacctaacggcatactgatcagaatagatacgatactgatcttcatggctacccataatccctgcagcagacggagcatgttcgtgcctttgaataatacatcaatccccaaatccggcataacgcatcctcctctccaccagagatcccacgatcgataccggcagcaggatcaacagataaaataccaccagaaggaaaaggctctcggtagtcttataatacaggccgatcagatcctttgccgtaaacatcagatccatcagactgatggcactgaatacactggtctccttcaacaggaaaataatattcgccacaaatgccgggatactggtagacatggcctggggcaggatcacatatcttagtacctgtccggagttcattcccaggctgatggcactttcattctggatcggttccacggcctccagaccgctgcggaatgcctccgccatataactgccacctaaaaatgccagtcctaccacaccgcagacctctgctgacatccggatcccaatcttcggaaatccgtaataaataaaaaacagctgtaccagaagcggtgtattacggctcagttccacgtagaccgctacgatccaccgaagcaccggtactttataatattgtatcgccgcacataccagtcccagcagaatcgcaaacaggattccgatgaccccgatcttaacggtgagcaacgctgccttttcatacataggcagatattttcctataaattcccagttcatgtatttctttcctttcaggaagcttttcaacaatcgtgactattcagaatagttacacacaactttttagattataacaaaagaagtagccagatgcaagaaaagactgcggcggcaacatacgtgccccgcagtcccctctctatcattctattccgatccgtacttattgtgcggttaccttgccgccttctactaccaggctgtcctcgtaatccagaccataggtatctgccagagttgcctcgtaatctgcatggaagaagttctcttcaccaaggcttgcgatctcatcgttgatccagtcaagcagagtagtattgcccttagatactgcgggagcgatggtatcagcgctgcccagagaaggaatacctacggtatagccttcattctgcagagcaaatgcgatgacctcagtgttgtcgtttgcccatgctacggaagtaccgttttcaaaagcttccttagcggttgcataggaatcgaacttctgtaaaggaatgtccggataattagcaatcagataggtctctgcggtggttccggagatcacaataatagaatcatctgcattccagttatccagagtggtgattacattatcatccttggataccacgccaagtgacacattcatataaggagaagcgaaatccacttcctctgctctctcgggagttacggtaaagttcgccaggatcacatctaccttaccggtctgtaaatactcaatacgattggctgcctctgtagatacgaaattcacatctacccccaggtcttcgccgagtcttcttgcataatacacatcatagccctgatattcaccgttctcatccacatagccgaacggattcttatcagaaaatacaccgatattgatggtaccgctttccttgatctcatccagagtgcggtatacagccttgcttccagcatcgttgctgccggtagctgctgcgccgttatcgttgctgccgcatgcggtcagccccagtgccaatgctcctgttaatgccagtgccaaaacgctcttccactcaaacttcttcataatccttttcctcctcttcgatgtctcatttaagtatcgaatcaacttatgggtaggattatatctcctatttcatactatgtcaataggaaaacagtaatttgtttctactttttgcgaaaaaataaaatcaatgctataatattattgttacttttgattgtaaacagaccttgtaaccggaattccgtaagagataataaaggagaacaaaagaataatatatgaaaaaaccgatttcacgtttctatctgctgttggttctcgttccgttactgttactggcgagcatgggcggctattactttctggaagaaactgctgcaggcagcgatgttgttgtcgttccacagacccctgcaccgccttctgccacaccggttcccgtccctactccggagccgacccccactcccttcccggagcatgacattacgctcatgg

SEQ ID NO: 5679 - DNA, 1403 bp, Unknown
  gut microbiota DNA sequence
ggaggcggtatataatattatcgagcagaaactggccggtctggtggcaagcaagatcatcaacgccaaagaattcaatctgccggagaatgccaagagctcgtccattaagatcccgatctatgacgtgtattttgccatgatcaacaacaatatcctggacagaaaacatttcgaggcagaagatgccggagagacggaaaaggcagtctatgccgcttatctggagtataagcagggtgtttacgacagactgacttacgaacttacagaaggggcaactccctatagcaagctttccaaggaatatcaggtttatcagagtaatatcgtaagcctccttcgggaggaaggcgtgatcatgaaggaactggtggatgataatgatgctacgcagacggcctgggcgaaggaggaagtgatctccttaaaggagtatctgcagtattgcatcgccatgaactggatcgatgtcagcaagctggatctgaatgacaaatattcggattctacagaagtttatgacaaactgttggagtacaccattaatgccatcgaccataccacggagttccagaaacgtttctacaagtatatgcttttaaatgacaagatcaccgggaaacagatctgtatgctcctgtgtgaacagcaggtggtggacatcccggctgaggatgaagaagcactgtattccggtaaattgtcggcatatcagtttatgatgaaccggatcaataatctggagatcacaccggcccaactggcactggatccctgcaatgcctctgtagtcattacggatgtcaatacgggagatgtgctggctatggtgtcttatccgggatatgacaataacaaaatggcgaataccgtggatgcggaatattatgcgcagctgaatgcggacaagtccagcccacagctgaattttgccacccagtataaggcagcacccggttccacgttcaagattgtatccgctacagcgggacttctggagaatgtgattaatcttcagagccgtgtgaactgtgtcggtacttttaccgagatcacaccatcccccagatgctggaaaatttccggacatggctatgaaaatgtgacatctgccatcaaggattcctgtaactacttcttctacaatgtgggctaccagctggctaccagaaccggaagctataatgaggaagcgggtctggataccctgagcaaatatgcggatctgtatggactgacagataaatcgggagtggagatcggagaatatgcaccggatatatccaccaaggatccggtacgttctgccatcggacagggcagcaacagctacactaccgttggactggccagatatgtcactaccattgccaacagtgggacctgctataatctgacac

SEQ ID NO: 5680 - DNA, 14866 bp, Unknown
  gut microbiota DNA sequence
acctgccgcaggaatactgggatgcgttccatctgggaatgcgtcaggtggtggaaaataaaaagtactttaatgatctggcggtaaatgccgcaggtaagaccggtacggcagagcagacagcttcccgaccaaaccatgcgctttttatctgctatgcgccgtatgagaatccggagatcgccattgccacaagaatacccttcggatattcttcagactatgcagcccagttcaccagagatattatcaagtattattacggactggcggaagaggatgatctgatcacaggtactgcggatactctcgacaatgcagtatccaatgagatgtaactatccggagtcagataacacagacagatgaatgccaaatgtgggacttcggatattaagaaaataaaaagacaggtataagaaaatgaaagatgcagtattgatcaaaagctatcagagcgggatcactcttctgatgagggaggatgcttccctggaagaaatcctgcaggaactggcggtgaaattcacagaggcgaaaaacttcttcggtacgtccaccatggcattatccatggagggacgggaggtgaccgaagtggaagaaatccgcatcctggataccatccggaagaacagcaatgtgaggatcgcctgtatcgtgggccatgatgagaccacaaacaagaactttatcaaagctctgcagcatatggagaaaaagctttccaccggggacgaggggcagttctacaagggaaccctcaaaaaccgggaagtcatagaaaccgagaacagcatcgtggtcctgggggatgtctacccgggcagtgcggtgatctccgcaggcaacatcatcattctgggaggactgtacggggaagcttatgcgggcggatctggcagagaagattgttatattgtagcgcttgaaatggagccggaaagattaaaaatcggcgatttcaaatataaaaccaatgcgaaacagtcgaaatggggcattcgtcccaaagtacaaccgaaaattgcacacctgaagaacgggaagatcgtatttgatccccttacaaaagaattactgggtgctttttaaaagaatccaggggacgacaaaatcaaacaggaggaatccaaaatggaacaaaacgtttccacggagaagaaaagctccgaagtcattgtcgtcacttcaggaaaaggcggtgtaggtaagaccactacatccgcaaacgttggaacaggtcttgcaaaagcgggcagcaaagtctgcctgatcgatacggatatcggtctgcgtaaccttgacgtggtcatgggactggagaaccgtatcgtttacaatctggtagatgtggtcgaagggaactgcagaatcaaacaggcactgatccgggacaagagacatccgggactgtatctgatgccgtcggcacagaccagagataaatcggcagtcaccccgggacagatggtgaaggtgatcgaccacttgagagaacaatttgattacatcattctggactgcccggcgggaattgaacagggcttccagaatgctattgccggggccgacagggcactggtggtaacaacaccggaggtctcggccatcagagatgcagatcgtattatcggactgctggaggccaacggcttcaaacagatggatctgatcatcaacagactgcgcatggatatggtaaagcgcggagatatgatgtctgcggatgatgtggtggatattctggcggtaccgctcatcggaatcgttccggatgatgagaatgtagtcatcgccaccaatcagggagaaccattagtcggaagcgatacaccggcgggtaaggcttaccgcaatgtggtggatcgtgtgctgggaaaagaaattccgttcctggatttcgaaaaaggagtatctttttggacaaaagtaactggtatttttcggaaagcataggaaggggacgggatgaatatgaaacatttttttcgcaggaaaagctcctgccaggtggcaaaggaccgtctgaaaatcctgctgatatcggaccgggtgaactgttctccggagatgatggaactgatcaaggcggatattacaaaagtgatttcgaaatatatgcggatcgatacggatcatatggaaatcgagatacaggcaaagggcagtaagggcggacggaataagagccccagcctgattgccaatattcccattattgatttacagaagactgcgaaaatgccataaggagcataaaaaacagaaaggtcaaacggatgtttaagaattatagattacgggattatgactttaaactgatcatactgatacttgcactgtccatcatcggcatcataaccatcggcagtgcggaacctgcccagcagaccaaacagatggcgggtgtagttgcggggcttgttatcatgatcgccctttctttttttaattattccgtgatcctgaagctttactggctgatgtacataggcaatctggtactgctcggactggtaatcctgatgggtgaagaaggcaacggagcccagaggtggcttaagatcggtggactgcaatttcaaccttcagaacttgcaaaaattttattgattttattctttgcacagtttattatgaaatataaggagaagctgaatactttccctgtgatcgcatcgattgcggtacttatgggtgttccctggatcatggtaaaggaacagccggcgctgtctaccagccttgtgctgatctttattttctgcgtgatcctgtatgccggaggcatcagttataagctgatcttcggagcattggcggtggcaattcctgcagtgatcatactggtatctctggcaatgcagccggacagtaccatattggagacttaccagaaaaatcgtatccttgccttcgtcaatccggaggaatattccacggatctggcttaccagcagttgaactctgtaatggccataggctctggagaactggacggcaagggctataaaaacaatgagatcacatcggtaaagaatggcaatttcctgtctgaagcggaaaccgatttcatattcgctgttatcggtgaagagtttggctttaagggaagtatcgtagtgatcatactgctgatgctgatggcaatggagtgcgtttctatcgcgggaaaggcgaaagataccgcggggacgatcatagcggcgtcaatggggggactgatcgctttccagagctttgtgaacatcggagtggctacgtttattttaccgaatacaggacttccgctgccttttgtaagctatggcctgacctcgctgatgagtctgtatattggaatgggtgttgtactgaacgtacgattacaggcgaagagaagctagacaaaagaaatcatacattacacagagaaggggtatggactatatgaacattgcactgatcgcacatgatgccaaaaagaaactgatgcagaatttctgcattgcatatcgcggaattttaagtaaaaatgaattatatgccacaggaactaccggcaggctgatcgaagaggtcaccaacctgaatatacacaaatatcttgctggacatctgggaggagaacagcagatcggtgcacagatcgaacacaacgagatcgatctggtgatctttttgcgggatccactggcacccaaggcccatgagccggatgtaagcaatgtaatgcgcttgtgtgatatgcataatattccgttggcaacgaatctcgccagcgcggaactgttgatcaagtccttagacagaggagatttagagtggcgtgaaatgtacaaataaagttcgtcggatctgcttctgcatgtccttgatcctctgcatgagtctgcttaccggatgcggtaatgtggcgtatacatttccgtacgatgtcaattccagtgtcagcagtttcaatgtgctggcaggaaccggagcgggcagggcagagccctttgctgcggatctgtgtgtggtgacggaggaccagacgggggatggcagcgtagacatgtcacaggcctcggccgctgtactgttcgacgtaaacaataaaaaggtattatattccaaaaatgcacatgaaagattgtatccggccagcctgaccaaggtaatgacggcactggtggcattacagaatgcgtcaccggatactgtgctgacagctacggatagcgtaaagatcacggaatccggtgcacagctgtgcggattaaaagccggagataccatgacattggatcaggcattacatattctgctgatgtattccgccaacgacgcagcaatgctgatcgcggagaatatcggcggcagtgtagatcattttgtggagatgatgaatgaggaagcacagagactgggggctacaaataccagttttgccaatcctcatggtctgtcggatgacaatcattatacttcagcctatgacctgtatctgatctttaatgaagcaatcaaatatgattcctttaatgagatcattcacatgacaagctaccaaaccgcatattatgacaaggacggaaaagccaaggaacttacggtgaacaacacaaaccgttttttacggggagattttcaggcaccggagaacattacagtcatcggcggcaagacaggtacgaccaacgcggcgggacattgtctgatccttttatccagagacacaagcggagctccttatatatcggtaatcctgaattcctcagccagtgatgtgctgtacccggaaatggtacaactcctggagcaaatcaataaataactgttgttttttgaggggttataaactataataaagtaaataggttgcgtgaagttcctataaattttacgacaggagggttacaccaatggttcagttgattgtaggcaaaaagggcaagggcaagacaaaacagctgttggacaaagtcaacagcgaggtaaaggatattgcgggaagtatcgtatatctggacaaaagtacgaaacatatgtatgaactgaacaacaaggtgcgtctgatcgacgtttcccgttatatgatcgagaatgaaagcgaatttctgggattcgtatgcggtatcatttctcaggatcatgatctggagcagatgtattttgacagctttctgaaaatcgcagcactggaagacaaagacatttccgcagttgttgaaaaactggagagaatgagtgatttcttccaggtggattttatcctcagtgtatccagggacgaatccgaattaccggagtctgtgaaggataagatcattgtatctttgtaagaagaacgaattataattttcacgtatgagaagcctcggatgccaaccggggcttctcaaacgtaagggagaggaaaggaggttttccaatggcagaacaaccgagaaaaataaaaaaatacagaaaacctttgaacctcaatatcggtatgctcatcttcggagctatttttatttatgtaatcatttgtgtgatactgtattttcagacagaccacatcgtgcgttatgaagtaacggaaggatcactggctaccaataatatttaccgtggagtgtcaatccgcacagaggaagttgtaagtacggatactgccggatatgtgaatttttatgcaagagaaggcgaacgggtggccaagggagacactgtttacatcgtggacgagacgggccggctgacggaagaactggaggatgccagccttggagaaaataccctgagtgaccaggaactttcggaattccgtaatgaaatcgtgaattttatgcatgggtatgatgacaaaaattacgagagtacctatgattttaaatattctttgaagaacacggtgctgaaactggccaatgtaaatatgctgcaaagcattgaaaacggaaataacggttcggctgcaaatattgtaaatttctgttatgcgcccaccaccggtatcgtggcttactggacggacggttatgaaaatctgaccgtggaaggtgttacccaggaagtatttgataacaaaaattacgagaagaaacagatgctcggtaatgaactgatggctgtgggagatccggtgtacaagctttccacggaggaaaactggtcggtggtcattcccatcgatgcagagcgaggcgcagagatccaacaggaggattatgtcaaagtacgttttctgaagaatcagtatgagtcctgggggcaggcaaagctgtttaccggcagtgatggcaatacatttctgtcacttacctttacaaattccatggttacgtttgtatccgacagatttctggatatcgagctgatattgaatgatgagaccggactgaagattccaaattcttccattgtggagaaggaatttttcctgatcgatgaagattttgtcacgaccaatgaaaatacgggaacccagggtgtgatcagacagtgctaccgggataacggggacatttccagtgaatttgtggaggccggtgtgtacagctacgatgaaaatgaaggcgtgtactacatggatacttcggtgctgaaggccggagatgtcctgtacaagacagacagccaggagacctatacggtaagcaagcgtgcaacactgatcggtgtgtataatgtgaataagggatatgctgacttcaagcagatcaatattctgtatcagaatgacgagtattccatcgtaaaagccaatacgacctatggcctgaatgtatatgactatattgtactggacggttcttcggtatcggatgatcagatcatcaccaatatcaagaaaacagataccggcaggacggatatttctacagacagtgtagaaccgggagtaagcgacaatataccggagagcacagagccacttccagcggagaccagagaggaaccgacgcaggagaccacacaggaagcaacacaggaaagtcagacaccggaaagctagaaaggatggcggatactatggaagagaccatacagagcatggaactggcacaaaattacaaaacggtaaaagagaacgtcacaaaagcctgtgagcaggcgggcagatcggagcaggaagtgacgctgcttgcagtcagcaagaccaaaccggtggatatgctgatggatgtctaccgtgcgggagccagagatttcggggagaacaaggttcaggaactggtggacaagatccctcagatgccttcggatgtcagatggcatatgatcggccatctgcagcgcaataaggtaaaatatattgtagataaggtttacctgatccacagcgtggacagcctccggctggcggaagagatcagcagagaagccgtgaagaagcaggtggaagtcaatatcctgatcgaggtaaatgtggcacaggaggaaagcaagttcggaactacggtagaagaaactgcaacactgatccgtgagattgcaacgcttccgggaatacatatcagaggattgatgacgatcgccccttttgtggaggatccggaagaaaacaggggctattttcagaaacttcggcaattagctgttgacatcggaaataaaaacattgataatatttctatgaatattctttccatgggaatgaccggcgattatatggtggccacgcaggaaggagccacgatcgtcagagtcggaaccggtattttcggagaaagagattatagtaagacgatctagaaagagattgaataataaaggagacacacaacaatgggtgtaatggataagttcctgaattatatgaaactgaacgatgaagaggatgaaggtttctatgatgacgattatctggatgatgaggaagaagtagaaccggtaaagaaattcagcccggccaagagcagacagcaggcacaggaggatgacgaaccggaagagaagagtaagcgttcctcacagcctaaggtaacaccgatccaccgcaccgtgaccaagaaaatgcctggaaccggcatggaggtctgtgtgatcaagcctacttccgtagaggatgcaagagagatcacagagacactgctggccaaccggacagtggtacttaatctggaaggcctggacgtggatatcgcccagcgtatcattgactttacttccggatcctgtttcgcaatatcgggtaatttacagaaaatatcccattatattttcattattacgccggccagcgtagatatctccggtgattttcaggatattttcggcggcgccggatcttttgaaatgccgatcaaaaatggaatgtcataaaatgtcaaatgccattaaaatgtcatatgaagataacttcctgtaggcaactgcaggaagttttttaaaaacagatataaattatacaagaaagaacagtttataaggaactgaagggtgaacaacatggcacagagattaccggtgctttataacaaaaagccttgctacgatattgtattccagcagtcttttgacggcctgtgggaagaactggcagagcttggcgcagcagacaagagattatgcattgtgacggattccaccgtagacggactgtatgcggcacagattcttaagtttcttgagggaaaatgccgtaaggctgtgaaatatgtgttccctgcaggagaagaacacaagaatctggataccgtgagggacgtgtaccgtttcctgattgaagagggttttgacagaaaagatatgctgctggcactgggcggcggcgtctgcggtgatctgaccggatttgtggcggctacttatttaagaggcattgattttgtacagattccaactacattgctggcacaggcagacagctctattggcggtaagacaggtgtggattttgacagctataagaacatggtaggcgcatttaagatgcccagactggtatatatgaacctgtccgtattaaaaacgctggaagagagacagttttattccggatttgcggaagtaatgaaatccgcactgatcaaggatgcgcccttctatgagtggctgatcgagaacatgtatgagatctgcgagcgggatctgaataccctggaagaaatggtgatccgtacctgctccatcaagaaaatggtggtggaaaaggatcctaccgagcagggagaccgtgctctcttaaatcttggacacacgatcggacatgctatcgagaaatacaagaattttgaattgtatcatggagagtgtgtggcactgggtacggtagctgcagcatatatttcctggaaaaaagaaatgctgagcatggaagaattttatgagatccgtgatatgtttgtaccgttttatctgccaatctccgtggaaaatatcgatccgcaggagatcttgaaacttacaaaatccgataagaagatggaagccggtacgatcaaatttattctgttaaagaagatcggaaaggcagttatcgacagaaccgttacggatgaggaaattctggctgccatcgaagaaatcaattttagtgaagaggatgctcatgaataaggaaaagaaaagtagtcgagttgttatgctgatcatagatgccctgattgcagccgtacttctggtactggatcagtttaccaagcatctggcggtggtacatctgaagaaccagccggcctatgtgatcattgacggagttctggaattgcaatatctggagaacagaggatcagcattcggtatgctgcagaaccagaaggtatttattctgtttgtgggaatcgtatttcttgcggtgctgttgtttttccttttcaaacttccggaacagaagaaattccgaatcgtgcatgtattgctggcagtgatcgttgccggaggcatcggcaacatgatcgacagattccgactggattatgtagtggattttatctccttcgtactgatcaattatccgatctttaatgtggcggatatttatgtggtagtggctaccattggcctgtttattctgtttttgttcgtatacaaggaaaaggatctggaattcctcaactttaagcagaatcgttatcgggagatgaaataatggaagaactccgatttcagatagcagatgagatggaagacgaacggattgacaaatgtatgagtctgcttgtggagaatctgtcccgttcttttatccaaaagctgatcaaagacggaaatgtgctggtaaacggtaagccggtaaagggaagttatcgtgtcaaatgtgatgatgaagtagtcttctccgtgccggaatctgtggaaccggatattgaaccggagaacatccctctggatatcctgtatgaggatgtggatctgatcgtggtgaacaagccgaaggggatggtggtgcatccggcggcgggacattacagcggcactctggttaatgcactgatgtatcactgtggcagggatttgtccgggatcaacggagtactgcgccccggtattgtacatcgtatcgacaaggataccactggatctgtcattgcctgcaaaaatgacaaagcccaccggtgcattgcagaacagttgaaggaacattccatcaacagaagataccgtgccatctgtttcggagagctgaatcaggaggaaggcaccatcgaccagcccattggcaggcatccgaatgaccgtaaaaaaatggcggtgaaccaccagaacggaaaacgtgccgtgacccattaccgggtattacagagatttcagggatatacttatatagagtgtgtgttggagaccggaaggacgcaccagatccgtgtgcatatggcaagcatcgggcatccgcttctgggggatgaagtctactccaaccggaaaagtcctttcaaattacaggggcagacacttcatgccaagacactgggatttattcatcccactaccggagaatatctggagatcgatgctccgctgccggaatattttgaacatcttctgacagtgttggagaaataaaacttatagcttatgtttcgtacagaaatgaggcgactatgaatctgtttgacattttaggacccgtaatggtcggccccagcagttctcatactgcgggagcggtccggatcggttatatttcaggaaaattacttcaggaccatgtggtgaaggcggaaatccttctgcatggttcctttgctactacgggcatcggacacggcacggataaggcgctgatcgcaggccttttgggaatgcggccggatgatatccggattccggacagctttttcctggcgaaaaaggacggaatggaattctctttttccaccattaccctgaaagatgcccatcccaatacggcggttctgcggctgaccggagaacatgggcggaaaatagaagtgcaggcggcttccattggcggcggccggatcctgatcgcaaaactggatgggatcgaagtaaatttctctgcggaaaagccgactttgattgtacacaatgtggatcagccgggacatgtggcacaggtgacctccatgctggctgaaaagcaggtgaatattgcaactctgcaactctaccgggacaagcggggcggctacgccgttatggtcatagagacagatcaggaagtgccggacgaatcggtggcctggctggaacagctggacggcatcattaaagtgacctatatcaatgtggaggagtaactatgtcctatcagtcatttgaacaggtattacagaaatgtcatacggaaggaaaaaaattctggcaggtgattatggaagatgatatggcggagcggaatgtgtcaaagcaggacagtatggagcatatgcggactacctgggatgccatgctgctggcagcagctacttatgaaggagatattaagtcctccagcggacttgtcggcggtgatggccaacggatggaggaatacacacacaataccggtaaggagtcactatgtggggaatatgtagatgaatgtattgcaggagcgttacagatgggagaatccaatgcctgtatgaaacggatcgtggcagcacctaccgctggagcctgtggggtattgcctgcggtgctggttccctattttcaaaaacggtgcagggataccgacaaaattctgaaagccatgtatgtagcggcggggattggacagatcatagccacccgttcttccatcagcggtgctgcgggaggatgccaggcggagatcggatccgccagttccatggcggccggagctctgacatatctgcagggaggcaactgcgaacagattgctacagcggctgccatggccatgaagaatctgctgggactggtatgcgacccggtagcgggactggtggaggttccatgcgtgaaacgaaatgtgatcggtactgtgaatgccatggcctgtgcggatatggcaatggcggggatcgtaagccggattccaccggatcaggttatggatgccatgaaagaagtcggggataaaatggatgcttccctgagggaaacggcgttaggaggcctggcacagacggaagaaggcatgaaaatagcagaaaaaatgcatgcatcatatgaaaattagtaataaacgactaaaaagactgataattggttgattttttgttaaatatcacgtataatgaaaatacaaaaaatgctagttatcaagtacagcagaaagtgggtgtgtgtatgaatacgattattaccattggacgtcagtttggttctgcaggccgtgaaatcggggaaaaggttgcagagtatttcggaattaaatgctatgataaggaacttcttaccagagcggcacaggaaagtggtttctgtgaggaaatgatccagaaccatgatgagagacctaccaattctttcctgtataatctggtgatggatacttattctttcggctacaatgcatcctcttttgtagatatgcctatcagccacaaagtatttcttgcacagttcgatacgatcaagaagatcgccgatgaaggcccttgcgttattgtaggccgttgtgcagattatgctctggcagattacaagaactgcatcaatctgttcatcttcggcgatgacgacgtgaagaccaaacgtatcatggccagatatgatctgacggaagccaaggcaaaggaaatgatcacgaagaaggataagcagcgtcagagttactacaactattattcttccaagaagtggggcagagctgatagttacgatctgtgcatcaacagtagcatcctcggcatcgaaggaaccgtaaagctgatcattcagtatgtggaagacttcgagaagaaaaataatgcagatattctggaaaagtagatatctgaaatatttttcaaaaaaaaattcaaaaaaataaaattatatcttgacgattagggcgcctcatgttattatactacggtatgccgcataactaggtataagtgtgtcggattttaggatcctttaccaccaaagttagcgagtaaataataggaggtgccttattatgtacgcaattattgcaacaggtggaaagcagtacaaagtttctgaaggtgatgtgatcaaagttgagaagatcgatgcagaagctggtaacactgttacttttgaccaggtgatcgcagtaagtgacaataccctcaaggttggtgctgacgttgctaacgcaactgttaccgcaaccgttatggagcagggtagaggtaagaaggttattgtatacaagtacaagagaaaaaccggttaccacaagaagaatggtcatagacaagcatacactcaggttaagatcgaaaagattaacgcgtaatcgttatgacaactattatcattcgtaagaaccatgaagggatctatcgtggattctactgcatggggcatgcggaatatgcgaagaagagattgttcggtaaggaaccggatatcctctgtgcagcgatttccgtgaccgtacagagtacgatcatggcgttggacgagatggtcgacgaaaaaatgctgctgacgcagaatgaggagacgggatttatcaaatgtgatttcgaaaattccattccgcaggacaagaccgtatttctgatggactttatggtgttttcactgcagaagctcagcagacagtacggggaacagtatttgcaagtaaaaatcgaggaggtgtagaccatgtttaactttaaccttcaattttttgcacataaaaagggagttggttctaccaagaacggtagagattccgaatccaagagattaggtgcgaagagagctgatggccagtttgtaaaagctggaaatattctttacagacagcgcggtactaagatccatcccggtgtcaatgttggtatcggtggagatgatactctgtttgctttagttgatggcgttctccgttttgagagaaagggcagagacaagaagcaggcttccgtatatcctgtagagaaataagttgatttaaccagggcttcaaacatactgattgtttgaagcccttttagtccgtaaagagttttatgtcggaaaggagaacaaaatgtttgctgacagagctaaaatttacgtaagaagcggtaaaggcggagatggtcatgtgtcctttcgccgcgaaaaatatgttcccagtggcggccctgacggtggcgatggtggtcacggcggtgacgtgatctttgttgtagatgaggggctgaataccctgatcgatttccggcacatccgtaagtacaaggccggagacggggaagagggcggcaagaaaaactgccgcggcaaggacggagaagacatcattatcaaagtccctgcgggaaccgtgatcaaagaagcacagagcgggcaggtaattacggatatgtcgggggacaacaaacgggttgttctcttaaaaggc

SEQ ID NO: 5681 - DNA, 4461 bp, Unknown
  gut microbiota DNA sequence
ttccgtgttttgaatcataattacaattctaccaccagctctgcatgggccagcatggattcccggtgagcaatcacaatcgttgtccgccccgccatcattctgtccaatgcttcatttaccaatttttcagagttatgatccaatgccgaggttgcctcatccaaaataaggataggtgcatctttcaaaacagctctggcaatggcaattctctggcgttgaccaccggataaccggtttccgcgttcccccacccgagtctcatatccatctttcagctccataataaaatcatgtgcatttgcaagctttgccgcattgataatgtcctcctgacttgcgccaggccttccatagcgaatattttctgcaacgcttacgtcataaagatatggttcctgaggcacataacctatcagttgccgtacctctgctaaaggatattcttcataagcctttcctttgataaagatttttccttcctttacaggatacaggcccaatataagcttggcaatggtactcttgcccttccccgattctgccttaagagccacacattttcccttgggaatatccaaattgaaatgctgcaaaacatcctgcctgccatcgtaggaaaaggttacatcccggatactgatttccgcatctccctggaaggaaatcgccgatacactctcatagcgttcaggttcttcctccatatccagaaacccaaacactcttttagcatttgcaagataatttgccatagacggaatataaagtcccacctgtaacaaattccagctcatagatccgtataacaaataaactgctgccagcctgtccaccgtagtgattccctgactgaccaaaacaagccccaccgcaataaacaccaacgagccaagaagttcaaagatctgattcagtccatccagcctggcagacataaagttcctcttgttttgctctttgcgatacttttcattttctttgatatattgttctaccatcacagatttcagggaaaatattttaatctgctctatgcctgacaaaatattggaaattcgttccgtaatggatacattgatggtggacatttcccaactgactctttgcatgggttcgataaacaagccgtttatcacaagcagtatagcactggcgccaaagaggcagagcgtcacctgccaactgagcatcagcattgctgtcagataaaagctcatcatcaaaaatggcatcaatacccgccgaaatcgagaaccatagataccctgggcccgttcacagtcattaatcacctttgacatgaactcgctgctgcccgtctgttcataataagaatacggtaatcgcatacatttggaatatagggccttttgtaaatcagcgccacccttttttgcctccatagtatatacataaaaggacagtgcataaataaaaagcatcagacatcctatccctgcacacagcagcacctcctttaaaagtcctgcaaacatattcctctgtgcatagttttctacacgaaaaataatatttttgaacaagagcgcagttatcatatcaaaaacagacaaagctgcactcatgaatataatagccaaaagatatctgataaatcctgtcttcatcattttcaacatccgccaaaggatgcgtaaatcattatcactgtccgcatccctgggtccacactgtctgataatcacatcactatatgccatttgtccgtacctcccttctcacaatttccccattttcaaagacatatatctcgtctgcatccgcaatagtgttccgtctgtgtgcaatagttattaccgtccgattatgtgaaatttctctcaaagccacctgaatctcctgctccgtctccacatccactgcggaagttggttcatccaaaagcaaaataggtgcgtcctttaaaaaggctctggcaatagaaaccctctgtttctggcctccggacaatcttgcccctcgctctcccacttctgtgtcataaccctgaggcagtttcataataaaattatgaatattcgccttttcacaagcctctatgatctcttctctggcagcaccaatcttaccatacgccacattctgggcaatcgttccggggaacaaaaacacattctgggacaccagactgatatgtttgcgcagtgcattcatatcccattctctaaaatcgtgcccataaatacggtattgcccggcctgtggataataaaaaccaaacaaaatcttcataacggtagacttacctccaccagaattaccgataaatgccacattgctgcccctttttatggtcaggctaatatccttcaaaatctgcttttcttctgaatacccaaaattcacatgctcaagttccaggacgatctcaccttcaggcgcaaaaacgccttttccagacacctcctcttcctgatcaagaatctcctgtaatctttttatcgaaatactgtactctcggatagaagcaatctgacccgggatatttcccataggttttgaaatctgatccagcagcattgcataggctaaaattgtgccaacagtcatccttccatgacaggcctcataaatgcagaacaaataacagcagagttttggtatccatcgcaccaaatcccccacaacaaaattcattgccagcaccttggttcggcgtgactcattccgcacaatctcatctgctatatcaaaaatacgtttcttctggagttcatataaatgaaaggtcctgcccactgaaatcccctgaattacatcataagcagaattttccaattcatcatacaactgcctgcgcactacggctattttcccaaccattttggtcagtttccctgcactccaaaacagcaacggatagcagatcattgtcaccaacaacagacgtacactttgtaatcctatgtaactgcacacagttattatagtaattatcgctacgaaaagctccgggatgccctccgcaaataatgcctccgtctggtacatatccgacaaaagtttattcattaaagttcccgttccttctgtatcgaaatacggaatccgaatctctaccagcttactcaccaacatattgcgtatatctgtttgcatgcagatactaaaggtattcttggaataactcttgccaaaagctattgcccctcccaatagcatgagaataataaatggaatcataaactccagcaaggcagccttttctccggcaaataaactgtccgtagcgtcagcaattttactacttccaatcacaattatccgaatcaatagataagaaaaaattatatataagaaacaaagataccaatattttcgaatgggatccaaaagcttcggatttttagtggtcataaaaggcttcattcgtacttctcctttaacgtaaattatgctggaaacaccatctcttcttttctcccaaatggtacatcagttttttgaagaaaacctctgtatatacagatagaatgcttgatttttcagtttttttgatatattttagaaataaagctgttattccattaaatacgcataaggagaattaccgtgccggcaccaatccatccagattacaatttcaaggtaaatcataagaaacgtgacaaccattactctatgaataccgctgcatcctatgaaaatatgtacggcattggttatatgatttccggggaccgtatcatcattactcctcaaaaaacggtaactgtacatcccggcacaattcagttcattcacaaaaatctcatacatcgtactacttatatttctgagggaatctatgaaaatattgatataaaatttcgggaatccgtggcagaatatatcatttccgtaatcgggcaggagcgttttaatatgctttatgaccaaatcagcattactctcactccacaggccatcgaacaaatcgatcagctcgttaaacttatagaacatgaatggaataattatgacaattactccaataccattattcagggacttgttatacaatttttcgtaacagcattacgcggacaaacgttttcttcccaaaatgatgtcattctgaaagaaactcatttttccttaataaatgcaatccattacgttcagtgccactatgtagaggatccttccctgagagaaacggcagaggcagtacacctgtctgattcctatctttccagactgtttacatcccgtttggataccacctactcccgtttcctcacagggataaaaatttctcatgccatggcattacttgttaatacaaatctgcccattatggagattgccggtcaatgcggttatgacaacagcaattatttttctgattcatttaaaaaaattgttggtgtttctccgttaaagtacagaaagcagataaataaataaaagaacagactttttctgtctgctcctttaactaatttctttgtg

SEQ ID NO: 5682 - DNA, 1588 bp, Unknown
  gut microbiota DNA sequence
atggtgtagtcaaactggctcatggcagggatcagctcagtaagtcccagttccttcataagggtacagattccgcaggtcgtaaatcttgcctcgtagccgctgccatcctccctctaaaatgtaatttgcatattctgtccctattccccggtatttcccgccttgctgtgcttatgtctcttgcgcacttctctggcgtgatctctgcgggccgcaatagcttctgcctcttccttaggaatcagcttcgtggtcttgacgatatatacgccgccatcatatgccttgcgtacccggatcttgcccttgagatagccgtgcttctcgcaataagccacgcagtaataatgcctgccgttagcgctgaaccatttgatcttcttgcgaaggttacgatggcagagataacatttgctggacacgacttccttatctgcgaaagcttctgtcttgtccttgaattccctggaaatatattttacataggtatcaaactgcgctttcacctcgtccctacggtccttcggaggacagaaggtatcgtaggacaggttcaccactacctccgggtgctcctccagtatccggatcaggatctttgccgtatagtaggcatcactgaacgcccggtggaagggaatatccttctcaatatgcagaaaatcaatggcatattccagatttctgcggatcttgcgctcctcataggcaatggcgaacagcttctgcacatccagatagggcagcggtcccggtgccagaagcggcatctcataatatgccatattccgctgtaactccgtcagatccagcgtgccccaggtacagaacagatactcctcctgtccgcaccatctgacaaaatctcctccgacctccgggaaaggccgtccacgctccagctcctgcatctgaatatggatcagtttgctggtgatcttgtgcatctcatggtagacctgcggtttgaccagttcgttgaattcactgaccataacacgttcattattcagtttgatggcaccgatctctatgatttcaaaaggcagcttctccacagcatcctctttaccggtgttactctgattccattccagatccagaacgatatattccatacgttcctccatattttgtaactattaacaggggttataaatgtcttacagtcttggcaatgcgatatccaatacctcttcatgccagcagtggtctccctctctgacatcgtggatcggatattcctcttttccgtacaggctgtaagccttccgcacaatatccatctgctccgtcacattcaccagtcccctggggccgttcagatggtcatcccggcaggactggaccgccagcggtctcggagcaatgagcgatgcaatatctcccatatcaaagtgttcccacagatggggaacataattacagctgcaatttccgttgagcaataacaacgcgtcacgatatccatagagatatccgctgatgatacattttttcacacggtcatccaaagcagagacccacagcgtctgcataccaccgccggaaaatcccatgactcccaagtcctcagtatcccatt

SEQ ID NO: 5683 - DNA, 733 bp, Unknown
  gut microbiota DNA sequence
gtatgaacagcagcctgactgctcagatcacccagaataacttcaatctcctcctgctcctgcagatccagttcttttaactggttgttcagattcacgacagcagccggttcgataaaaaaggtggaaccggtggaggactggtcatgcaccataccactcacctggctcttatattcggcttttacggggatacagtagcggttatcacgcatggtaatgactgcatcctgtaaaaaggtacggtaagcgccgtttaccatagaggtcagctggctgtggatcttttcgttggtggacagcttggagcgacggatactttttaatcgggggctggcatcgtctgccatctcctcttctgacagaatgcagcggttgatctcattggcaagctgtgtcataggggtgagtccctcaaagtaggcatccaggctgtcatttgggaagtcttcccgttctttttttccataggttttgatccggctgacattatccaaaaaggatgccagcttcaacaattcggacatagacagagaactgccgatttccagagaacggatcgaaaatcctagatctctgttgctgccaaaagaggtgcttccaatacggaagagacgggccaaggcatctttggtctcccgctgggctgttctgatggcggaaaggtcggtagaaggcaccagatcgcggcaaagctttttaccgggctcggagtcggccttctctgtgagaa

SEQ ID NO: 5684 - DNA, 1741 bp, Unknown
  gut microbiota DNA sequence
ccgaccccatctatatcatgcaccgcttcatcccgatagaagcgtttgaagatcgtgccctgagaatgttccgggatgcctctgcctgtatccgtcacatctatcctcaaatacatttcccaatcccgtacccttacctggatgctgccaccggcagaggtgtactttaccgcattatccagaatgttaaacaatgcttcggaagtccagcggctgtcatgggatattgtcagatcagatgggcagtccaccgacaggctgatctctttttgttccatcggagccaaaacaccattgatggcgctcaccagcgtatccccgatcacagcatcttgtttctccagcgtaatgacccccgtttccagacgggaagttttcaccattccctgaatgagaaaatccagtttatccagctgtgtgcctgtggcctgcaaaaactccttgcgcttttcttctgtcaatggccttgtcagcatcgtatcgttgattagcttcaaatttgcgatgggggttttggtctggtgggaaatatccgataccagggattgcagttcttccttttctccctctgccgtatgtctggttttctgcatcacattatagagccgttccagacgatggctgatccgagacagcagtgtttccgcttcatagtctacctggggccggtctgtactgtccatcatgtgatccaatgtctggcacaaaccatcggtgaacagagaaagtttcttttgaaaatagtgcagaaaaaccatgccccaaatgtaaaatgcagctgtcaaaataatgccgcagatgacaacacgcacatctttcgtcaataggaaaaaaatcaacagcagcaaagcggcagtgagcagagtccccgccacaatttttctcaaaaatgccctgacagataaattttgcagcttcatcgaggctcaccgccgatccactgatagcccattccataagctgtcttaatatatttcctctcgtctgtttcgatttttttgcggatacggctgatgatcgtcgtcagcgtatgctcatccacaaagtccccatcaatgtcccacagcttctctaaaatctgccgcttggtcagaataatccggggattctttacgaacaggaacagggtgcggtattccttcggtgtaaagtccagggattctccggcaagggacgcactttgttcggagaagtcaattttcagaaagccatcatcaaacagatcatgccggggtgtccgcagttccagatttgcaaaaaccgccgctacttttttgcaaagcaccgtcacagaaaatggtttggtcacataatccgcaccgccgacttcatatcccttgagcatatcgctctccttatcattggctgtgataaagatgatataggtatgctgaccgcgattccggatttcttcacacagatccagtccgctgccatcggggaggttaatatccaacagtgccacatcaaattcattttcccgtagctttcttaccgcgctgtcaaaattaaaaacagaaatgacctcatatccatcagaggtcagattatatgccaaggtccgattcaaaagctgatcgtcctctacaattaaaatcttcttcaagaccctcacttccttttcccaattttccaatcatactgatattctaaacattaaatgttgcagaaatgtcctaatcagatatttttctttttaattataggatagcctacttttcagcacaagggcaaaaatgcg

SEQ ID NO: 5685 - DNA, 2838 bp, Unknown
  gut microbiota DNA sequence
aaaccgaccgcttataacggttcttcctgcggcatggtgctgtgtactttctttctgacaaaatagaaacataccgcctgcagcaggatcgttgccagccaggaggccggataagataaaaacagtaccatcaacgaccggtgcattgggaatactccgtagatccagaagattctcgttcccaccgtaccgataatggacaatatcataggtaccgccgaatgtcccatgccccgcaaggctcccggaatcagatccatgatgccgcataaaaagtaagtcaacgtcgtatacagcagaatctccgttccacaggcaataacgtccgcatccgttgtgtaaatgtgaagcagctgcggaccgaagagattggcgcttccgcccagcgttaccgctacgatcaccgacaggatcatacaatcgatcagtaccctgtccatacgttttttcttcccggcaccgtagttctgactggtgaagctcatacacgcctgggtaatggaattcaccgacacgaacaggaatccaaagatattattggccgccgtatagcctgccatggcgatggagccaaaggaattcaccgaggactgcagcagaacattggagaaattgatgactacgctctggatccccgccggaacccccacctgaaagatctgcagcaggtactccccttttattcccagctttgaaatctgcagccggtaacagctgtccgtagtaaacaggcaccataataccagcacacaggagatcacctgagagatcactgtagcaatggctacccccgccacacccatggaaaaagcaatgaccagaaacaggttcaataccgcattgatggctccggatatgatcaggaacaacagcggacgcttcgtgtctcccactgcccgcagaactgcagctccgtaattgtacagcatgaaaaagggcatgctgcagaaataaattttcatatataatgccgcctgatcaataacatccgccggggtatccatcaattccaacgccccccgggtgcagaacagccctacgaataccatgacaataccgctgatcaatgcaaaggtcatagctgtatgtactgtctcgctcatctcccgctctttcccggcagcatagaatctggcggacaatacattggctcccagagaaacgccgataaacagattgacgaacatattgatcaatgccgtggtggaacctacagccgccagcgcctgacttccggtgaaccgtcccaccacaatgatatccactgcattgaacagcagctgcaaaatgctggacaccatcaggggcagtgcaaaggagatcagcttgtccataatcgtgccgttgcacatatctatttcatatttgtttttcttctgtgttgcttccataatttcatttcctgcaattctcttccaaatcccgttattttcccgcaccgctcatccgcatctgcagaagaaccgctataacttatgattttatcacatattttgctatatttctattccccattttagctgaaaatatgatatactatattttgaatgtttttgggggttcaaaatgagtatacatcccacaaatccttacaagagaacaaagagaaaggaaacttatccctatgaaatatgacgtaatcattatcggtgccggtcccggcggtatcttctccgcttatgaactggtgcaacagaatcccgacctgaaaattgccgttttcgaatccggtcaccctctggagaagcgccactgtcctatcgacggtgacaagatcaagagttgcatcaactgtaagagctgttccatcatgagcggtttcggtggtgccggtgctttttccgatggaaaatacaatatcaccaacgctttcggtggcactctctacgagtatatcggcaagagtcaggccatcgacctgatgaaatatgtggatgacatcaacatgaagttcggcggtgaaggcacgaagctgtattccactgctggcacctctttcaaaaaaatctgcatgcagaacaagctgaacctgttagacgcttccgtacgtcacctgggtacagatatcaacttcatcgtgctggaaaatctgtacgcagaactgaaggataaagtgactttctatttcgataccccggtgaaaacggtggagaccgttggtgacggttaccgtatctgctgcgaaaacgcttcttacgactgcgacaagtgcattatttccgtaggccgcagcggcagcaaatggatggagcagatctgtaaagatctggacatcaacaccaagtccaaccgcgtggatatcggcgtccgggtggaactgcccgcagtcatcttctctcatctgaccgatgaactctatgagagcaagatcgtataccgcactgaaaaattcgaggattccgtgcgtaccttctgtatgaatccccacggtatcgtcgtaaatgagaacaccaacggcatcgtcaccgtaaacggccacagctacgaaggagccgacaagcagacagagaacaccaactttgccctgctggtagcgaagcatttctccgagcccttcaaggacagcaacggctacggtgaaagtatcgcccgtctctccaacatgctgggcggcggtgttatcgtacagcgtttcggcgatctggtgagaggacgccgcagtaatgcgaagcgtattgccgagggcatggtagagcctaccctgtccgcaactcccggtgatttaagcctggtactgcccaagcgtatcttagacggtatcatcgaaatgatctacgcactggacaagatcgcacccggtaccgccaatgacgataccctgctctacggtgtggaagt

SEQ ID NO: 5686 - DNA, 2712 bp, Unknown
  gut microbiota DNA sequence
gtctgggttccggcctttacatcatataccaccttgccgtctaccgtatcgatcagcacttcgccgcccaatgccgctactgcaaaagaaataggtacggtagagaaaatatcgaaatcctgtctctggaagataggatgacgacctacgatcacttctaccagcacatcgcctctggggccaccgttgacacccggctcacccagtcccggcatacgggtagactgtccgttgtcgatacctgcgggaatatccaccgcataacgcttcttcataggaatatatccggtaccacggcaatccgggcatttgtccttgatcaccttaccggtaccctgacagtcgggacaggtctgtacattacgcacagtaccgaagaaagactgctgggtaaataccacctgacccttaccaccacacttggtacaggtctcagggctggttcctggcttcgcaccggagccgttacaggtcttacaggtttcctttactgtaagatcgatctctttcttgcagccgaaaactgcctcttcaaaagtgatatgaacactggtacggatgttggcacctttcatggggccgttatttctggcacctctgcttctgccgccgccaaagatatctccgaaaatatctccgaaaatgtctccaaaatcagctccattgaaatcgaaaccaccggcacctcctgcgccaccgtcaaatgccgcatggccatactgatcatactgacgtctcttctcgggatcactcagcacggcataagcctcggaagcttctttaaacttctgttctgcctccttgtctccggggttcatgtcgggatggtattttttcgccagtacccggtatgcttttttaattgcagcatcatctgcattcttatctacaccgaggacctcgtaatagtctctcttctgctctgccatttttgcacctctgtcatttaaatctaaaaacggttatgcacagggcacgctttcgcataccctgtgccacctgttattcgcaatcactgttacacagcatttactgttataccacgatttgcgttatttgtgaagtttaattatacttctctgaaatctccgtcgatcacatcatcgtctgcgttagatccagcattgctaccggcctgtgcattcatatcagggcctgctgcaccctgtgcaccctgctgtgcctgagcagcctgctcatacatcttggtgaatacagactgagcactctgggtcagtttctcttttgcagccttcagctcatctacatcgctgtcgctcatctcctggtctttggttctctccagaatagccttcacagcttccagatcagcctgtacctgggtcttgtcactctcgggaaccttgtcacctacttcattcagagccttctccgtctggaatacgaaggaatctgcttcgtttcttgcctcgatagcttccttacgcttcttatcctgtgcttcgaattcagctgcttccttgacagccttctcgatatcggaatcggacatgttagagcctgcggtaatggtgatgtgctgctcctttccggtacccagatccttagcggatacatttacgataccgttggcatcgatatcgaaggtaacctcgatctgagggattcctctgggagcgggagcaataccgtccagacggaactgtccgagggacttgttatccttggcaaactgacgctcaccctgtactacgttgatatctacagcggtctggttatcagcagcggtagagaagatctggctctttttggtaggaatggtagtatttctctcgatcagtctggtagcgacaccacccatggtctcgatggacagggacaggggcgttacatccagtaacagaatatcaccggcaccagcatcacctgcaagcttaccaccctggatagaagcaccgattgctacgcactcatcagggttcagagatttgctgggctctttaccggtcagggctcttaccttatcctgtaccgcaggaatacgtgtagaaccacctaccagcagtacctgacccagatcagaatagttcaggccagcatccttcatagcgttctgtacggggatagcagtcttatcaaccagatctctggtcagttcatcgaacttagcacgggttaaattcatatcaaagtgcttaggtccctctgcagttgcggtaatgaaaggaaggttgatattggtggtcattgcgctggacagctctttcttagccttctcagctgcttccttcagtctctgcatagccatcttatcaccggacagatctacgccttctgccttcttgaattcatccagcatccactgaatgatcttgttatcgaaatcatcaccgccaaggtgtgtatcaccgttggtagccagtacttcgatgacaccgtcaccgatctcgatgatagatacatcaaaggtaccgccaccaaggtcgtataccatgatcttctgttctttttcattgtccagaccgtaagcaagtgctgctgcggtaggctcgttgatgatacgctttacatccagacctgcgatcttaccggcatccttggtagcctgacgctgggcatcgttgaagtatgcgggaacagtgataactgcctcggtaaccttctcacccagatagctctctgcatctgctttcagcttctgcaggatcattgcggaaatctgctgaggagaatactttttgccatcaatag

SEQ ID NO: 5687 - DNA, 7620 bp, Unknown
  gut microbiota DNA sequence
cactggtgggctttgccggatgctttggggcatcctttgtattgtttctgctggcaggactgatggataccacgatccgcaggcggtacgaactgaagctggcattccggattccggtgctgggagatattccgcagatccaggcgccggaccggaagagtaagcccgtgttagtattgggggagaacagctcctttgccgtgaaggaatcctataataccatccgggcaaacctgctgttcacgggaaaaggagaacgttgtccagtctatgccgtcaccagtgcggataaggatgaaggcaagactttgaacagtgtcaacatcgccatcagttacgcacagctgggcaaaaaagtattgctcatcgacggagacatgcggaatatggcggtggcatctctgctaaagctccggggcagactgggactgagccagtatctggcgggactgcgggagacaccgcagatcgtggaataccggcagaatctggatgtgctggtgggaggagaaaatccaccgaatccttccgaactgttgggcggagagcggatgaaggagctgcttacgacgttgcgtagccggtacgactgcatcattattgatctgccgccggtaggaattgtgacggatgccctgctattgtcccatgaagtcaccgcctatcttctggtggtgcgggccggcgtcagccatatgagccgggaaaaggcggcggtgacactgttagagcaggtggatgcggatatctgcggcatcctgttcaacggcctgccgccaaaatctaaggactgtaactacagactgcagcaatactggcaggaatataaacagcaaaatggggaagcagtttgaaaaaaacgggaggtctttatgaaaatatgttttgccgcatcgtcgggcggccactttgaacaactgatgatgttaaaaccgctaatggaaaaatacgaaagttttgtagtaacggagaaaacaggctatgaggtgaagacaccggtgaaatgttactatctgcagcaggtgaaccggagacagtggagatgccttttttatctgttgaaaaataccgtggattcgttgcggctgttgcataaagaacagccggatgtggtggtctgcaccggagtgttggccatgatcccgctgtgcatggaagccaagctctccggcaggaagctgatctacatcgagtcatttgccaaagtgacttcggccacactgacgggaaaactgttatatcattatgcggatcgtttttatgtccaatggacacagatgaaggaaatctatccggatgcgatctgcctggggggaatttattaggatgatatttgtaacgaccggatctcagaagttccagttcaatcgattgttacaaaagatagatctgctgattgaggaaggcatgataagagaggaggtgtttgcccagatcggagtcagcgattatcagccaaagcattatgaatactgcaggtttctggacagagaaggcttcaccgggaagctgcgggaatgccggatggtcattacccatggtggaaccggtgtgatcatcggcgccgtaaaacaggggaaaaaagtgatcgcagtgccgagacttgccagctacggagagcatgtggacgatcatcaggtacagctgcttcgggaattcgatggaatgaacctgatctgtgcctgttataacagtgagaaactgggggattgcatccgggataccggcagcagggactttgccggataccattccaatacccggaggatccttaaggatattgagaattttttaattgcggaagagggggaaaaccatggaaaacattcaaaaatttcgtaaaaaagggaaaaaactgggagagtatatgatgacgaagctgcgccttttgcgggatcagaaaaaatattgctcccggggagtgacattaaaatatatgctggaccgggtggattcccgggatctgatcatcgttttcagctcctgcaccagaaaagggatccgggccagatacaattatgtccggacgttaaaggaagttccctgtaacaagttgtttctgttggatgattttgcgtcagatcacagaggttccttttatctgggcagcaatatgaaattcgaggaggcggtcgttgtaagggaactgatcgaccgggtacggaagcagaccggagcaaaacgcctgatcttctgcggttccagcaagggcggttacacggcactgaatttcggactggactatcccggaagctatatggtggtgggtggtccccagtattttctgggacaaagcctgctggacaccgggaatattgaggcgttgaagcatattgccggacaggtctgtaaggaaaaggtcgaattcctcaatgagtatcttccgaaaaaggtggcagccaaccgttatgcgccttcccagaggatctatctgcattattccgacagcgaacacacctatgaggaacatatccgctatctgcgccgggatctggtgaaaaagggataccgctgcagcgaggacgtggcacattacaaggaacacggggagatcagtctgtattttccggaatttttattacatagtgtggaggaaatcttatgccggcagtcagcgtgatcgttccggtatacaatgcggaaaaatatctggaggaatgcattcgttccctgacagagcagacgttgtcttcactggaactgatcttcgtggatgacggttccacggatgcttctcccaagattctggaaagatatcgtgccagggatcccgaacacatccgggtcatcacccagaagaacgcagggcagggaaaggcaagaaatgtaggacttgcggctgccacgggagaatatgtgggattcgtggattcggatgattatgtggacaggcgtatgtacgcggccatgtacaccagggccggttccgaagaactggatctggtggaatgtgattttcattatctggaggaagacggcagagagaagcgctcttacggttcggcggctccctggaacaagctgatccgcaggagactgcttacggacaacgatatatggttcccggaggggtatatctatgaggacacctctttctacctgaagttacgtccctttgtgaaaaaacaggcgaaaatgctgggagtctatgtctatcaccgggacagaggggattctaccatgaatgacaataaaagcagacgggtgggaaatatttttccggtattgcaggatgcctgtcggttttaccgggaaaaagaactgatggatacttatgggaaagaactggaatatttctgtacgaggatcctgttgtgcagttccatggggcggatctccagagtgcgggaccggaagctgcggaaatctctgcgggaagagacttttgtgttccttcgggaaaattttccggagtatcggaagaacccctatctgggcaatggactgaaagggcgttatctgcggatcgccacaccggcattgtgcgggatctgtgggggaaccatcggcagatgcaggccgggagggttaccgggatagaaaatggcggacagagaaaaggggaaaaatatgcggatatcggtagcaatggccacttataacggggccagatttatcacagaacagctggattccatccggcttcagagccttccggtggatcaggtgatcctgcgggatgacggttcctcggatcagacgctggagatcgtacgggaatatctggagacttacgagttggcaccggcatggaggatcacacagaacggaaaacgactggggtatgcggagaatttctgggcagcggtggaagagacgggcggtgattatgtctttttctgcgatcaggacgatatctgggaaccggaccgggtggaagatatggtgagcgagatggaaaaacggagagagatactggtgctgggatcggaattcgtaccgtttacagtggatcccgatgctccttctgtcagccggagcgtattgaaaagcttccggggggacggaagcatggagcatgttgcatggagtccggcccatattttcatcggcagtgagggctgtaccatgtgtctgcgcagagagtttctggaagagacgaagaagtactggtatcccgggtgggcgcatgatgaatatgcctggaagttgtccctgtgcatggacggctgttacattctgcacagtgttacgttacggcggcgaatgcactcgggtaatgtatccaaacgcaaaatgcgggatctggacagacggatcgcttttttccgggaattgcagaaaagtcatgaaaccactctgcggttcgccgaggactttggaatgccggaggaagcgaaggaactgttaagacgcaatatccgggccaccacccttcggatcgagctgatggaacagcgaaaattgtggaatattgtgccgcttttatggaaataccgggattgttatcacagcaaaaaatctttgccggtggaatttgccatggcagtcagaggatgaggcaatgagcagatatctggtggaaaaaacgaagacaacggggcagggctggcagagcagcaaccgctattttgaaaattgtggggagcggagtcttggacagtttttgtcggtttcttttcttgtgacctattatattttaccacagtatttcggaatccggctgccgggctttgatctgacggcacagcgaatgctcataacgattctgtgtctctttctgctgagcaaagaatcccggaaaaagatgttctgggaaggggtgagaagctgcagattgtggctttttatggcaggatatctgggaatctgtttctatacggcggtactgcgttttcacataggtacttttctttatccgttcattgaattattgggagcttttctggtgatctacgtactgcgggagtatctgggaagtgatggatttctggtgcttttccggcggatgcttttgtttctgtgtgtgctgggactcgtggaggcggtcatgagaaagacaccctttgcctatctggagaccatcaggggactttataccggaggcatgatccgctccggttcctaccgaatcatgggaccggccaatcattctctggcgtatgggctgatcctgatctccgggttaccattattgtgcattgatgaggagaaacattgcttcacgctgtttcggcatctgcctctcctgctattggtggtggttaatgtatttcttacgggatcccgttccacgctggcggtcatgggactggagcttttgctgttgaccgtgctggcaccgggagagcagaggaagaaactgttgtttaccatagtaccggccgggcttttgattctgcttcttgcatttttattccccaattctccgccgggacattatattctgttgcagcttagtacggtggtggatgagatgtttggaacctcctatgccatccgttacggggtggacagcacctcccttgccaacagcgcttcctacagggatgccctgctggatattttcacggtggactggctgaacccctggctggggcagggctccggatatcatttctcctggtatattccgggaggggccacgatccactccattgacaatttctatgtggccaattatatccgctacgggtatccgggactggtggtctacggactgttgatcctgcaggcggtgggggagatggtgcgatgcgggattcaaaagaaggacagaataatgttatgtctggcgcttgcggtctgcgggtacttcttaaatctgtggtggatggatacgctgcagaccatcaagtatgcgtatcttcccatcgcactgttccaggtgatctcccgggaaaaatgggaaaatatgtcggatttgcaacacaaagcggtgcacagatacataaggtaaatagagagaagaaacgaaaaaaggaaacgaaaatgcgaaaaagtttttggctgtttgcaatagttctgagtatgagtctggggatacgggtgcaggcggcacccagagagatcccggaccatttcaataccggtgtggatacagatacagagctgacggagatcccggaaccggggatttacggtggaatccagtataagaccggagccggaggacagctggcactggatctggtctacagcaacagacaggcggggaatgagatagagatccggaatatggatttttcccggtatgcactgttgatggtcaatgagggcaaaattgccgtggagaccacggtgactttccggaactgtaaattcgatgcagtcactaccgggcgggaggatgcccggatatcctatgtgttcgaagactgcaccctgcgtaattttcagggaagcaatgccacgtttacccggtgccgtctgggtggcagcagcggagatgcgttgaatccctatcgcaatgtgacactgagagattgctacattgcggatctggcacatccggacagcggggatacagtacattctgacggggtacagatcttcggatatccttctcttacggcggagaatatttccttcgacaactgcagattcgaagtaccggcgatccccggaggggggagctatgtgaatgcctgtctcatgattgccccggagaagagcggcgccaaaggaatctatttcacaaactgcattctcaacggaggcggttatgccatctacacactggtaaaagacggtttttctctggagaatgtggtgctgtgtaatatctcggtaggggatgcggcccgttatggaaccttctaccatcgtaatgtcacggcgggggtcaccatggagaatatttatacgacggatactttgtatgtaggcagcagattcgtggatgaagagggcaggatccatttcagcgtgaccaacgatacggcgcaggaacggaagctgatgatcgtgacgcccagacagaccataatactgcctgttaaggcgtgtccgccctatgaggacagaacggcggatatgacctttgaggattttccctttgatatcgatgtggtggtgccgggggcacagtgggcggtatgctatgacatcacggacgggtgcacacagatcgcactgtatgcggaaaggaagagatgattatgacggaagtactgtatatatgcctgtggtacaaagataaaaagagaacctggtccggaacggcctggtccctgcgacaggccatggagccctatctgcaggtgcaggatctggcactttcggatcctctgtaccgcaaaatactccggagactgcagaggaagaagggactgaaccccgggccggtcctgcgggaccggctgcggctgtcggggagatatgctgcgtggagacatcggcacaggacagacgaaaaaatgcctgtgtttcagtttggcggctggccgtcgggagcgcatttggcatcctatctctatcaggacctttccatttccgcgattctgtggctgcagagggaagatccggtgggctatcggtactgcgagtatgatcaggtgccgcaaaagacgttggaacgcagagcggcgagacaattggagcaataccggcaaagtgaaggggtattcactatgagcaggtggctttcggagttcctgatccgggaatgcgggctccccc

SEQ ID NO: 5688 - DNA, 165 bp, Unknown
  gut microbiota DNA sequence
caccgtgagcaagtagggctacagcccggaatgcgaatggctgtagcggttcgagagtgcgaagcacgaagaagcgcgtgattcaccaaagaagacgcaccgtgagcaagtagggctacagcccggaatgcgaatggctgtagcggttcgagagtgcgaagcacg

SEQ ID NO: 5689 - DNA, 1410 bp, Unknown
  gut microbiota DNA sequence
cttctcctgctctggcagcttcaatggaggcattcagggataacaggttggtctgggatgcaatatcctcgatatcggtgataatattaccgatctctttggagatttctgtaatgtgctccatttctgcaagcagctcattcattttttctttttcttcgtgtgctttgtttgcagaggcttttactcgtgctgatgcgctctgcgtttccttcgctgtatctgcagccagatccacaacagtgtcaatggtggcattcaattcctcaatgactcctgcctgctctgttgcaccgtccgccagggattttgatgcattttccacctctgatgcattcgatgatacctgttctgccagattactgatctcggtcagagtactgttaaagcgcttcagaatatacagaagtgatgccttcaattctgagaaatctcccaggaaatctgtaatatcatcaccatttctggtcaagtcaccctgtgcgattgcctttacctccacagagatctcgctgacataatctgccagaatgcccatggcttctttcagattcctgatggtaccacccagctcatcctcagactcataggtaagcatttctacgttggacagttcgcccttgcgcaggctggcaactgctgcctctatctgttctaccggctctgtaatggaattggtaatgatcttgccgatcattgttgtcactacagcaatcgcaagacctgctgccacgatcacaataaatatgattatggtacatacattggccatggtctttgcccggtctaattctacctggaacgcgtcacgtaatgtagttaatttctcagcaaatgccgtatactcttcatacacctctccggtcatcagtttcgctgcttcctgctgtttgccctcacggcttaaattcagaatttcatccgaagcagctctgtattcttcccatgcagcgtttgctacttcgtaatcgtcctgtccttcttgagcatctctgtctgcagacatgattgcctccagattcgcatcggtgtcctcgatctgactctccagcttctgaatttcttcttcgcaggaggtcataacagcatcatctgattctaccagatgttgatactgtttgattctatattttgcagtcattgtttctaattcctgcagatattccaatgccggagaccagacctccgtgatcttctctatatttgaacggatcactaatgtcgagatcagtgccaccaacactaaaaagaatgtcataacaagcactgtcattcgatacaattttaattttccagcaacctttaagttagctatacgctttttgatcttttccatgatagttttccttcctttgtaaattattaattcaacttctatgtactcaaatgattacaatatagcactgttta

SEQ ID NO: 5690 - DNA, 1678 bp, Unknown
  gut microbiota DNA sequence
tattgcaataaactggtgaaaatcaatctaaattctgtctcccgtatggaggcttttcataattctagtttgtattctttttgtaactattcagagctgcaaaactgcgttctgcgaatggtgttctgaatagttactctatttttgagttccttgacgtgaacataaattacgcttcttacatagttgtttattttcatacatataggaatctgccttatccaataacatctgcagtgtgcaggttccttcatccgttgagtgtgcccatccgcatgcatagtcgatcgggatttgatcttcattactatttaatctgtctttttctctgcttaagctttgtaacagttcctcaatctccgttttgcttgtatgataaatcacagccatgaattcatctccgccatatcttcccacaaaatgcttgtccgggatcacgctacgtaaaagccgggcgaaatccatgatcaaccggtctcctgccgaatgtcccatggtatcatttgcagtcttcagattattcagatcaaacatgatgcaggctgtaggctcaacaatggtatcctgatctctaagcagagcctcacaggcgcctttattaggcagtccggtatgggcatccgtatatgccctctgttctaacagcttatttttcattgccatcttcatagctgtcagcgtctgcataataaccagaatcaccagacacaacatatccagcgctgacaacagctctatcgtacgtatctttactgcaattttttctgaataattttccgcagcaaataccgtttcatctgccatatgaaaataaatttcgctcatattcacaatatctgtattttgatagcccttgcttcttactgcctcgatttctgtttttaatttctcccaataatcactctgaacctgcaatttatcctgatattctttatcgtgaagttttaccagatcataatgtccatcctgatatcttaatccgctcagaatatcgtccagatattttatcaattcatcgctccggcttcctgtaatttctaatttcaccatgcgctgcgtgtctccacgcaccagacctgcataattgatcacacgtgcagtcccttgtaacctggtaatctgtaccattatcataataataagaaccaccaggatcaatataagacagctttgcatcatacctattatatttttgttttcctgtctgattgtatttctctgtttaacatgttaaccctcacgaatgctctatgtcaaaatcatatgatctttttcggttattttgcgaataacacggcatgggttgccggctgccaggctatagggaggaatatctctggtcacaacacttcctgctcctatgacacatccctcccctatggtaacaccaccacaaacaaccacattggatgccagccagcaattatcttttatagtgatcggcttcgcatactcaagagtataaaggctgccatcttctcttttcctgacattacgctcctcaggcaataatggatgcataggagttgccaatgtaacattaggaccgatcatcacattatcccctatatgtatttcacctacgtctaagcatgtgaaattaaaattagcagagctatattttccgaagtaagtatgacatccataatcaaaatagaccggtgcctgcagatacgga

SEQ ID NO: 5691 - DNA, 3171 bp, Unknown
  gut microbiota DNA sequence
ataattcccgcaatatctgtgtctgcacctcttgctgatcctcatctgtcaaattatatcttcttgctaatttacgtgcatgcaaacgtaattgttccaattcgttatccgatgaatcatacaattctccgcttaacattttttctctttccgtcatttctgatagcctcctgatctcgttttttatattgttatgttctctggtcaaagtctcgcattatcttgctgtgataaagtcttttttgatgtcaagaaacgctttcatgtcttccaggatatgatacagcatggaccggttttcaaattcctgtctcgtgaccgggagcggctgctgttcataatagtggtgcagtgtctctaactccgacagcagggtttccacattattttgttcttcaaattcatcggcagtctgacgtataaaatctgccagtgctttcccctgctccggcgtagtggtcagacggatgatatctgcatatattcttttcagtatcacgcactgtcttgctctcatctgcatatattcgtaatagtaatcatcctctgtgatcagatgattattcatatatcgtaatgcctcttttttcagattcacaagcattgcgtccagttcatcaaagcagcttccagtataatccgtcttgtcctccagttcaatgtagatcgccattctgtgtaagatgtacacgattttatcatccacggttttctgataatccaacagttgtcttctgccatccggcatatagagattccacagtgtgcctatccccgctccgatcaccaggatcaggaattcgttcaggatcatggacggactgcagctcttagctgaaacataatgcgtacaaagcactgcaataggagcaatcgcttccttcatgtctaatgccatgcagctaaacagatatgggatcagtacaataccgaacgcccacacgtgatatccggcaagcggaaagatcactgctgacaagatcgtcatgatcacaaatatgatcatgcgcttcgctgttatccgcacagtttccttcttcgtatcctggatcgtcaggagagtgataatccctgcggcatacgcaaactgaagctgcagggctgctgcaagcagtacggcagctactgagccggtaacatatttgatcagttttatggtttcctcagtttttattttcataggtatagtttccattcttactatttaaaattcagcacccacctgccctctgacatatagtatatcagctttacggctagctgtctgcctaaaatgacaatcgtacaatcaaactctatggatggaatacctgcatagttctttcgttcctgggagtgtatctgcagctgtttgatggtccggatctctccaagcggattactttttcgatttcttctgctgtttcgtcatccacataataccgtccacacataatgatctcctaataagctacgctatgttcttatttcatcttatcataaacacctgatccaaacgattcaagagggtcttttcaaattataatctatcatattgatattatttattccatgatttttatacgattcatgaatcacatcggttgacagagaaaccggaaccgcttcgtcacagaaaagcgtggagccgaagaattgatgatgtaaacagactcgtctacaacattgatgaaaatggatttttgtggattatttcctgccgtggacactatgaggattgataaaagagggcaatgagccctcttttgagtggaatcgtggctcgtcttactggagacggagtatactttccacgataaatgcggtcggttaactcttgttgatgttcctttagatatggaagagcctcctcaatggtcatgccatcaattcctggcgctcccttgtttgccttaactctcttatacgctctgttaaagttatctttatacagtatcgcttccaagcactgtctctttctttccatatccgattgaatgacctagacgctttcacatattaccgggaatacaaccccttacttttttatgagcataactaacggacgctctcagcctcccactctatgacagctccactggatgcatcgatcgtaaagtcatattccgttccgccatagatgatcttgccttcgtattccggacgtccatcatcataatcgaatttccattcgcagatgtccttttgtgttgcaccgcttacacggccaagtgccgtctgctttgcatctgcctcactgacagtaacgttactgctattgctgacactccatccggatgttttttcatcgtatgcggaacttaaaatctcaccggtatccacggctatttcatagtcgtacttcttaccgcctgcgtaccattcaatttcatatacctggcgtctgccttcatagtccagctttgacttggtgatcgttgcatccgttgccttcactccggcatgctcaagagctatcttctgtgccatttcctcatccactatgccggttaccgtctgcgcggtagctgcggcagaactctgcgttgtggcagaatcggcagcggggactgtcgcctccgtctgtgcctgggtatctaccgcattcttctcccggctgctcatttccatgactgcacccgtttctgcatttacagtgtaggcataagcataatcgcccgaagtaaactcaaccttatagcaggacgtccctgctacttcattcaaggtcgtcgctgaaattgctgcatcctccgcagcaatattggctgcctttaacgctacctcctgagctgcttccatgctgatcagctgtgcctggctgcttggctgctgatttatcactggtttaccgccacatccggtcatagccactgccagggacagtgctgcgccggttaaaatcaatttacgtttcatcatctatctttacctccttctattcaaagtgaattgcgtagattgtagcaggcagccttttgttgtgtcaatagacgatttttaatttttctattaaattttcatgtaatctattgcggtaatcatagcggagagcgtaaggccggaaaaaagaaccaggttatagggaactccaaggttttgggaaaaatcccttcccagacctacgatattgaaatggtttgcaaacaggaatgccagtatcaccagtggcactgtcagccacacgatttc

SEQ ID NO: 5692 - DNA, 670 bp, Unknown
  gut microbiota DNA sequence
ggttactttgctttgctttttcatttgaaatataacctcttttctgtaatacatggtgaactgatgtgttacgaaaattcttttcctacagtatactacaattatcggaattatacaaatctcgcacctttaaaaatacagcaaaacacgtaaaattatttatacgaaccatcagtgacgacttgcaccctatacaggaagatggtactataaaaagtaagaggcatgattcggaaaagagaagataacgataaataaacagactgtagacaaaacgcttttggtcagcactccagaagcgtttttcttgttttcggttcaaaaagtgtgtacttgatcaataataaacacttttgggctcccctttttcccttcctggctatcatctttgccagttttttcagattcatgcaggcaaacgtaagcccgactttcatttccatccgggcttttcctatcatctgtgtatagcggaatccgtggttttcttttgctgttccgaagaggcgctctatggtctctttccgttgcgcatacatttccttcatcccaatcgtatgccggatatcctcacacttttccatgtacggctcccagatatgccgggtcactaccttcacatgatccctgctttctgtgcactgcttcagatatggacatccttcacaga

SEQ ID NO: 5693 - DNA, 1832 bp, Unknown
  gut microbiota DNA sequence
gccgtcctcctaagcgtcgtcgcgtttagtgagagttcgtcatcagacggaacagtgaatgaagtaacattagaacaagttggatgaaagtgccgcaatgcggcactgtaaacaaccctcggaagtcacttccgaagtataaagaagggaaaataaaaaaatggcagtaaatcgcgtacctgtactgaaaagatgtagagcccttggccttgagccttcttacctgggctatgacaagaagtctaacagaacctctgcaagagcaggcaaaaaggtatctgagtacggacttcagttaagagagaagcagaaggctaagttcatctatggcgttctggagaagcctttccgtaactactatgagaaggctgatagaatgaagggcatgaccggtgagaacctgatgaccctgttagagagcagactggacaacgtagtgttcagaatgggctttgcaagaaccagaagagaagcaagacagatcgttgaccacaagcatgtacttgtaaacggtaagtgtgtaaacattccttcttacctgatcaaggctggcgatgttatcgagatcaaggagagcgctaaatccatgcagagatacaaggatatccttgatgttactgctggaagattagtacccgaatggatcgatgctgatgttgagaactttaagggaaccatcaagaatctgcctaccagagagatgatcgatgttcctgttgacgagatgcttatcgtcgagttgtactccaagtaagttttatgtaaccccaatgaacatttcctgtggaatattattccatgggatattgttcgtaagaacatgtcaacatataaagttcgcaaaggagggtattggcagtgtttgattttgaaagacctaatattgaggttagcgagatttcagaagacaaaaagtatggtaaattcgtagtaaaacccctggaaagaggctatggtattactctgggtaactccctgagaagaatcatgctgtcttccctgcccggtgctgcagttagccagatcaaaattgaaggtgttcttcatgagttcagttctattcccggcgtaaaggaagatgtatctgagatcatcatgaacatcaagagccttgcgatcaagaacaacagcgagaccaatgaggctaagactgcatatatcgagtttgaaggcgaaggtgttgtaagagcttctgatatccagtgtgatcaggatattgaaattctgaaccccgaccttgtaatcgcaactctgagcggtaaagataccaagctttacatggagttaactattacaagaggccgcggttacgtaagtgccgacaagaacaaacacgaagatttaccaattggcgtaattgccattgattctatctatacacctgtagagagagttaacgttacggtagaaaatacccgtgtaggtcagagtactgatttcgacaagcttacattggatgtatacaccaacggaaccctggctcctgatgaggcagtcagcctggcagctaaggtgctcagcgagcatctgaacctgttcatcgacctgtccgaaaatgctaagaccgctgaggttatggtagagaaggaagacgacgagaaggaaaaggttctggagatgagtattgacgagctggagctttccgttcgttcttacaactgcttgaagagagcaggtatcaatactgtagaagagttaaccaataagacttcagaagatatgatgaaggttcgtaacctcggacgtaaatctttggaagaagttctggctaaactgaaagagctgggattacagctgaaccccagcgatgagaactaatttcagctgaacat

SEQ ID NO: 5694 - DNA, 397 bp, Unknown
  gut microbiota DNA sequence
agctgccaccacaggaggggggatctttgggatcttccttcttttctttcagaggctttttcccatgcgcttccctgtcttcattgatttccttctttaactgctcttcgaagaacagtgcttcctcatctgcaatccgtttccgcatctttttgctgtttgcccgtgcttttacatgggtggcatccacgaagacctcggaaggatcgatcagtctgtatttatagcattcctgcaggatacgggaaaagatctgttcaaaaagatcagtatccttaaagcgtctggtataattctttccaaacgtagagaaatggggaaccttgtccatcatttccagaccgaggaaccatcggtatgcgacattgacttcgatttcttttactgtctggcgcat

SEQ ID NO: 5695 - DNA, 191 bp, Unknown
  gut microbiota DNA sequence
ttctttacgaacaggaacagggtgcggtattccttcggtgtaaagtccagggattctccggcaagggacgcactttgttcggagaagtcaattttcagaaagccatcatcaaacagatcatgccggggtgtccgcagttccagatttgcaaaaaccgccgctacttttttgcaaagcaccgtcacagaaaa

SEQ ID NO: 5696 - DNA, 333 bp, Unknown
  gut microbiota DNA sequence
ctgtgaaggaaaggtgaaaaggaccccgggaggggagtgaaagagaacctgaaaccctgtgtttacaaactgtggaagtaccatatgagtacaaccgcgtactttttgtagaacggtccggcgagttacgtttactggcgaggttaagcacttaaggtgcggagccgaagggataccaagtcttaacagggcgttaagtcagtgtacgtagacccgaaaccgggtgatctacccatgtccaggctgaagttgccgtaaaaggcaatggagggccgaacgcacatccgttgaaaagggtggcgatgaggtgtgggtaggggagaaattccaatc

SEQ ID NO: 5697 - DNA, 2635 bp, Unknown
  gut microbiota DNA sequence
acaacaggaaaggatacttttatgagcatcaaaatttataacaccttaagcaaacaaaaagaagaatttaagcccctggagccgggaaaggtaaaaatgtatgtctgcgggcctaccgtatacaacctgatccacatcggcaatgcccgccccatgatcgtatttgatacggtgcgccgttacatggaatacaagggttacgaagtaaactatgtatccaacttcacagatgtggatgacaagatcatcaagaaggccaatgaagagggtgtggagcccagcgtgatctccgagcgctatatcgcagagtgcaaaaaagacatggagggaatgaatatcaagcccgctaccaagaaccctaaggctaccgaggagattggcggcatgctggatatgatccagacactgatcgacaaggggcatgcgtatcccgcagcggatggtacggtatatttccggaccagaagcttcaaggactacggcaagttgtctcacaagaacctggacgatctgcagggcggtaaccgttccctgttagtctccggtgaagatcagaaggaagatcccctggatttcgtattgtggaagccgaagaaagaaggcgagccttactgggattcctgctggtgtcagggccgtcccggctggcacatcgagtgctctgttatgagtaagcgttatctgggtgaggagatagatattcatgccggtggcgaagatctgatcttccctcatcacgagaatgagatcgcacagtccgaggcagccaatgacaagccttttgcaagatactggatgcacaatgccttcctgaacattgacaatcgcaagatgtccaagtctctgggcaacttctttactgttcgtgagatctccgaaaaatatgatctgcaggtacttcgtttcttcatgctgtccgcacattacagaagcccgctgaatttcagtgccgatctgatggaagcagcaaagaacggctacgagagaatcgttactagcgtggataacctgaagttcctgctggaaaaggcagcagatgccgaaatgtccgaagaagaaaagcagttagttaccgaggcacagggctttgagaccaaattcgatgaagctatggacgatgatttcaacactgcggatgcactggcagctatcttcgagctggtaaaattcgtcaactccaatgcgaaagcagatagcagcaaggcatttctggaggctctgaaacaggaaatcgtgactctgtccgatatctgtggactgatcgtagacaagaaagcggaaatgttggacagcgatatcgaggcactgattgaagagcgtcaggcagccagaaaggcgaagaatttcgcaagagccgacgagatccgtgacgagctgttagccaaaggcattgtgctggaagataccagagagggtgtaaaatggaagagagcataacccttcttacgaaaataaaggaagcatttgcttgcgaaggacaggatgtccgggcgtattctccgctgaccctggcctatatcggagacgggatttatgagctggtgatccgcagcgtggtggtggagagagctaaccgttccgccaatgatctgcataaaaagacgacacgttatgtaaaggcaccggcgcagtctgccatgatcgaggcactgcttccggaactgacggaggaagaggaagcggtgtaccgcagaggacgcaacgccaaatcatacaccaccgcgaaaaacgcttccgtggcagattaccgcagagctaccggttttgaagcattgatgggctatctgtacctgacgggacagatcgaccggatgttgcagttgatcaaagacggcatccgtctggcaggcatggaactgtaataaaaattcacaatagaaaggacaaacatgggatatcaggaatttaccatagaaggcagaaatgccgtgatcgaggcctatcgtgcgggcaaacccattgacaagttattcattctggatggctgtcaggatggccccatgatgaccattaaaagagaagcaaaaaagcatgatacattagtaaaatatgtgaccaaggagcgtctggaccagttatccgagaccggaaagcatcagggagtcattgcctatgcggcagcttatgagtacgcggaggtggatgatattctggaaggcgcaagaaaaaaaggggaaccgccttttattttcctgttggataacattgaggatccccacaatctgggagccatcatccgtaccgccaatctggccggagcccacggagtcatcattccgaagaaccgtgcggcgggactgaccgcgacggtggcaaggacttccgccggagcattgaattatacgccggtagccaaggtgacgaatctggccaagaccattgaagaattgaaaaaggacggtctgtggttcgtgtgtgcggatatgggaggcaccaccatgtatgatctgaatctgaaaggcccgatcggtctggtcatcggtaacgagggcgagggcgtaggacgtctggtgaaggaaaaatgcgatatggtggcatccattcccatgaagggggatatcgattccctcaatgcttccgtggcagcgggcgttttggcttatgaaatcgtgcgccaaagactgcaagggtagtc

SEQ ID NO: 5698 - DNA, 3288 bp, Unknown
  gut microbiota DNA sequence
actcatcgaccagctgcgggaaggtgacagacaggtgatggattacatctgcgacaagtataaaaatctggtgcgaagcaaggcaaaatccatgtatattctgggcggagacagcgaagatctgatccaggaagggatgatcgggctgttcaaggcagtgcgggattatgactgcggcagagatgccagcttttatacctttgcagatctgtgtatcagcagacagatgtacacggcagtgcaggcctccaagcgcctgaagcactcaccgctcaacagctatgtatctctgtatgagcgaagcagcgagggcacggacaatgaggagaaaaatctcattgaggctctggcggccagaacccagatgagtccggaggaactgttcctggacaaggagcgggtggaagatctggagagagctattgagacagaactcagcagctttgaaaaacaggtgctggatttgtacctgacgggaatgagctatacccagatcgccaaggtgctgggaagagacgaaaagtctacggacaatgccttacagcgtctgaagagcaaaatccggaaactggtgtgatgcaaaataatgagagaagagaacacattcttgaaaaaatttttcaggaatgtgttttttatagttttttaatagaatctgcagagttggaatattgacttaaaacccggcataggagtatactgcaaatgctgaccgaccagccggtcggttaataaagcaaatacatattcataactattcagaaccacattcgcaaaaccgcctctgcgaggctgtactgaataacatgcctgcatgttatttgctcatggtggttactttcggtggttactttcgcccattggctctggatagttacacatatttcagaaaggcgaaaagatcatgcacaatatatggaaaagaaattgcagcgtcggaatggcgttgttgatgggaggcagtctgttgctcggaggctgcggcagcaatggggcacaggatgctgtggagacttctgcggtagtcgtggatatgaagcaggcccagaccggaaaactgaccttgcagaacagctttgtgggaacggtttctccccaggagatggtctatgtcattccctttgcttccggtacagtgacggatacttattttgaggtgggagatcaggtcaatgccggggatgttttgttcaaaatcgatgactctgcagcaaaactgcagttagaacaggcacagctcagtgcggccaatgtaaggcagcaggcagacagtgccctgaccacccagcaggaatccgccaatatccagatggatagcagcagagtgcaggcacagtccgggtatgatcaggcacagatcgcgtatgtccaggcgaaaaatgcctatgaccagaactatgatgatctttcagatcagatcgatgcatgcaatacaaatattacacagttggagaatgccataaaagcagcgtcatccagtgtgagcggcggaaatgcggcaagtgttgtgcagatgaagacgcagatcgagacactgaaaggaacgaagaaacagctggagtccagcagaaattctctggtggctggagtccagcaggcggaatccgcatacaatgcagcaaagagcagcatgaatattgtggatcgttcccaggcattgtcccagggacaggcactggaggatacgaagaagcagctggccaccagtgaacagctggcaaatgtgggcgtggaaagtgcggaactggcattatcctactacactgtcaaggctcccatctccggtacgattcagagcaagggagtggaagtcaacggcattgccggaagcagcaatcctgcgtacaccattgccaatgaaaatatgatgaccgtgacttttcaggtcagcgaagctgtgaaaaatacactgaccatggggcaggaagtgaccgtggagcggggaaccaccagctacaccggcagcatcaccgaaatcggtgtggcagtgaatcagcagaccggcctgttccagatcaaggcagcggtaaatgccaatggcagcgatctgcccaacggtgtatccgtgaagctgactaccgatacctatcatacgaacgacagtgcggtgctgatcccttatgatgccgtgtactatgataataccggctcttatgtatatttatgtgtggacggcaaggccgtgaagacctatgtgaccacggatctgtttgatgatacacagatttctgtcattgaaggggtacagcccggagataccgtcatcaccagctggtctcccaagctgatgaacggtgtggaagtcaccgcaccggtgaaggcagaagagtaggggaggcagcagaatgaatttgacaaagctagctctgaaaagaccggtgtcctgtttccttgtgatcctggcactggcagtattcggcatcagctccatttttggtttcaagatggaactgactcccgacattgagatgcctatgctcatcgtcatggctacttatcccggtgcagacccggagagcgtggatgaactggtggcatccgttattgaagattccggttccactctgagcggtgtggattccgtgaattcctattcctttgaaaattattgtatggtcttgttcacctatgaatacggtgtggatattgatgaatgtcacaacgatctccgtgcggccatggagacggcgaagttaagtctgccggatgacgtggatcagcctaccatcattgagatgaacatgaacagtatggatgtcatgacgatctccgcagtggaagtcggcgatgtggatatgttaaaagtagtcaatgaatccgtggtaccggaactggaatctctgtccagcgtggcacaggtatccgtcaccggtggttccgaggattatatcaaagtagaactcaatgagaccctgatgaagcagtacggtctgaccatgtccagtgtggcacagatgctgggaaccgtagactttacttatcctgcaggcagcgtgacccagggcagtcaggacatcagcgtggcggcgtccatggagtacaatacggtacagaagctgcgggaagtacccctgatgaccaccaaaggacaggtcattaccttacaggatattgcaaatgttaccacagcatccaaggatgcttccagtatcagccgttacaacggacaggacaatgtcagcatcggcattaagaacaaaagtagtgccggtacggtaaatgcctgcaaggatgtgaaggaaaaattacaacagatccaggcggagaacccggccatcgaatttgaag

SEQ ID NO: 5699 - DNA, 14630 bp, Unknown
  gut microbiota DNA sequence
attgaccatggcggtgctgttcctgttcttcggtgatttcaaagccagcctgatcgtcggagcctccatgcccatttccctgttcctgaccctgatccttatgagtatgatgggattctccatgaacatcgtaacactgggatctctggtcattgccatcggtatgatggtagactcttccatcgtcgtgatcgagagttgtttcagaagacagaagagtacgccggatctgaaacaggcagccttagagggaacgaaggaagtgacggcttctattatcgcttccacaattaccaccatcgtggtatatctgccgctggccactatgaagggcctgtccggacagatgtttgagcagctgggattcaccattgtatttgccatgctggcatccctgatcgcagctatgatgctggtaccgttgttctacacagtatttaaaccgaaggaaaaagaaaatctgcccatcgataagctgttgaagaaatttaccacatggtatcagaagatcctgcggaagctgatgaagcgcagaaggaccgtcgttggtgtggctgtggctctgatgatcggcacggttctgctggcaggaacgctggacatggagctgattcctgcagcggatgaaggagtcgtggcggttacggtgaatttccgttccggtaccacactggaaaaagaggatgaagcactgaagctgtgggaacagatcgctgaagaggaaccggatgtggaattctattccgtatccatcagcggctccagtgcaacccttaccgcagatctcatcaagaagagaaccctgactacagcacaggtagtagataaatggaatgagattgcagccggtatgacggatatggatgttacggtaacatcttccggcagcagtatgagctccatgatgagcaccagcagctatgagatcgatttacagggtaatgacagggcagaactggcacaggccgcagaagacctgcaggcagagatcgagaagattgacggtgtcgtaaagacagaaaactctctggcaaactctacgacgctggccaaggtagtggtagatcctctgaaggcaatgcagtacgggctgacacccattcaggtcggcatgaccatacataacgtattaagcggtatgaatccgttgacgatcaccaatgatggttcggagtatgcggtatggctggaatatccggaaggaagctatgatgatctgaacctgctgatggatctgggactggatacttcttttggcaccgtggtaccgttaagagatattgcagagatcaattacgcacagagtcaggagaccatcatgaagcaggacggtctgtatcaggtcagcgtgacgtccactatgacctccgagaagatatttgatgcccagaatgctatcaacgatctggtggatcacacggtattcccggattctgtaaccccggcagacagtatgatgactggaatgatgaacgatgagttccaggcattgttgcaggcaattctggtagctacattcctggtattcctggtgatggcaatgcagtttgaatcccccagattctccttcatggtcatgatgtgtattccttttgcactgatcggatccttcctgctgttgttcattacgcaaagtaccattagtatggtatccctgatgggatttctgatgttgatgggtattgtggtaaataacggtattctgttcgtggattccgcaaatatgctgcgggaagagggaatgtccactgaggatgcgctggtggcttccggaagtacccgtctgcgtcctatcctgatgacgacattgacaacgatcctgtccatgatccccatgggactgggactgggcgataacggtgtcatgatgcagggaatggcactggttatcatcggcggtctgacggcttccacgatcctgaccctgatcctgatcccgaccttctatctgatcttcgataagcggagcagacaggagagaagagcggctaagaagctggcaaaatctcaaagatctggaaaaacgggggatgcggaaaatgagtaaaataaccggattggaggcaccgaaccaggtgcctcccaaggtgaccgccatgtaccgggccgtcagcacacttttgcgggaggacaaggatatctcggaaatgagcgtgtccatgatcaccgggctggcgggcattggcaagggaactgcttatgaatattttgattccaaggaagagatcattgtctgtgccctgttgtatgaaatccgtacagtaacggagcaggcttcccatcagattcagacctgtccggatctggagacccagatccacagaatgcttttgctggtggaagaacattcccagtgtgtggatgccatcatggcgtttctgcatctgctgacggatcattccaaggagggaaatcttctgcggcaacggatagcggaacagaaggaaaacgggccggtggatcttttggtccgccagatcatagacagtgcacgggcgaaaggagaactgcgggaggacattccgctgtcttatattaccaacgcgctgttagctcggatgatttcctatctgatgtaccagtgccaccatatcggtgatgatatgcccccagaagagatgcgcagactggtcaccgaaagcataatgaatgaattgtgcaaaaaaaatatataatttaaaataattctattgacaaagtgagatacctttgatagaatataacacggtgattgcgttagcagtcacgtgatgctgctgtggctcagtcggtagagcgtcgcattggtagtgcggaggtcacgggtccgattcccgtcagcagctctcatataagaagcggaaacattgattttacagtgtttccgctttttgtttttcacaaacgctgtagattttcttactgcaaatctcatctctgtcacaaaattataaatcctccaataatacatgtgccggtatctccagcacttcagcaatatcaaatattacctccaaagaaaacggctggtcacaattcggtgcctcgatcttggtgagatagctgatactaatgcttactctgtccgccaactgctcctgtgtaagtcctcgttgttttcgatattttttaattgcctgtcctataattttatattgttccgagtgtttctgactcattcccgcatctcctgtttcctacctctacaattctaaaggataatgaagggatgaatgtttcagtcataatgaaagttatgggtaaaaaaataccgatttattttgcatccgtttccaatgcctgataaatcggtatttcataaacaattattttcttcctaatagtttaatctctgcgtaatgtaaatttgcctaccacttcatttaaggaatatgcctgtgccgacaattcctcgctggttgcagaagattcctccgcagatgcggaattggattgtacgacctccgaaatctgagtcacccccacttctgcctgttccattgcctgtgcctgcgctgttgattcttcactaagtctcctggaatctgctgcgatctccttaactccggtcacaatctgctccagtgattccgctgccgcttcagcggcctgatttcccctctcaatttcctgcagagagccttcgatcagacttctggtatccactgcggactgtgcactctgttctgccagtttgcgaatctgttctgccacaacagcaaagcctcttcctgcttccccagctctggcagcctcgattgcggcattcaatgacagcaggttggtctgactggcaatgtcttcgatttctgcaataatattctgaatctttttggacgtatcgttgattcgatccatctcttccataagagatttcatctgtgcatgtccggcatccgcctgctgtgcataattttccgccttccgggtggtcttctgcaattcacccgccgtacggttcactgcatccgcgatatttgtaatcgttgctgtcagttcctccaccgaacctgcctgatcggtagctccctccgcaagggactgggcagattctgccagattctcagcgccggctgatacctgttttgcagcttcttctacctgatgcagcgtaccgttcatctggcggttcattttacgcatggcatccttcaatgccacaaactgtcctacatatttatcctcaatcttagtgccgatagcataatttccctctgccatctgtcccagaagttctccggcatccgtaatgatcatatccagatccgatgccatcccctttgccacctgtatcatataagaaatctcatcttccgttgcacactccggaaatgcgctgtttaaatctccctgtgcgaaggtctgcagacgatctgccaatgctatcatgggcttttctatgtcttgcgctatttttcgtcccaggatcaccgaactccagaaagaaaccacaacgattgccaggatcaccaacagcataatccgttccattgcccgcagatccgcttccgcacggtcacctttctgcacgcacaggttcatcagttcaacgaattctgcataaatctgttcatattgagccgtcaaatctgtcgtatccagttcctgcgcttccagataaccatccgcatcatccgaagttgccaattccaagattcgtgcatccagctcccaatagccgtcaagttccgtcaagaccgcattgtaagcttctcttccctcggagaatttgagtgttctgctcaattcatccatataagtttcgaatgcctctttcttctggtcatgcagagctgtctgcttttcgatcacagcttcatcatcatacccgaccactgcgcgcaatgcacttctactctccgaaaaagcggtcatcgccttaccgatatctccttgtgtaaaaccataccggtttaatgccttttcatactgtgtcgctgcgatcagaagcgctccgattccaatgattgaagctaccgctccaattaccgccacttttgcgaatccctttgtcaatcgtttcttaataccctgttgcttttgtgttgccatatatcgttcccccttgttatttataaaaaatgcgacaatttgtattttcatgtaaattgtagcactttctatttttctcttcaactgtacgaaggaatcacttttctcatgttttctggtctttcattatctcttccgacaaaacctctatcctatgtcttgacatcttatcacaatctttttttatgtcagtacaatagttcaaaaatttctccttatctgcatggtacagtaaatacatgatattataacaggtatgatatctattctgatctacgtcccccacaggaaaagacgtcttattatacagccgatccacttttgtcattatgatctcatggtaataactgttgctaaaataatttctgagtttatatgaaaattggtacgctttttccccgtgggttgtgatcctcaaatgttctacatatgtctcaatcaaaaattctttcatgttttcattttcttccatgtatattattttcaccttgtctgaagacatatggaataaatcataagagtgcgttaaaatttcttcttttccatctctgactgcctgttttagcattttgtttaacccgtttttatatatggttaaaacatcctcattatcttcctccagaatatcactccataccatataggaatctgcaaattcgtttaattccacaatgttttttgcctgaagcaatcccttttttaaatccggcagcattacttttatctctgcatctgtcttataataattgggtttatctcccgatttaagaaacagtcgatactcggcttctaattgttctttatcaagcgtcccctcctgatagtatctcaacagcattccggtcaaattattactgctctttgtaccataaagatatttccctattctatgctccaacgtattttcaatactgctcaccatctttttcaccgaatccgtattgttgggatcatcctccttataatacagattgtgtatactttcaacgacgatggcataacatatcagtctcagttcctccaaaaattcatctttattgcagtcttcacaaaataatattacatcatcataaaatcgctgcgccttttcaagtgtccgcaagttttccactttatgaaggttcagaaatttttcaataaattgagcatggatatgcaatttactccactcgacactctctgcccgttccgtaatagcatatgttcgttcaattactttttcactgtatttgtcaaatatctcttttttatcttttgacatttctgcggtattcgcaacgagtataactttcacataattacattgtttcagttcctctatgattccaaatatctcttccaaattcatattactgttcattctttccagatcgtctatgaccacaatgtgaaggaatgtaaattctttggacaataataaaaatagttctctttcgtttgctatattttgtaccacatcccgggcctgtccgactttatcccagacctttgctgcgccttctatgatattattagctatttcaccaatcttcccgccgacattattcttcaatgccagttgaaacaatacttcatgatatatttgtctcgcatctgtcattccgaacattgatattttacaaacgtccggatttcctgccaacgcctcatttaccgcataagactttccgacaccccaggttccatcaaacaagatggtcttataaggtaagtcattgatattgccaattatagtttttattttatctgctctcattttttcctctctgtacacaaattcataataaccggacaatctttttacataagtttctccggttatctgtcgttctgcgttgtgtaattgttggtgagttccggtttgcaaacggattgtcttataaatgtcacagattaatcattccatattttctctgcattgccagtagcacttccggatcatccagctgcgccaccttatctgtatctcctccggcaattccctgtaggatttccgatcccttgcatacatatccagccgcaccggcttaccatccacggcatactggaattccctctgtggctggatatcttccagtgttcccacccgtttttccagcatccgctccaatacatcatggcagagcaccttgtcacccatggtcttgccgaagataaaatcatccgatatcgtcagttcctcatagcgttttgccattcacactctcctttgcttttaccgcaggaaaatatgctgtcgcagaaacgaatttcaatccgttctatgtcttctcctgctctattgttatcattgggtaattaagcagggattcctctgaagtcatagacaccggcttacaccgatatagaaatttgaaatagaaaatctgcttacgaatagaggatagcaaatgagcactcgattgtcaacgtggcaaaatagcaaaatctgtccctggcaaatttgggcattatgctttaaaatcaattttaactccatctatatatttattttggtcttatagcctgtccttcagatttttctgaacatcttttcataatcattctccataatgtaaatcctattattgctccaaggacattatgaaacggatcatcaaaaagttcaaagagtccacgttttgttaataactggctgaattctatgctgtaacttataattgttgcaatcagtatcacccatcttaactttcgaacacctaatccctgcaatcctattcctaccttattgctttaatataactccaaaatgacataaattctgccctcggatttcttattgtttgacgggcatggaatcgttcttcatgttgtgtccatagatcaccgtattgttgtctgtaaagtccttactgttcagattctccgtatatatgcacccgggatatccatacgaaccatcaatattatgcataaagtaataggaattatcggaaggatgctgtaaaatcggatattcaatttctgtccccggtacagtgatccaggcatacacatccggattcaccgactgccgctcctgccacaatggtcattatctatcgtttcatgtgagctccttcttcccaaataatggaagattttactactcctaaattttattctacgtttttaacgtaattttaattccgctttaaatgtaaccgctatatacgttcaaaacaggtattgtcaatagtttgggggcttcatgcaggacgagatggctggaaaaacagaagaaaacggatacttcaggtaaacctccgaagtatccgctattttgactatgttaaacaattccgttctaattaaatccgaacaatttctggcagatcttatatccttctaccgaaatcttacgtccgcctcttccgggcaaattcatggtaccacccataatgccgttacgcatccacagatacaggcgtttgtcttttcctttcaggtactcccacagttctttctttttctccagatgttctgtggtaccggagcggatcaacagtacggaagatactgtcatgataatctccagatagttgcgcatgtactggtacagacgtcggtttttcaccagtttcgactttctgcccaccagataatcaatcatcagcttcgtcactcggatctgctggtcgatgcgggagatcatcacggtctcattcaccgactgatcctgtcttcctatataatatctgtagaaattcacatccagataatacatattcttcacataaggaagcggttcaaatacatacaggttgtccacatagaaggtgtgctccggaagcttcagtccacattcctgtaacagtctggtacggaagatcacggagtgcatcagtatgtaatggcccttcagaaaatgatggcagtccgtccaggtgaacatcttctccaccggcaggatatgacggtacttgatcacctttttgcggcgctcgccttctttttcatagacatagttgctgatgagcatatccaatgcctgaccgccgccggccagttctctgagagtatccaggatcttaaaatatgcatcctgcttcacccagtcatcactatccactactttaaaatatagtcccgtggcattggcgattccggtgttcacagcagaaccatgtccgccgttctccttatgaatagcacgcacaatcgtaggaaactgtgcttcatattcgtctgcaatctctgcggtacggtctttggtagaaccgtcatcgatgatcaggatctccacatcctctccgccgatcagcagggaatcaatacattttctcatatacttttcagaattgtaacagggaattgctatggaaagtaatttcatatcgctgtcctttcttcactatcttgttgttcactgtccggaatcgttctctcgggcccccagtttcatgttcaatcccttcgcatagactgcaaacgcggaaggaatgggatatttctcccttgtctccgaaggttcaatatagatccagtctgctgaatccgggccttcacgcttcggtgccagttcatccacacggatcagatatcctttcatatgccattctctatgggaaaaaatatgctttgcatcctcaaggggctggatccggagtacctgcaacccgttctccgccagatattccttgacctcctccgcggtatgatatcccttcatcgaagggaattcatacataccggccagcagacctttcgccggacgcttatgcaatgccgccagctccgcatcccggataatgaggatcgtcttctcctccaccgtacgttcttttgctttggctttgttcggatattgcagctgtgtaccgtccgcatacgccagacatatctgctgtaggggacattcctcacagtgcggagccccgttgggaatacatacacaggcaccgatttccatcatagcctggttgaaatctcccggcctgtctgtaggaatgacctcccacagatccttttccacagccttttttactttatcctcagagatacagcgttcatccttgcggactcttgcaatgactctcagaacattgccgtccaccgccggattgggcttgccgtaagcaatagaggataccgccccagccgtatagctgccgattccttttaattttaataactcctcataagaatccggcatgactccgccataatcttccatgatctggatggctgctttctgtagattccgtacccggttataatatcccaggccctcccacagctttaacagcacctcttccggtgcctgcgcaagcgcagcaatatccggcaacgtctccataaagcgctggaaatagggctttaccgcttccactctggtctgctgcagcatgatctcagagacccatacgcggtagggagcaggatcctctctccagggaaggatcctacggttattatcataccattttaaaagtggtttgggaatcgcccgaaggtcacctttcctaaagatttccttaacatccgttaaattttcattgtatttatccatagagtctaccgcagacggttgcattcgaacttctccatggtgagcaggcagttcttcaattcttcataacgctcttccggctcaccgtcatttacttcaatatcacaggaaatcgccatggtcgtgatcatctcgttggtgatacgatggtgcagtcctgccagaatatttagcttctcctcgtaggaatccgcatccagaaattccagtaccaacggatccagtgcgggctcttcatcttctgcgggggaaaccggtgctattgttgtctgtgccgcggtcgccgttgcctgggctgctatgttctgcgccacaatcggcgttgccagggctgctgcgggctgggatgcagtcgacggcatctttgctgtcttcgtctgtactgctgccgtctgtgtcccgctcactgcgtccgcctcgtgtgcctgtctgtccgcctccgctccctgtaattcaaaacgaaaacgctgtgtcacctcagggtatctctgacgatccacttctccggtaaacatggcaagaggccttgcataggtcttgaaatctccatacaaagcctgataaatcaccagctgttctccggtctctgaatgttccgcaatcgttacgacctgatacagattgcccttaaaatgcttatatatctcatgtggtttgggaataaatgtcatctgtcgttctcctttcccatcgcctcgtttactgtggcatatggtatcagtataccccttatttccaaaaaagtcatgtaaatagtctctaaaaatccgtcagcagatattcataagagaccgaataattgccgcctgcgttgcaggcccgtgccagttctgcgctcaatgctccccgttccgtctcactcatgctgttgatcttcttatgatgaatggtaaacgtataatccggactgccgtcttcttccagtgcataggtcagcgtcacgccgctgttgcgataaccgttctcattcagatactgcttcatatcgctcatcagctgctgttcctgtatccggttctccatgcgctgcgtctcatcccggctctcgctcttcacggttgcgccgatacataatacaatgatcagaataagtactgcggtagtactgtaaaatgccacattggaaacgaactgtcttctcataacccatacctctttttctgctttttgtgctcagggttctgtcggaaatcttattttcccgtcctgacaggtatagattacactttttcaagtccaataaaactctctcatttaaaatattcggcacctgctgcctctaccgctgctttcagccccagtgcggacattctggtggcaccgttgccccagatgatcatctgttccaatgcatcggaggttgccaccgtcacccggtatttctgcggcttcgcccccagctgatgggtcgtacgctcgatatactggtctgcagtctccgcttcttttgtatagactacttctatattatgatatttcatggtggagccgggattgtccttcaccttgtaggcatcgtagaccaggatcaggcgacagccctgatatccctgatagttacacagaatatccatcagtttgtccctggcactgtccagattgatcttcgccagctcccgcagttccggccaggcaaaaataatgttataaccgtccaccagaaggtattcctccggtttttcctgcggtacgaccttccgcataccggtgtcaccggcacttcccgccaagctgcccgtatagctgccacggtttccggaagaagtatggtatctgcggaatctgtggggatcctccgcctttttcccataagtctggcggaagatctcttcgatctcttcctgagaaataatccgctctacaccacccccggtctgacgaatagcgccctgctgcctgtttactgcctgcagtcccgcatccgaaatgccgtccgcatctttggttccttccttctccggcttccagttgctctccacatgggcatattctggcacctggtcccaggacacctgaaaaccggcaccatgagcgcagaataccgatccggtggggttgaccacatccgcttccggatcatatccgatctctgccattacctcctccggattatggcagggttcatatcccttcagcgtgcaggacaaacgcccatgacctttggtataagatgccacctcttttccataatctcccatagaagccacgggaacacttcccgtcagcacactgttattgccttctgtctccggtgcttcaaagcttccgttcatcctcgtgatatccgacatggctctgccaagattctccgtaggcacctccagtcggaaggaaaaccatggttctaagagaatgctctttccactgcgcattccctgacgtactgcacggtaagtggcctgtcggaaatctccgccctctgtatgtttggtgtgggcttttccggcaatcagcaatatccgcagatccgtgagttcggaaccggtcagcacacccacatgacgtttttcctccagatgcgtcaggatcagccgctgccagttacggtccagcatgtcctcgctgcacagagaggcaaattgcaatccactgccccgctccccgggctccagcaacagatgtacctccgcataatgacgcagaggttcaaaatgcccgatgccttccaccggctccgccagagtttccttgtatacaatgcttcccgcatcgaattccacttccagaccgaaacgctcccacaggatatttttgaggatttccatctgcacctgtcccatgacctgcatatggatttccctgttttcctcctgccacaacacatgcagctgcggttcttcctcttccagctggcgtagtttccccagtgccacgacaggatccacctccggagggagcagtagtctgtaagtcagcaccggttccagtatcggcgtggagttctcgctttcatagcccagtccctgcccggcgaaagtcttcgtaagtcccgtgaccgcacagacctcaccggctttcaccgtatccactgcctcatagcttccgccattatacagacgcagctggtcgcatttttcctcccagatttcctctcctgcaccgcttctgctgtttcccaccggcattttaacccgcagacttcctccggtgaccttcaaatacgacaatctgattcctgcgttatctctgccgatcttataaacccgggctccgaattcctccggatattccggctggggcagatacgcattcaatccgtctaacagctctgtaattccccattgtttcaaggcggagccgaaaaagcaggggaacagcttacgctccgccacagtgtccgatatgttttccgccgacagttctccggtttccagatattcttccatcaaggcttcactacacatggccgcatgttccagctctgtttcccgttctccttcattgtccccaggctgcagcagttttcccacggatgtaatattgctatccagctttttctgtagctccgtcagtactttttccggatccgtccccggttgatccatcttgtttacaaataaaaataccggcacttcatatctttttaacagccgccacagcgtatgtacatctccttgcactccatcgcttccgtcgatgactagaaccgccgcatccagtacctgcagcgtccgttccatttccgcagagaaatccacatgtcccggggtgtctaacagtgtgatatccacatctttccaccggattctcgcctgtttggagaaaatggtgattcctcttttccgttccatgtccccgttatccagaaaagcatctccgtgatccactcttccggccctttctatgacaccacaggcacataaaaggctttctgccaatgttgtcttcccggcatccacatgtgccaggatcccaacgatactttttttcatgcttatcctatccttccaataccagcatcatcctgcaggcacgtataaaacgttttttctattataaagaatactatatccatgagcattttccaactgttttgtatttccagataccgtttgcaaatccggtggacagtaggatataatgtaatgagcctcaaggaaaaacaagc

SEQ ID NO: 5700 - DNA, 6947 bp, Unknown
  gut microbiota DNA sequence
atacgataccgagattcctattttcgcaatctgtctgggacatcagctgatggctctggctaccggcgcagatacccacaaaatgaaatacggacacagaggaggcaaccatccggtaaaggatctgatgaccggaagagtatatatttcctctcagaaccacggctatgtggtagataccgataagctggatccgtccgtagcggttcccgcattcatcaatgtcaacgacggtaccaacgagggtctgtcctacaccggcaagaacattttcaccgtacagttccatccggaagcatgtccgggaccccaggactccggttacctgtttgaccggttcattcatatgatgagaggagagaactaagatgcccaagaatcctaatgtaaaacgagtaatggtaatcggctccggtcctattgtcatcggacaggcagcggaattcgactatgcaggtacccaggcctgccgttccctgaaggaagagggagtagaggtaatcctggtgaactccaaccctgcgaccatcatgactgataaagatatcgcagataaggtatatatcgagcccctgaacgtaaaggttctggagcagatcattgaaaaggaaaagcccgacagcatccttcccaccctgggaggacaggctggtctgaacctcggtatggagctggaggagtccggtttcctggctgctcataatgtaaagctgttaggtactaccgcagctaccattcgtaacgccgaaggacgtcaggagttcaaagacctgatggagcgcatcggtgagccctgtgcagcatccagggtcgttgaaaatgtggaagacggtgtggaattcaccaataccatcggctatccggtcgtactgcgtcccgcttataccctgggaggttccggtggcggtatcgcccacaatcaggtagaactggaagagatcctggagaacggtttacgtctgtcccgtgtgggtcaggtactggtagagcgttgtattgcaggctggaaagagatcgagtacgaggtaatgcgtgacagcgcaggcaactgcatcaccgtatgtaacatggagaacatcgatcccgtcggcgtgcataccggagacagtatcgtagtagctccttcccagaccctgagcgacaaggagtaccagatgttacgtacttccgctctgaagatcatcaacgaactgcagatcaccggtggatgtaacgtacagtttgcactgcatcccaccagctttgaatattgtgttatcgaggttaacccccgtgtcagccgttcttccgcactggcaagtaaggcgaccggttatcctatcgcaaaggtagcagcgaagatcgcactgggctttaccctggatgagatcaagaacgccattacccacaagacctatgccagcttcgagccgacactggactactgtgtcgtgaagattcccagactgccttttgataaatttatcactgcaaaacgtactctgaccacccagatgaaagcaaccggtgaggttatgagtatctgcaataacttcgagggagcactgatgaaggctatccgttccctggagcagcatgtggactgcctgcgcagctatgatttcagcgctttgtctgtggaggaactgttagagcgtctgaagatcgtggatgaccagcgtatttatgtcattgcggaagctatccgtaagggcatcagctacgagcagatccacgacattaccaagatcgacctgtggttcatcgacaagattgccattctgaccgagatggagcatgcgctggagacacagccgctgacggttgatctgttgaaggaagccaagagaatcgagttcccggataacgtgatcgcaagactgaccggcaagaccgaggaagagatcaagaagatgcgttatgacaacagcattaaggctgtctacaagatggtagacacctgtgctgcagagttcgcagcttctactccttattactattccgtattcggcggcgagtgcgaagccaaggagaccaccggacgcaagaaagtcctggtactgggttccggtcctatccgtatcggacagggtatcgagttcgactattgttccgtacatgctacctgggcattctccaaggcaggctatgagaccattatcatcaataataacccggagaccgtaagtaccgacttcgatattgcggacaagctgtatttcgagcctttgactccggaagatgtggaatctatcgtaaatattgagcatcccgatggtgctgtggtacagttcggcggacagaccgctatcaagctgactgagagcctgatgaagatgggcgtgcctatcttaggtaccaaggcggaggatgtagatgccgctgaggacagagaactgttcgacaagattctggaagagaccgggatcccccgtgcagccggcggtactgtatacaccgcagaggaagctaaggcggttgctaacagactgggctatcccgtactggtgcgtccttcctatgtattgggcggacagggcatgcagatcgctatctccgatgaagagatcgaagaattcatggagatcatcaaccgtatcgcacaggatcacccgatcctggtagataagtatttacagggtaaggagatcgaggtcgatgccgtatgcgacggtaccgatatcctgatccccggtatcatggagcatatcgagagaaccggtatccactccggagacagtatctctgtatacccggctccgaccattgataaagtagtaaaagagaagattgcagagtacaccagaagactggcaaaggcactgcatgtcaagggactgatcaatatccagttcattgccatcggtgacgaggtatatgtcattgaggttaacccccgctcttcccgtaccgtaccttatatcagtaaggtaaccggtattcctatcgtggatctggcgaccgaagtgatcatcggcaagaccatccgtgagcttggctacgagcccggcttacagcctgaggcagagtattttgccatcaagatgcccgtgttctccttcgagaagatccgcggtgccgagatcagcttaggaccggagatgaagtctaccggtgagtgtctgggtatcgccaagaccttcaatgaggctctgtacaaggcattcctgggagcaggcgtagaactgcccaagtacaagaacatgatcatcaccgtgaaggatgcggataagggtgaagccattgaagtcggaagacgcttcgaaaagctgggatacaccatttatgctaccagaagtaccgcagctgctctgaatgaagcaggtgtgaaagcaagaaaggtcaacaagatctctcaggaatccccgaccgttatggacctgatcctgggacacaagatcgaccttgtcatcgataccccgacccagggccgcgacaagaccagagacggtttcctgatccgccgtaccgctatcgagaccggtatctactgcatcactgcaatggacaccgccaatgctctcgtgaccagcatggagcatatgaacgattgtaaggaactgacgttggtggatattgcacaactgtaagatataaaatggataagaacagtggagtcgcgaaagttgctccactgtttgtgtttgtgacaaaaacaaagtgttgacaaatgtccgcgaaaggaataaaatacaaacagttaaagacataaaggctgtgaagagaagagtaggagaagagatacgtcgcagagagtcccggcaggtgggaagggatatggaaggcttctttgaacatggtctcggagctttgcaccgacttcgtattcggacaggatatccggcagatgcggacaggctgcaacgggagtacccgttatcgtacctgactatcgatgggcgtttgtttatccgtagttgcagaggcctgatcccgtgagagatgggcgaattaaggtggtaccgcggaagaatgttccgcccttaaattttaatttaagggcggttttttattatgtcaaaaagagaagaactgatcagagaatattgcagacaggtaaatgaaagcctgcattttatacaaaaatacatggaagggatcgttcccgctggccgatgcagcgaagaactgtattgggagaccaagaagatcagtgcggaactgcagaagagcaatcatgaacagaccgcattgatccgggcttatctgcgggaggcggcacaactgtacgtagagggggagccctggaaaacccgcattacggaccgaagactttgccgtaatacgatcctgaatcatttacagatgctggcgaatgtcagcttctggctgagagaacagggagagccactggcagaggaagtctgtggatggctgttagcccaggagacagcggatgtgcagaaagttagatccggacaaagtctggaagttgccagagagatctatccggccgtgcagagaaagagagcataggagcggtcggctgtaaaagcacaaatttgaaaataaaatccgtggggacagcatatactaggcgtatggtaaatattgtatgatcgtaagcctgtatcccgcaggcggattggagtctcatgttagaagaacattatccttttgttgcgcagcctcttccctacgaatatgatgccctgcttccggtattagatgaggaaacacttcattttcatcacgacaagcattatcagacctatgtggataagctgaatgccacccttgccgattatccgcagttacagcagatgtccttgacggaactgctcacttcggaggataatatacttgcgtccctgccggaggaagcccggaaaagcattcacaataacggtggcggtgtatataatcatcagctgtattttgacagtatgcgaagcccggcaggacaggagccctgtggagctctggaggaggcgctggtccgggattttggatcggtgagacaatggaaagaacagatgtcacaggcagccacgggggtatttggctccggatgggcatggcttgtgagtgaccaggacggtactctgatggtccttactacggcgaatcaggatgtcccggatctgaaattgtatacctccatatttcccatagatgtgtgggagcatgcctattatttacagtatcagaaccgcaggccggattacgtggaaggatggcataagctgatccactggaaaaaagcgggacgacgttacgaacaggtactttgcagactggaaatagcggccggggaagcggaaaaattgcaaaatgacagccgcacaacagaagcgaacgacagatagtgtgcaacgtgcggaacagaagaacagaaagaggaaaatgactatggagaacagaccgatcataaaaaaggaacaggtagagaccgtctacgacagcagatttatcaaggtatttgatctgcaatatgagccgggaaaacattattttgatgctaccagaagagccaaagataatctggcagcggtaaagagcgacgaagaattcagacagatgctgccggatgcagtcagctgcgttgtgatcctgaagatcagaggacaagaaccgagactttgcttaagccgtgagtatcgttacccggcaggacattttctgctgagcgttccggcaggacttttagacccggaggatgcaacggaagaaaatcccgtattccatgcggcagcccgggagcttcgggaagagaccggcatcacactggaagagagcgacagcatccgtctggtgaatccgctggtattcagtacccccggtatgacggatgagagcaatgcactggtgcagatcatattgaaccgtgaagagatgccgaaggtaagtcaggaaggcgccgttggaacggaatgttttgatggttttctgctgctgaccaaagaagaagcacagaaaatcttaaaagacggcgtggatgaccagggatttttttacccgttatatacctgggcggcattgatgtgctttgcgacgggaatgtggaaataatttttgaataaataagacgatgaacgaaaagcgtgtggagagatctgcacgctttttttgaaatttgtaacaaatagcgaaaaattcttcgttatgattaacaaagaggaagcctgtgatgaattgctgaatcaggaaaagacattggagagattagcgaatccagaaccgcagaaaggagagacagaggaaacggacggagagcccccgaagaaaaagaacagccttatagtaaaaactgctgtcctggtgggaatactggtgatcgtcggaggactgctgttgggatatatgataaagcatagagaacctacttatcagcagataggcacaagatacatcgatgatcctgactgggggaatgtatctgaaatttcgtatgtggtaaaaggggaagtaacggcagagagacttaatgagcatttgagtgaagtgagagaaacggtggaccgggaagaactgggtaccaatgttgtcaagactgtatactacaggaacaaggaagacgccctggcgtggaaggatacactttcctgaatgtagaatgaaaggagcagctatgaagaagattttttcaaattactacaaaattattttgtctgttgtgatcctgattgtcctggtggcactaaaggaggattacaaaacttcttttgacgaaatgagcggagtccggacggtggtacgtatgctgctctatacggcatggggattcctgttggcgacaaggaccagacgggacaaagcaaaaggtgcggaatatgttgcttttggcgttgcctgtgtggcagcgctcaatctgttaatccccatctggagcttccagatagcgttttatgcttttgtcgcaggtgttccgggactctattttatggtatttattctgaccggaatattaggaggttacttatggggaccgaggggttaccgcattagggatgaacaaaatcgtagat

SEQ ID NO: 5701 - DNA, 72451 bp, Unknown
  gut microbiota DNA sequence
catatatagatagccgatatatattatagacaacgatatatatcggctatctatataaggaggacaaaaaatggctgtggacaaatcactgatgtcgggaagtatgacgatgctcctgctcagattactggcggagaaggatatgtacggatacgagatgatcgatacactgcggaaaaaatcctgtaacgtgttcgagttaaaagcaggtacgctgtatccgctgttgcatgggctggaagcgaagggcctgcttacggtatatgagcaggaatatgcaggcaagacgaggaagtattacagtattacgaaagagggcagaaaattactggaaaccaaaaaaacggagtggatggaatatcagtctgcagtgaccagcgttctggcaatgggggtataaggatggagaaatatttggaaaaactgttgtcacagatccgctgcaaaaaagccagaccctatatcgccgaggagataagagaccatatagaatgtcagatcgcagacaatctttccgagggaatgacctatgaggaagcagagaaaaatgcggttgcggacatgggagatccggtggaagtgggaatttcgctggacaggatccacaagcctaagattgcatggaggttacttgtgatcgtaggaattttaagcctgctgggcattctgatacagcaatccattctcagacaacccggttatcaggagctggaaacatggagacaggaagtgtaccgctatactacggaggggtttggctcagccgttgctattggattcctcctcatgtgtgtgatctacttcctagattataccgtaattgcaaagtactccaggttcatcggaggagctattctgattctgggagggctgcgggtggcaggcttcggtggtctggatgtcaacggaatcggcaactggatcggatttggaaggctccgggtggcggttacttccctgatgatgttctatgtgccgatttacggcgctatcctatataaatacagggacggtggtgtatccgcactgtgcagggcgatcctgtggctgatccttccggtatttattacatcccgaatccccagcctcggtgtggctgtcatcatgatgatcagtatgctgatggaacttacggtggctatttggaaggggtggtttaaactgcccgtcaaaaagacgattattggcgtggggttgtttcttgtgggattaccggtcctgttactggctgcaatgtatgcatttcatatgctggcagtatatcaggaagcaaggatccgctcctatttatcccattccggagatgccaattacatgacggccatgcttcataaatttaatgaaaatattttactttggggcaacagtggaaaagatgtggtgggaggtttgccggaattcaatcaggattacattttctcttatattctgaacagttacggactgctggccggaatctttgtagccgcgatcctagcagcactggtattgtttatgttcggagctgcggcccgacagaaaaatgaactaggcatggtgatgggattcggatgcggaatgatcattttattaaatatttctctgaactttgcgggaatgttgggatggatcccgctgacatcgaccttcctgccgttcttatctgttggcagaaataatattttactgtgttacgcactggtgggaattatcctgagtatttacagatacaaagatgtatatccaaaaaagttcaaggcgtcacaggtatcattgcagaagactattactttgaagctagatatgtaacacgataataaaattaatgcgaataaaagtaatgcaaataaaaggtccatgagcaggaaaactgtccatggacttttatatatcgtgagcagaactcactcaatgcatttcgcaagcttacgagggcaataccgacaaaatcagtatctccacactcatcatatcattcatccgcccggatttcacggcttcctcggtctctacacactgctttaccgcatttttcagcacggaagtcttgaagtgggaggcctgcgccacgtattttccggcggcaaagggcggtacaccaatcttggaggcaatggtcttattgtcgtggcctctgctttttaattccttggtctggagcagcaggttacattgtctggcaatcaggaacagtacgcgcatgggcggctccttcagtgccagcagatcgtaatagagctgcaaggctttctgcggctgcttttccgcaatggcattgaccatatcgaagatgtggttggtgatgcgagtggtgcagaccgcttccacatcctctgcggtgactacatcccggtccagacagtagcagatcagcttttccagttccatctggatattttccatgtccgtgccggttttggagagcagcaactgtgcggtgttctcggagatttttttcccttcccggcccaggataccggcaatccagcgtttcagggaattctcatcctgtaccgtgaattctgccacataacccttggattgcacggtcttatacagtttactccgtttatccacttcgctttccgtgaacacaaaaaaggtggtgtcgttggggcttgccagatattctgccagcttttccccgccggctttgaagagcccggtgtccttgaaaaacatgacccggcgttctgccagaaaaggcagcgtctctgccagatcgatgacttgtcccaaggagaaatccttcccctgatagaaatgggtgttcatctcgtcgccgtcctgacacaacgctttacgcagacgggtcgtgtactggttcttcagataacgttcctctccgtagagcaggtagatctgtttgaaattgccggttttgatgtcttcattgatccgctgcatgaattgatcctttctgggaaaatgcggttacttctacattagattcctaaaagagtataccccatttcctattgaggtttcaaggggggtatgctattatggaacaaaacagttcgaccatggacatatacgagagacaaaattatgcttgcatgattttgtctctcgtatatgtccgtgagttaagcgtcgattcatgagcaaaggtagtcacgaagtgacggaaagcgcggcagcgcgactttgcgaatggcgcggttcgaccatgggaaagcgcggttcgaccttcataccataagaggaaggaagagaaaaatgagcaagaaaagcggattcattcaggaatttaaaaagtttattttgaggggaaatgtaatggatatggcagtcggcgtgatcgtcggcggagcattcaccgctatcgttacttctctgaatcaagatatcctgacaccgattctggccatcttcggaggcacggatttttcgaatttatatgtaaagctgggaagcggcgatacggcaccggtattgatgtacggtaattttatcacggcagttatcaacttcctgatcacagcatttgtgatcttctgtctggtaaaattcatcaataagctgggagacaccctgcatcacaaagaggaagcacctgcagcgcccacgacgaaaaaatgcccgttctgtaagagcgagatcgctatcgatgccacaagatgccctcattgtacttctcagttagacaaataggaaccggtaatacagatacggccgtggaggaaagcatgggaaaaatacacaggaaaatagtggcagcaggagtctgctgtctgatgacaggcatgctgacaggctgcggaagtgataccacgaagatcaccgaaggaatgcagttggtggaaactctggattaccagggggcattgaatgcctttgacgaagcagaggcgcagaaagaggacagccgtctgatcgcaagaggccggggaatcgccagcatggggctgacagagtatgatcaggccgtagaatattttacacaggccctggaactcagtgacggctgggttcagaacgtggactatgatatgaattactatctggcggcggcatacaccaagaacggacagcctgcggaagccaaaaaggtatacgatgccattctgggcctgaagccggaggaaaaggacgcttattttctcagaggttctgcagaactggagctgggagattatgagagtgccaaagcggattttgatcaggcaatctccatggatccgaaaaattatgaccggttaatagaaatctatgaagccctggcagcgcacggctaccgtgaggtcggtcaggaatatctgcaaaatgtactggacacagccaaacaactggatgcttatgacagcggacggatctattattatctgggagaataccagaaagcttatctggcgctggatgaagcccgggataagggaggcgcggacagctatctctatctgggaagagcctatgcggctaccggagattataactatgcgtccagtgtgtacaacaattatctctccaagcaggggccgaatgcagaaatctacaatgaacttggtctgtgcgaaatggcaaaaaaggagtatcagaatgctctggcggcatttcaggcgggaaaacagatcgaaggaaacagcctgatgcagaccttgtgctttaatgaaattgtagcatatgagtatctggaagattatcagcaggcagaagtactgatgaatgcttatttacaaaattacccggacgaccagacagccatccgggagcaacagttcctgtccaccagataaaaagacaatagaatttatggatcaatcattggcagagtcttcccgggaggaagattctgctttttctcttaattgcagcagatccacaaaatccagcagagaagccatgtttttcggattaaaatgctgtatcacctctaccacatcggatacggtggtgccggggacacattcctgtctcagaacttcaggattgtaacgataaggagtccgacccaacagataatcgatggttacatcgaaatattccgctaattgtattaaagcttcctgatccgggaagtgaatattgttctcgtaattcgaaatggtgccaacggatactttcagtatggcagccagttctttctgataaatgccccgttcttcccgcagggatgccagaatttcaccgaaactcctcataatgcctcgcattctgccgcagatgcagcctatttaaatgttttcttttaagatttgataaattctattttactatattttagttttaaaggaatatgaatttagaaatcgaggaaaataatgaaaaaatgctcctagaattaattttaactaaaaagtacaaattatgcaggaaaatatccattgagaaatcctctcattaacacctattgctattttgaagaaagccggatataataatccaagagttaggtgcaactaactaatgagtgaatcatgtgaaactcctcagagaaaacggagctgctgaatccgcggactgccgggaggccatcttccgggaggagtttttcagcccttatacacagggatgggggattcacgaaagagaaggtttgggaataaaaagtttagaatagaggataaaggagaagaacaagatgaactatttagagattgaaaaagtcattggacgagagattctggattccagaggcaatcctaccgtagaagcagaggtaactctggtagacggtaccatcggacgcggcatggctcccagcggagcatctaccggtgagttcgaggcactggaactgagagacggcaataagagcagatatctgggcaagggtgttcagaaggctgtagaaaatatcaatactgtaatcaatgagactctgcagggaatggatgcatccgatatttatgccattgataaggcaatgatcgatgcagacggaaccaaggataagtccagactgggagccaatgcgatcctggcagtatccattgccagcgcgagagcagcagcaatctccctggatattcccctgtatcgtttcctgggcggtatctccggtaacagacttccggttcctatgatgaacattatcaacggcggctgtcatgcactgtcctccggactggatgtacaggaatttatgatcatgcctgtaggtgcgccttcctttaaggaatgcttaagatggtgttctgaagtattccatgcactggcttctattttaaaggacagaggcctggctacttccgtaggtgatgagggtggttttgctccggcattgaagtctgacgaagaagctattgagaccatcttagaggctgtaaagaaagccggttatgagcccggcaaggatttcaagatcgctatggatgctgcttccagcgagtggaagaccggcaaggtgggcgagtacaagctgcctaaggcaggcaccgtatttacctccgaagaactgatcgcacattggaagaaactggtggagaaataccccatcatttctatagaagatgcactggatgaggaagactgggaaggctggaagaagctgaccgcagaactgggcgacaaggtacagttagtcggcgatgacctcttcgtaaccaacaccgagagactggcaaagggaatctcccttggctgtggtaactccattctgatcaagctgaaccagatcggatccgtatctgagactctggaggccatcaagatggcacacaaggccggttataccgctatttcctcccaccgttccggtgagaccgaggataccaccattgccgacctggcagtggcactgaacacctgtcagatcaagaccggtgctcccagcagaaccgagcgtgtggcaaaatacaaccagttgctccgtatcgaagaagaactgggtgcagcagccgtatatcccggcatgggcgcattcaacgttcagaattaatttgcttttacccaaaactattttggtttctctttttctcttcagggactgttcgaaaggacagtcccgtttgcgtttttcttttttaaaaaccttgcaacattttttctcccatctgtatctaagatagagcggcagggaaaatggcgtaagatcccgggaacagcagaaggaagctgcggaagaaaaaatacattatttcatattgacttttccgaaacctatgtgataaaatctcaccgttgcgaaaatagcatagagactttaggtaagaattggaaacgacacatgtgcgcactgctcactgattaacgaacaacacacatgtgtctttttgcgcccatttttagaaaaggagggcatccaattatgccgaaaacaagattacagaacattatttttaccctgatcatggcattcgttatggtatacgctatggtctgctacaacatcgcactggacaagggaggaatgaccaacgagatcttcctgttagcgttccacgagattcccattatgtggcccatcgcctgtattctggagtatttcgcagtagaaaagctgtcccggaagctggcattccgcatggtatccccggaggataagcccgttttcattactttagcgatctcttccatgatcgtatgcctgatgtgcccggtgatgagctttatcgccacctgcctcttcatgcaccccggcaaccagatcatcgccctgtggctgcagaagaccgtccagaacttccccatggccctgtgctggcagatctttttcgcaggcccaggagtgcggaatgtctttggatttgttgtgggatttatattggatagaaaaagtataattgactatcatctgtgagtgtgctaacatgagcaaataaagagacaacgaagtccgtggaaacggaaagcgttgtctcttttattttgtagaaaaagtcaggaaattacgaggtgaaacctatgagtgagcaggaaaagaagcaaaatacagttgcagaggtgttagtaaaatgtctggaaaacgagggcgtgaaatatgtcttcgggattccgggggaggaaaatctggatatgatgaatgcactggaaaaatcggacatccgggtgatcgtggtgcggcatgaacagggagcggcattcatggctgatatgtacggaagactgacgggaaaagcaggtgtgtgtttctcaacgttgggccccggtgccacgaacctgatcacaggcacggcagatgctaattccgacggtgcaccgctgattgccattactggacaggtgggaacggagcggatgcatttgacttctcatcagtatctggatctggtagagctgtttgcaccaatcaccaagcggagcaaacagatcgtgaaccccaattccgtcaatgaaatcgtcaggatcgcttttaaatatgcggagagtgagaagccgggagcctgtcatgtggatcttcccacgaacgtggcgaagcttccggtcagctccggtattgccgcacagcctttgaaaaagccggagagggataaggagtacgcatccttttccagtatcgatcaggcggcggccatgatcttcaaggcaaagcacccggtgattctggtgggacacagtgcggtgcgcaatcacgccggggaggctcttaccagcttcgcagatgtcctgaagatcccggtggtcaataccatgatggccaaaggcatcattccttataacaacaaatattccctctggaccataggcatcccccagaaggattaccagaacaaggtgctggatatggcagatctggtgatcgccgtcggttatgatattgtggaattcgctcccggcaaatggaacggagaggggaaacataagattattcatatcgaccagaggccggcgcatatcaacatgctgtaccagccggaggtggaagttgtcggagacatttcctattctttacagcagatccagtaccgcagtgacgcaaaagaggagccggaagaatttctcaaactgcgggaagaaatggtggcggaatatgaaagctatgcggatgacacctcttttcccatgaagccacagaaaatactgtacgatgtccggaaatttatgggtgcggatgacatcgtgatctcggatgtgggcgctcataaaatgtggattgccagagagtacaactgttacgaacccaatacctgcatcatctccaacggttttgccaccatgggcatcgcagtgccgggggctgtggcagccaagttgatctacccggagaaaaaggtactggcgatctccggagacggcggattcatgatgaatagccaggagtatgagacagccctcagagaggggacacccattgtgactctgatcttctccgatgccagctatggtctgatcaaatggaagcagatggatcacttcggacacaactgctttgtggatttccagaatcccgattttgtgaaatatgcggaaagcatgcatgccaaaggctaccgcgtggagaaggcggaagacctgctgccgatcctggaggatgcctttcagcagaaggtcccctgcatcatcgactgtcctgtggactacagcgaaaataccaagctctcggagtatctgcatgataagtttgagaagtagagttttaactagagagttacgaaagcatagccgcgcataggcatagtgaagacagcgatgggcgctcgtgcacaattcgctgtctttacttatgccgagatgtggcaaacgccgcgatatgaaataagattggcagcgttctttgctgacaatcttatgaatagcgtggctcattgcggatggtagtttcaaatccacgaacgtccacagcaaacggaacatccttccacggtgggcatcgcggcatttattatagcctacgttacgaaatgccctgtaatctacgttttttctctgttgagccccggaagtttgtgacaagcggggcgtaatccatgttttttctctgttgagccccggaagtttgcgacaagcggggcgtaatccgtgttttttctctgctgagccccggaagtttgcgacaagcggggcgtaattcgtgttttttctctgctgagccccgaaagtttccgacaagtggggcgaaatctacatttttcttctactatgtcccgaagataaacccctccgcaatgagccacgctattcataagattgtcagcataaaacgctgccaatcttatttcatatcgcggcgttcgccgcatctcggcataagtgaagacagcgaatcatgcgcgagcgcccatcgctgtcttcactatgcctatgcgcggctcattgctcgcgtaactttccatttacagtgtaatattatccacctttttccattcgaaaaaaatccccctttttgaaaatttgctgtctgttgcctgatggaaactaatggtagaattcaattatcaaataaaacagacggccgtcagtgataatgataaatacaaaaaacaatatttacctattgggaggacgagtgtatgaagcgtaaattattatctaccgtacttgcggtaaccatggcagtatccaggttgaccggatgtggacggagcggaacaaatgaagcaacaggaacaggcgctgcaacgacagatgccagaacagagacctatcgtgtccggattcctatagacagctgcgatttttccctggcgcattacgaagcagacggggaagaggcggatgagaattttgaacacttttcttttgaaagagtggaaaaatacattctgccgctgctggatgcggcggagaaagcttacggcgggaagctggatatcctcctgtccccctggagtccgccggtctacatgaagaccaatggagagcggaacaacggcggcaaattaaagccggaataccggaagcgctgggcagagtatatctgccgttacattgaggaataccgcagccgcgggtaccatgtggcattttacacatttcctaaaggcgggagcacagcggatcggtgttaccagatacacagataagatcgaggtgacggcgtttgaaaaggacgagcggatcacggtggtgcttttaaaccggacggaggaagagattccggtgtatctgcggctgggagagtactgtgcagaactgacatcaaaggcaaagtccattatgacggcggagatcgaaaaataagaaaatcgatataggcaattatgaaaaagactgcgggaaccgggagcggaacccactgtttttgcgtatacgtccggggagcaggttgacagaacggtggaaatcgtagtattttgaaacagaccactgtggataacggtgtagcgataaaaccggacagaaaaagtaagttacgacagaagaatgaggatacagacatatgaagatctatttggtacggcacggggagacggactggaatcaggctggtcttttgcaggggcagacggatattgcactcaatgcccagggactggaacaggcacgagaggcggcggagcggttaaaagaggttccgtttgaaattgcattttgttcaccactgatccgggcgaagcgcacggcagaaactatcataggcgatcggaagatcaccctcaccacagacgaaagactcagagaactgaatttcggtccatgggaaggcgtggacatccggagcatcaaggatgctgccagccagccttttactaatccgggcagctacattccccccgtgggagcagagagttttgcacagctgtataaaagaagcggtgaattcgtagaccaggtattgctgccattagaaggtacatatgagactgtgctggtggtggcccacggcggggtgaaccgcagtattctgaatcccgttctgaatattcctgtggatgatttctggcgtgtgcatatgggcaactgcgcaactgcgattctcgactgtacagatggaaagctgtccttgctggaatatacggatagccaaagcgctaatacgaagagcagactgctgtgaagaaagtccaatatgaaaaaatcctacatcggatatattcgcagaatgcggtttcgcatggctctgaatggttatcatgatggaaaggtgagaagttaagaatgcacatagacagagaagatatgctggaactgaccagaagaatgaccgtgtcccgcaactgtttttccagaattgcaggagcctatatggacgaagaaggggttattgacggtacttttaatactcattttctgaagttgtccggaagcgaaaaagagaaaaatctgaatattgccaagacggtgccctattccaataccaatgtgaatctgaaaaactaccggctggatcagggagcccggaaaccgggcagcattatgcagttattggaggcattacggcagtgcgaactgaaaaatgatgcattattgtactccctctatgaatatattggggagagataccagccgggatatccttatgccgtttatcttttcttcggcagctacgatgtacccaccaagggaaaagacaaagagaaccagtgggagtccgaggaagtctatcagtttctcatcggcacgatcagtccggtgaccggagactacgaggccggaaaaccggaggcgggatttttgtaccctgcctttgccaaccacagcacagacattgacggtatcaatatctatcaggcggaggaaggggcacagttatttgcaaaaatactgggcgtacaggcttgacagaaaggcatttcttccctataatacgctctggaacaaaatgaataaccggtcataaaacccgtaagggagtggatttttcaagatatcgatcttattttcgccacacagcaggaatgttgtgtggcgtttgttgtataaggagcagaaaatgaaccagacttatatgaaagaaaagaaaatatttccccttgtgatgtccatggcacttcccatgatgctgtccatggcatttaattccctctataacattgtagacagttatttcgtggcgaagctcagtgaagatgccatgacggcattgtctttagtctatccggcacagaacttgttgacggcggtggcagtgggcttcggtgtgggtgtgaatgccatgatctccttctatctgggagcacagaatcaggaaaaagcggataagacggcaacccagggcatggtgttgggagtattgcacggcgtactgcttatgatcttattcctctgcggcatgaactggttcttagggatgtttacgaagagcgataccgtgcgggcactgggcatggaatattccaatgtggtattcctgttttccaccattgtcaccggaggtatcacgttagagaaaatctttcaggcggtgggccggatgcgtgccaccatggtcagtatgattgccggatttgtgacgaatattgtgttggatccgttgttgatcttcggtatcggaccgtttccccggatggagatcgccggagcggctttggctaccggaatcggtcaggtgatcacgttattagtatatatcatctattacgtgttggatccgttgccggtaaaattgcgcagaacttatctgcgaccggaaggagagatctgtggcaagacctacggcatcggcattccggctacgttgaatatggcactgccgtctctgctgatttccgcactgaacggtattctggcggcttattcgggtgcgtatgtgctggtactgggcgtttattacaagctgcagacctttatctatctgccctccaatggcatcattcagggcatccggccgctgattggttacaattacggtgccggagagcggaatcgtgtggagcagatctaccggttgacgctggaactgactgccgggatcatggctatcggcacggcattgtgctggctgatccccggaggactgatcggactgttcaccgagaatccggagactgttaccatcggtattacagcactgcacatcatcagtctgggctttattctgtccgctgtgtcggtgaccagctccggcgcattggaagcgctgggacagggcatggcttccctggtgatctccgtgatgcggtatgtggcggtgatcatccctgcggcatttgggctgagcagcctgatcggcgtcaccggtgtgtggtgggcatttgtctgcacggagagcgtgactgcggtggtggcgtatgtgttgtaccacagggtgtggaagagagcgtaaagcggtcgttcaccccgcgccattcgcaaaatcgcctcttcgaggctttccgctgctacgcagctgccttttgctcatgagatggcgctcccctcgtcgatttgcacagagccggctccttacgcaagcgtaaagccgtctccgcacaaatcgacgggtgaactgatgtatacacaatatcttgtatcctttaattgacttcccctacaaagtattgtagaatagaccgtgataggttttacgggcgaaagcccatggggacacgaaggtaagggggtacataagatgtttcaggtaatcaaacgagatggttccaaagcggactttacactgacgaagatcaatgatgccattatgaaggcttttactgcgacgcagatgagctacaataatgacattattgatcttcttgcgttacgggtaactgcggatttccagaaaaaggtggagaatgacgagatccacgtggaagacattcaggacagtgtggagcgtgtactgggacaggccggctatgaagaggtggcgaaagcgtatattctgtaccgcaagcagcgggagaaaatgcgtgccatgaagtctaccattctggactacaaggatgtggtcaacagttatgtcaaggtggaagactggcgtgtgaaagagaactccacggtgacctattccgtaggtggtctgatcttaagcaactcgggtgcggtgacggcgaactactggctgtctgaaatctatgatgaagagattgcagaggcacatcggaatgcggatatccatatccatgatctgtccatgctgaccggctactgtgccggatggtccttaaagcagctgatcaaggaaggactgggcggcatcactggcaagattacttctgctccggcgagacacttatccgtgctatgcaaccagatggtaaatttcctggggatcatgcagaacgaatgggcgggagcacaggcattttcttcctttgatacctatcttgccccatttgtaaaggtagataatttaagctatcccgaagtgaaaaaatgcatcgaagcatttatttacggtgtcaacacccccagccgctggggcacacaggctcctttttccaatatcacgctagactggacggtgcccgatgatctggcagagctgccggcgctggtaggcggtgtggagatggatttcaaatataaggattgtaaaaaggaaatggacatggtcaacaaggcgtttatcgagaccatgatcgagggcgattccaatggccgtggtttccagtatccgatcccgacttattccatcacaaaggattttgactggtccgacaccgagaacaacagactgttattcgagatgaccgcaaaatacggtacaccgtatttttccaattatatcaattctgacatgcagcccagtgatgtccgcagtatgtgctgccgactgcgtctggatctgcgggaactgcgcaagaagaccggaggatttttcggttccggcgagagcaccggaagcgtgggcgttgtcaccatcaatatgcccagaatcgcatatctgtctgccaacaaggacgagttttacgcaagactgaaccacatgatggacattgcagccagatccctgaagatcaagcgcggtgtcattacgaagctgctgaacgagggactgtatccctataccaagcggtatctgggaacctttgagaatcatttttccaccattggtctgatcggtatgaatgaagtgggcttaaatgccaactggctgagagcggatatgagcgatcccaggactcaggagttcaccaaggaagtactgaaccatatgagagagcgtctgtcggattatcaggagcagtacggagacctctacaatctggaggcgacccctgcggagagtaccacgtaccgtctggcaaagcacgacagaaagcgctggcccggcatcaagacggccggaaagcccggagataccccttattatacgaattcctcccatctgccggtggactataccgtggatattttcgatgcactggatattcaggatgaattgcagaccctgtatacttccggcacggtgttccatgcattcctgggagaaaagcttcccgactggaaggcagcggcttctctggtacgcaccatagcttccaattacaagctgccctattacaccctgtctccgacttattccatctgtaaggagcatggttatctggcgggcgaagtgaaggtatgtcctcactgtggggcgaagaccgaggtctacagccgtatcaccggttactatcgtccggtacagaactggaatgatggtaagctacaggaatacgccaacagaacagagtatgatattgcacattcttccctgaagcgtcccaccagaagcgtggtgaccttgtccaattttgcagaagaggtggatgtaaaagtggagcagccgcagaacatcaagtatctgttcaccaccaagacctgtcctaactgtaagctggtgaaggaatatctgaaaaatgtaccctacgtgaccatcgatgcggaggagaatatggagctggcaagacgttacggtgtaatgcaggcaccgactctggtggtggtaaacggtgacagccataaaaagtatgtaaatgcttcaaatatcaagaagtacgttgaccaactgacattagttggggtagaatagaaacaggtcaggaggcatcgcccgaaggcggtgcctttgctgtgtaataatataaattcaaaggcagatctattgcagaacggaggaaatatgatcaacaaactgatcactcgaatcaaagaaaccaacgcaccgatcgtggtaggactggatcctatgatgaaattcgtgccggaatatattaagaaagcagcattcactgaatacggtgagacactggaaggtgctgcagaggccatctggcagtacaataaggggattgtggatgctatttatgatttagtacccgctgtgaagcctcaggtggcaatgtatgagcagttcggtattcccggcatggtggcatttaagaagactgtggattattgtaaggaaaaaggcctgatcgtcatcggcgatatcaagcgcggcgatatcggatccacttccgaagcatacgcggtaggacatctgggcaaagtacaggtaggcagcaagagctattacggttttgatgaagattttgtaaccgtgaacccttatctgggatccgacggtgtaaatccttttgtgaagatctgtaaggaagagaaaaaaggtattttcgtactggtgaagacttccaatcctagcagcggcgagttccaggatcagctggtgaacggcagacctctgtatgagctggtaggagaaaaggtagcagcctggggagctgactgtatgggtgattcctacagctatgtaggtgctgtcgtaggagcaacctatcctgagcagggcaaagtactgcgtaaggtaatgcccaaggcatttattctggtgcccggttacggtgcacagggcggtaagggcgcagatctggtacattttttcaatgaagacggactgggtgccattatcaactcttcccgtggcatcattgccgcataccagcaggagaaatacgcacagtttggcgagcagaattatgcagatgcttcccgtgcggcagtactggatatgcgtgaagatatcgcacaggcgctggcagcacgctaggcagaagacagctactattcagagtctcattcgcaaaatcgtctctttgagactttacttttggctctgaatagtgataaatgtatggggtgtccacaagcggacagatgggagaacagaggatgaaagaaaagttatatattaccttccactcggaggatgatatcagacattttgtagatacctgcaacgaattcgacgatgcaatcgacatccgtattcagaagatggcaatggatgcaaagtcacttttgggaatgctcctgatgaagacggaggaaccgctggagatcgaatatgcctgctatgatgatgaagacaattacgaagaattcaagcaggccatcctggaaaaatacgacgtaaaagtcgtacaggctacggaaaagcaggcagaagataaaattgtttgaaaaaattgaaaaattctattgacattttcgcccgcagcagttacaatacatactgttgcaggcgaaaacctgtaaatgaaatgtacgtgtagctcagctggatagagcgtctggctacggaccagaaggtcgtgggttcgaatcctgtcacgtacatctaaggccccggagatgatgtctccggggtttttatttacgcgagcaacgagccaaagtccgtgcttgcacgagaccttggcgactgccgcgataacttgagaaactcgcaaagcgtgtttctcatagttttgcattttagaaaagttttagaaatacttcccgatccgtatatttacgtggtacttatgtcatgctaaaatgatgatgtaaatggaggaagtcgtgaaagtatgaacaaacaggaatttgtggaccgactgcggatggcgctgaatgggcgtgtttctcccggtctggtcatggataatgtaaattattatcaggattatataaatacagagatccgcaagggcaggacagaagaggaagtcttagaaagcctgggagatcccagactgatcgcccgcacaatcattcagaccaacggtggagacaaccgttccggataccggaacacggtctacggcaacggagagtatcgggaggctgccggacagaatgtccatcgtagttatacagaggaagaggatggctacggaacacaccagagtaaggtgggaaatgttctggcgaagcttccgggctgggtgtggctgatccttgggattctggtggtagtattgatcttcggtgcggtattttccgtattgtcttttctggcaccggtactgattccgattgtggtagtattgttcctggtgaaattatttcgggactggcttaactagcaactatataaatcagctattcatagtccctcaattcgcaaaacgcctctgcgaggcttactttttgctcattgaggttacttcgtcaaataaatataatcggagtaccttacagatgcgagcatctgacggttgctccgattatatttattgactctgaatagttccaacgtaaagagccaccagggggaagctggtggctctcatgaggggagtataaataaataatacataagggtgcaaatagaatcatgaaggggtttctatttacaattatgattatagtactaatgatataaaaatgcaagaagaaatttaggcctaaagtaccatattttttgggcatatttttgtgcgaaatagacatactactcctgtaactaaaaagatatttcctatcaggaggtcacaaatatgtctaacaattatgaacagaacaatcagaacaatcagaacaagtataacaactcttatgacgagagcgagaacagtaagaactcccagaataagcagaacagccagaatcagaataagaataagagcaacaacagggagcaaaacaagagctgctaatcgggtgcataatttttcaggggctgccgcaaggcagccctatttacatattttcagaatccatatataataactttatatgtgcaataattgatgactaagatccggaggaacgaatgagacgttttgaattgattgctccctgccatttcggtatggaatcagtattaaaaagagagatcacagatctgggatatgatattacagaagtggcggatggtcgtgtcacctttttcggagatgaggaggctttgtgcagagcaaatatttttctgcggacggcagaaagagtccttatcaaaatcggaagttttcatgcggagacttttgaagaactgtttcagggcacgaaaaatcttccctgggaagaatacattccgaaggacggcaaattctgggtggccaaggcagctagtgtaaagtccaaattgttcagcccctcggatattcagtccattatgaaaaaagcaatggtggagcggctgaaggcccagtatgagatcagctggttccctgaagatggagaaaatttccctgtccgggtattcctgatgaaggatgaagtgaccgtgggactggacagcaccggagagtccttacataagagaggatatcgtaagctgacggcaaaagcccccattgcggagaatctggctgctgcactgatcgaactgactccctggaatgcgggcaggatcctggtggatcccttctgcggaagcggcaccttccctattgaggcagccatgatggcagccaatatggcacccggcaggaaccgcagttttacggcggaagaatggccccatatcatagggaaaaaggtgtggtatgatgccatggacgaagcggaagagatgatcgatctgtcggtggagacagatattcagggctatgatattgacgaggatatggtgaagatcgccagagaaaatgcacggatggcgggtgtggacaagctgatccatttccagcgtcgtggtgtggaagagcttcatcacccgaagaaatacggctttattatcaccaatcctccctatggagagcgtttgcaggataagagtcagatgccgcagttgtaccgtaccatcggagaacgattccgggaactggattcctggagtatgtatctgatcactgcctatgagcaggcagagaaggatatcggcaggaaggcggacaagaaccgcaagatctacaacggaatgatgaagacttattattatcagtttctgggaccgaagcctccgaagagaagagacgtttagaagaaatgaaaaatttactgcagatcagggatcaacaacagaatagacgcattacattgatcctctggctcctgctgggaagtatgtctatgggcatcatgctctggacggcagcgcataagacggtggtgatctctgcgttaagtcaggaacagggcggtctggtcacagagaatcaggcggaacggtcccatgaaatgcagctggccatggcggaagacaggaaggcagaacgggagatctgtataccattggaaaccggtacgaaagcggaaaatgtagtggtggaaaatcattacatggaaagggaactctggatctatgtgcagaacggcagaaaatctttttaccgggaacatcagcttaccggagatttcagcctggtgggaaacggcatctgtgaagcacagaacgagggcgtattgctcagattgtccatgaaggagatcctggagtatcacagtactctggaagagggaactctgaagatcgattttgtcaatcccagagaatcttacgaccggatcgtagtgctggatcccgtgggaggcggaagggacagaggcgttgccgattccggatgtgaggagaagaacatcgctctggaggtggcaagacagacggcacagctgttggaaggaagcatggtaaaaatatatcttacccgtacagaagatacagaggtcgcacaggaagtaaggcgtagcttcgctgactgggtggatgcagatctgtacctggagatcggactgtcagcagatgatgcacaggagagtacctacggcatccgggcagaatacaatgatgagtattatctgccggatttcggaaatgtacaatgggccgactgcgtgaccagacaagtgacggtggcttccagcaaccgggccattggattgttcccggcggaggaagatgacattctgtggcagcttaagatcccggcagccagaatttctctcggatatgtgaccaacagcagcgagagacagctgctggaacaggaaagctatcaaaaaaagctggcggaaggtattgcagaagctatttccgaggtttatactaatacgcaatgatgactatataagaacacaaatgcggcaaggagttaatatgcagggaagaatcgtattcgcgaccggcaatgccggaaaaatcaaagaaatccgcatgatcatggaggataccggtctggaagtcgtatccatgaaagatgcgggcattaaagcagatattgaagaaaacggtaagacctacgaagagaatgcactgatcaaggcccgtgcggtggctgcttttacgaaagatatcgtgatggcggatgactccggactggagatcgatgccctgaataaggaacctggaatctattctgccagatatctgggagaggatacgccgtattccataaaaaatgcaaatctgatccagagactggaaggagtgccggaggaaaagcgtactgccagattcgtctgtgccattgcagcagtgctcccggacggcagagaacttaccacaagagctaccatcgaagggcggatcggatatgaagagaaggggaccaacggattcggttacgatcctattttttacgtaccggaattcggcaagactacggcggagttgacagaagaagagaagaaccaggtcagtcacagaggtaaggcattggagctgatgaaagaggaactgaagaaatatgaagatactgatcgtaagtgatacccataaaaagaatgagaattacttcaaagtactggagatgcaccacccggacatggtgatccactgcggagatgcggagggcagtgagtatgcactttcttctgcggcagaatgcccggtttatatcgttctgggcaacaatgactttttctcggatctccccagagagatcacactggatatcggatcctacaaagtatgggtgacccacggacacaattattatgtatccatgggaaatgagaccatcaaaaaagaggccattgaccggggcgttgatatcgtgctgtacggacatacccatcggccggtgatcgatattgatgatgacatcattgccgtgaacccgggaagtctgtcctatccgagacaggagggacgccagccttcctatgcgatcatggagattgacagagagggaaaggtgcattttacgattgcttatcttcgccagtgatgcttcaaacttctctcttgacagatagaaaatctctgggttataataacatctgcgttgcggaaatccgcgataacgcagcttcggggtgtggctcagcttggctagagcacctggtttgggaccagggggtcgcaggttcgaatcctgtcaccccgacgtgtaacttggattttgtatttatttttcaaaaaattagtacaaaactgttgacaaatgatgtcggataagttacaatatgcttcgtcggttcgctgatgtagctaacagacagatatgtgttcgtagctcagctggatagagcaacggccttctaagccgtgggtcgggggttcgaatcccttcgagcacatttgagataaggaagacttttggtcatcactgtctcgcatggtgggtatagcgcagttggttagcgcgccagattgtggctctggaggccaagggttcgaatccctttatccacctttgttatgagtgaagtgtcgtaatggcacgcttggtgtcatatttatagggctatcgccaagcggtaaggcacagcactttgactgctgcattcgctggttcgaatccagctagccctgttttattatggggtattagctcagtcggtagagcacttgacttttaatcaagttgtcgggggttcgaatcccccatgcctcactaggtgttgtgatatcttgatttggggattcgaaccccctggtcgagatcccccatgcctcacttgtttcttttatacagcatcttcacattttgaaaacccctttcggggctttttttatttcatttttataaaggaaaggaaatactatgcagactaaagaaaacaagatgggcgtcatgcccatagacaaattactgatctccatgtcactgcccatgatgatctcaatgctggtacaggcactgtacaatattgtggacagtatctttgtgtccaggatcaacgaatatgccctgcgtgctgtatctctggcattccccattcagagtctgatgatcgctgtggcggtgggaactgcggtaggtatcaatgcctttttgtccagaaccctgggagaaaaggattttgagaaagccaatatcattgccagaaacggtatttttattgcaattgccagctatattggatttgcggtggccggtgcactgatcagcagaccgttttttgccagccagacggaagtactggaggtgcgggaatacggtgtgacctatctgactatctgttgcgtggcgggaatgggtatttttctgcagacgacttttgagaggctgttacaggctaccggtaagaccatgtatacaatgatcacacagtcaaccggtgcaatcatcaacattattctggatccgatcctgattttcgggtattttggcatgccccgcatgggaatcgccggtgcggcagtggctaccgtgatcggacagatcgttgccgcattcatggcattatggtttaacctgaaattcaataaggaactggatatttccatgaaaggattccgacccaacggacatctgatcggacagatctataaggtaggagccccttccatcgtggtacaggctatcggttccctgatgacctacggaatgaatctgatcctggcatctttcggttccgcccagacggtgttcggtatttactttaagctgcagagctttgtgtttatgcctgtttttggactaaataacggcatggtgcctatcattgcttacaattatggcgcaggacataaggaccgcgttattaagaccattaaacacagtgtggcttacggtgtgggtatcatgtgtgtgggactcattgtaatgcacatctttccggcacagctcatgcgtatgtttgatgcggaggaaagcctgatcgccatcggtattccggcgctggagaccatttccctaagctttgtgtttgctggcttctgtatcgtggtgggaagcgtattccaggcactgggtaacggcgtctacagtatgatcgtgtccgtggccagacagatgtgcgtactgcttccggtggcaaagcttttgtccttaagcggtgaagtgacattgatctggtgggcctttcccatcgcggaactggtcagcctgctcttaagtacctatttcctcgtaagaatctataaaaagatcatctgccacattggagaaccggtaacgacaagagagattacagaataaaatagaaacagaagcggcggggatgcttgacaagcaaaaggaaggaagagtataattattcaaggtcctttggcagagagcattcccgtttgtcaaggttttaagctaatcgtcggatatggcagttagtaagcggatatggcggaagtggcagacgcgatagatttaggttctattgtcaacagacgtgcaggttcaagtcctgttatccgcattgcgtaattatggaagcatagctcagccgggatgagcgttcgcctcacacgcgaaaggtcaggggttcgagcccccttgcttccactcgaaataactattcagagctcatgacaaggactgaatagttatttttttgatcagagagcatcggataagtaatgtacgaaagcacagaaatataaaggaatacaaaagcaatgaagaaaaatgtaagaaaacagggaattctgctgccgatatccagtattccctcggcatatggtatcggaaccttcggtaaggaaagttaccgttttgtggacttcctggaaaaatcaggcaaccatctctggcagatcctgccgttaggtcctaccggctacggcgattctccgtaccagtccttttccacctttgcggggaacccctactatattgacctggagcttctgatcgaagatggctatctgacaaaagagatctgtgacagctatgatttcggagacaatgagcattatgtggactatgagaagatttatctgtcccgttttaaagttctgaaaattgcgtttgacaatgccagggaacagggccttacagagaccggagactatcagaaattccttacggaaaatgcgtactggctggatgactacgctctgtatatggcggtgaaaaatgcttttggcggtgtctgctttatggaatgggacgaggacatccgtctcagaaaagcagcggcacttcgcaaataccgtaagaagctggcggaagaaatcgcattttattgcttccaacagtacctgtttgcaaaacagtggaaagaactgaaagcctatgccaataagaaaggcattgagatcgtaggggatattcccatctatgtggcatttgacagtgccgatacctgggcaaacccgaagctgttccagctggataaggaaggccggcccatcggagtggcgggatgtccacccgattgtttctccgagaccggacagttatggggcaatccgctctacgactggaagtatcataagaagaccggttacgagtggtggatgcagcggatcgcttattgctatcagctgtacgatgtgcttcgtatcgatcattttcggggatttgatgaatactggttcgttccttacggagatccgacggcggagaacggccattgggaaaagggtcccggttacgaactgttcgatgtcatgaagaagaaactgggcaggaagaaagtgatcgcggaagatctgggatttctgactcccagcgtgatccgtctggtgaagaagaccgggtatcccggaatgaagattcttcagtttgcttttgatgccggaaatgacagtgaatatctgccgcacaattatgacaagaactgtgtggtctataccggaacccacgataacgatactacggtggggttcttacagaatatgccggagaaggacaagaaatttgcaaagaaatatctgggacataagaatgacaagaagctttgctttgagatcatccgggcagcattgtcaagctgtgcggataccgcaatcattcccgtgcaggattatatggagctggacagcagcgccaggatcaacactccctccactctgggatgcaactggaaatggcgtatggataaggatgctttggatccgaagcttgcgaaaaagatttataggatggcaaaattatacggaagactgtaaagtgtgccgcgtagcgtaaggcacattgtaagaatacggaagggatagtttcctttccgtattttttgtggacaaatcataaatatttgcatgcatgaaaatggggataactatggcaggtagcattttttagtgcatttttgtcaaaacaagaggatttttttgtggtcttatggaaaaagccacgttattatggtatggttatctatattgggcggagtctgcaatcggatttctgcgagagagaggggaaacatgagccgtactactgacagagcaggccgtaataagggacaatggatcgtcattgggtttatggcttttgctatcatagtcatttcgatatgcacagtaatctttcgttcctatgtgcggggatttcataaagtaacagacagagaaaaatatgaccggtattatgtgatgatcacagaagaccgcaaatcggatttctggcagtccgtataccgcggagcttttgaacgcggacaggaagagaatgtatatgtggatctgctgggcgagcatctgtctcaggagtatacgagggcagagcttatgcggatcgccatgtcctccggtgtagacggtatttttgtagaatcggatgaaagcgacgagatgtcacagatgatcgacgaagcagtagaacggggcatccctgtggtgacgctgtatggtgacaatacgcacagtgcacgctgcagctttgtcggtgtaggaagctataatctgggcagggaatacggacgacaggtattgaagctggcttctgtcagtgagagtaccgcgcccatgacggtagcggtactggtgaatgcccatgcactgaactcggcacaaaatattgtctgctccgggattcaggacgcactggaacaggagaaaatccggggaccggagatagaactttccttaattacagtggacgatacgaatactttttccgtggaggaatctatccgggatatttttatgaatgaaaaactgccggatatcattatctgcctgaacgaactgagtactacctgtgtctaccaggcggtagtagattacaactgcgtgggcgaggtcgcaattttagggtattatgatactgatacgatactcaaagcaatcgagcgaaatgtagtcaatgcaacgatctcgatagacacggagcagatgggagctttctgcgtggatgctttgcaggagtactatcgttttggctataccagccagtattttacggcggatgtcacaattattgatcagaataacgtgggtgaatatttacaagcgcaggaagcgacagagtgaggtacgcatgaggaaaaaatttcgacagctgtctcttcaggcgaagatgagcagcatttttgtattggcgaatctggtagtatttgcagtgacggtgatattgcttctgggaatcaacagcatgtcttcggagatcgataaggtctatcaggggaatctgcggctgaacgaagtatctgatgcattgatggcggtgcaggacagtatgacggattatctgaattccaagaccagtgattccctggaggaattttaccggaatgaacagacatattcccaactggtgcaggatatgagcgatgaggtgacgggagccacctttcagagaatggaacgcagtatccggcatatgtcggaagaatacctggacctcgtaagtcagacgattgaggcaaagcgtgggagaaatgtagagaaataccgcgtccggtacgagaacgcgacacagatgtatgaatatatcaatacctatatttacagtctgaacaacgaacagttccgcagcaactccgagaactacagccgtctgtcggctgctttccgtaatttcgaaatggtcagtgtgattgcattatccatcgtcattgtggtcagcgtatctatagtagtaaagcttaccggggagatcatcagtccgttaaaggatctggcggtaaccgctgacgaagtagcaggcggaaactttgataccgaactgttacaagtacagtcggaggatgagatcggcgtggtaacgggagcatttaaccagatgctgatcagtatcagacagtatctggaaagcctgcgcgagagcatggaaatccggcgttccttaatggaaaaagagcttttgatggaagcacacttaaaggatgcacagctaaagtatctgcaggcgcagatcaatccccacttcttattcaatacgttaaatgcgggagcacagctggccatgatggaaggcgccgaccggacctatgaatatgtacagaatgtggcggaatttttccgctataatgtaaaaaagagtaatgatatcgtgacggtcagagaagagctggaactggtggatcattacatttatattctgaatgtccgcttttctggggatatccattatgggaaagaaattgaagaggatctgctggacagctgcatgccaagcatgatcttacagccgatcgtggaaaattccgtaaatcacggcatcagagagatgaacggagagggaaagatccggctgaaggtataccatgtggatggagatacgctggggatcagtatccgggataacggcatcggaatggaccgggatacgatagaaaaagtacttggcggcaattatcacgaagagcagtcaggcggcggttccaatggtattgcaatggggaacattatcgcaagattaaaacttttcacgcaaaacgaagatgtaatgacgattttaagtgacgggaaaaatcaaggaacggaagtaatcctgtatcttccgataaaagagagggaaaagacggatgtataagatcatgctggcggatgacgaaggaatcgtgatcgattccctgaaattcatcatcgaaaaagaattcaaggatacctgtgaggtgcagtatgccaagaccggcagaagtgtgattgaactggcagagagcttccgcccggacgttgcggtcatggatatccagatgccgggaatcaacggcatcgatgctatgaaagagatccggagaagcaataatcatacagtgtttatcgtaatgtcagcttatgacaaatttgattatgcgaaagaagctatcaaacttggagtcatggagtacattaccaagccgatggagaagacccggatcattgcagcattgcagaaggcaatggagcgaatcgatgcagagcgcctgaaacgcaaaaatgagttgttgatcaaggaaaaactggagacagtcgtaccgattattgaaagcggtctgatccacaatatcttattacaggagcatttccgcgaggatattgagaattaccggtcaattttaggaatcacgctgcaatatgcctacatgattgctgtgatatgcggagatgaacagcagggaaaccacatgacaaatgcggtgggaagcagtgtcagaatgcagaagcattatcaggaggtcagggactgtctgaaagaaaattttgactgtattgtgggtaccgtcatggcaaacaaactggcagtgctggtgccttatgagaaagatgtgatggactataatgagcgtatcgaactcattgaaaaagccagagaactcaccagatatctgcgcaagagaacggatatcagcttccgcatcggcatcggagaaccgaaagattttctgatggcttcggaatcttatacggaggcgctgaatgcactggtggcgaccaccggcagtgtggcacatgtggatgacctgccgatcaaatgcgaatacggtggaaattatccggtgaagctggagaaaaaactttttgcggaagtcgaggacggtgacattgacaatgcttccgcatcggcatcggcattttttgactggatggtggagagcggttccgatctgatgaatatgaggcttaaggtgctggaatttgtcctgtggtcagagcacattgcctatgaaaaaggcggtatgatctatcagctcaattcccgtgcggagtatctgccgcaggtgatgcaaatggcggaaccagcggccatgaaaacatggttcctggaaaaagtgaaggaagcctgccggaacgttctgaataaaagggaagaaaagacgggcagtattatcgaaacagcaaagaattatattaagaataactatcacaaagatatttccctggatgatgtatccagagaggtaaatatcagcccgtattatttcagtaaactattcaaagaaactaccggggaaaactttatcgagtacctgaccaatttaaggatggacaaggcaaaggaactgctgcagacgacggagtgctccatgaaggagatctgtgtcaaaaccggatattcggatcccaactatttcagccgcagttttaagaaaaatgtgggtgtgacgccgacagagtataaggaaaaccggggaaagggacaggaacagggcagtgtataagaaaaagagacggatatgtgttgcgtggcttctggggatgatgttattgctttgtgcctgcggaaatctggaaaccggaaaagatcagggagaagtcgcggaaaatgataaaattcagatcggcatgagctttgattcttttgtcattgaaagatggcagagggatcgtgacattttcgtctcaacggcaaaggagttgggagcggaagtgaatgtccagaatgcgaacggtgatctggagcagcagaaaaagcagatcaattacttcatcgataaaggaatggacgtgatcgttgtgatatgcattgactccaaaggattaacagaggaagtgcagagggcgaaagatgccggcattaagatcattgcttatgacagactgctgcagaatacagatattgacctgtatatctcatttgacaacgaaagagtaggtaccatgatgggagaggcactggtggaaaacggtctggccggcggaaatgtgctgatgctgggaggctctgccgtggacagcaacgttgctatggtggaaaagggctttcgcaaggtcatggaggacaatcaggtgacgatcttagattctatgcatgcggatggctggaaagcagaactggcggggacgtatatctatgatcatatggatattgtctcggaggcggatgccattatgtgcggcaatgatgatcttgcaagcaaagtggtacatgccctgaaagaaaagagactggcaggagatattatggtagtggggcaggatgccgacctggaagcgtgccagcgcattgtcgaggggacacaggtcatgacggtctacaaaccggtggaaaaaatgtcgcagaaggcagcggagtgtgcggtacttctggcaaagggagagccgttgccggaaggagatacggtaaccatagagaatggaaaatatgaagttccgtacattggtctggaaccgatcagtgtggataaaaacaatatgaatgatgtgatcatcggaagcggatttcacttaaaagaggatgtctatctgaacattccctcggaaatgcccaaataatattggatttactttgaaaatggggaaaagagatagattctaaaaacacaataggaaaaatttggtgacaaggctgtgctggcagacaagatattgctagcacagccttgattttgtcaggagagaggatggaaaagtgcagaaggtcataaaatcatgctataggatttgtgatattctctatttagcaacaaaaacaaaccaaacaagggaggttactttttatgaggaagaaattattaagcacacttctggcaacagccatggctgttacaatgcttgcaggatgtggatccaatgggggacagcaggcaaccacaccggcaacggacaataagacagaaacatctgcagaagcaaagacagatgcttccactactaccacaacaggtggcggtaagattggtgtagcaatgccgaccaaggatctgcagagatggaaccaggatggtaccaacatggaagcccagctgaaggaagccggctacgaagttgatctgcagtacgcatccaacgatattcccacacaggtatcccagatcgagaatatgatcaactccggatgccagatgttagttatcgcatctatcgatggtgattccctcggaactgttctggagcaggctaaggaaaaagacattcctgttattgcttatgaccgtctgatcatgaactccgatgcagttacctattatgcaacctttgataactacatggtaggtaccaaacagggcgaatacatcagagaccagctggatctggataacgcagcaggacctttcaatattgagttagtaaccggtgaccccggcgacaacaatgcaagattcttcttcggtggtgcgatggatgttctgcagccctacattgatgcaggcaagctggtagtaaaatccggacagaccgatttcgaaaccgttgcaaccgctaactggtctactgagaccgctcagtccagaatggatgctatcatttccgcaaactatgcagacggaaccaagctggatgcagtgctgtgctccaacgactctaccgcacttggtgttaccaactctctggaagctaactataccggcgagtggcccatcattaccggtcaggactgcgataagcccaacgttaagaacatgatctccggtaagcagtccatgtccatcttcaaggatacccgtactctggcatccaaggttgtagagatggtagacgctgttatgaagggcggcgaggcacctgtcaacgataccacaacttacgacaatggtaccggcgttattccttcctatctgtgtgagcccgtattcgctgatgcaagcaactacaaagaactgctcatcgattccggttactatacagaggcagatttacagtaatttataataacacggatctgtaaggatccttacggcaggcgggcgtttcccgcctgctgtattcatgggtaaagcaagaataagattttaaatgtttgattagataatgtggaaacaagacttgggagggataccattggcaaagatattactggaaatgaaaaatataaccaaaacattccccggtgtaaaagcacttgacaatgtaaacctgcaggtggaagaaggagagatccatgcccttgtaggcgagaacggcgcaggaaagtccacacttatgaatgtactgagcggtatttatccgtacggatcttatgaaggcgatatcatctataatggtgagatctgcaaattcgacaagatcaaggacagtgaggaaaaaggtatcgttattattcatcaggaacttgcgctgatcccctatatgaccatcggggagaatatgttccttggcaatgaacggggacataagtacaaaatcaactggaatgaaaccaatgccagggcggcggaactgttaaagaccgtaggcctgaaggaaggcccccagacattgataaaagatatcggtgtaggtaagcagcagctggtagagattgcaaaggcgttggcaaagaacgctaaattgctgattctggatgagcctacagcatctttaaacgagacagattccaaagcactgttagatttgatgctggaactcaagaaaaagggaatgacatccatcatcatctctcataagctgaatgagatttcttatgtggcagataagatcacagtcattcgtgacggatctaccatcgaaacgcttgtgaagggaaaagatgatattaccgagagccggatcatcaaaggaatggtaggaagagagatcgctgaccgattcccgaagagagagccgaagatcggagaggtcctgatggaagtaaaagactggacggtacatcatccgctgtactcagaccgtaaggtagtggataacgttaacctcaatgtcagaaaaggcgaagtagtaggtatctctggactgatgggtgcgggccgtacggaactggcaatgagcctgttcggaaaaagctatggctccaatatcagcggcgaactgtatatcaacggcaaaaaagtacagctgaatactgtacaggaagccatcaaaaatcatctggcatatgtgacggaggatcgaaagggcaacggactgattctgagcaacccgatcaagattaatacaactctggcaaatctggatgccatcagcagacatactgttattgataaagacaaagagtacaatgtggcggtagactacaagaacaaactgaatacgaaatgtccaactgtggagcagaatgtaggaaacttaagcggcggtaatcaacagaaggtacttttggcaaaatggatgttcacagatccggatatcctgatcctggatgagccgacgagaggtattgatgttggtgcaaaatacgaaatctactgcatcattaaccaactggtggcagaaggaaaatcggttctcatgatctcctcggagctgcctgagatccttggcatgtgtgaccggatctatgtaatgaacgaaggaaaaatagtaggagaactggcgggcagtgaggcaacacaggagcttatcatgtccaagatattatcagccggtaagaaaggagcattggcatgaataaaacaaagggcctcgattttataaaaagatataccatgatcctcgtactgatcgtggttacggcattttttgcatggagaaccggaggagcaatcctgcttcccatgaatgtcagcagtctgatctcgcagaacgcatatgtgtttattctggcaaccggtatgctgttatgtatcctgaccggcggtaacatcgatctgtccgttggatctgttgtatgtttcgtcggtgccatcggagcggtactcatggtcaacatgaaaatgaacatgtggctggctattctgatcatgtttgctatcggtacactgatcggtgctttccagggtttctggatcgcttatgtgagaatcccgcctttcatcgtgacattggccggcatgctggcttttcgaggattaagcaacgtagtcctgcagggtatgaccgtatccattaaggactgcactacattcgtaaatctgttcggtggcggtgctgactgttatattcccgatttcttcggtaatggtcccatcaatctgacctgtgtatttgccggtgtgatcgctgcagtgatctttgcagtgttacagctgaagaatagagccgacaaggtgaaaaaaggatacgaagctcccagcatgggttccacgatcggcaaaatcgtagtgatcgctgcagtgatcctggcattcagctatcgtctggcacagcacaaaggtattcccagcgtattgatctgggtactgattgttatcatggtatatggttacatcacttccaacactactgtgggacgttatttctacgcagtgggcggtaatgagaaggccaccaaattatccggtatcaataccaacaaggtttatttcctggcttatatgaacatgggattcttggcagcgttagctggtatggtaaccattgcacgtatgacttccgcacagccgacatacggacagaactatgaaatggatgccatcggttcctgcttcatcggcggtgcttccgcatacggcggaaccggaactgtacccggagttatcgtaggtgctgtactgatgggtgttattaacctgggtatgtctttgatgggtgtcgatcagaatatgcagaaggtagtcaagggtctggtacttctggcagcagttatcttcgatgttgtatccaaacgtggtggaaaattaattgccaagaattaatttctacatatctaatcaaaagggcccggtgcatatgcgctgcaggcccttttgatggtattgggcggaggagaagagcatgaataagggaaaagaacggaagaagcgggaaggaaagcagaaaaaaggagtcgggatcggagtcaagatcgtgacgcttttactgctgctggcagttgctgcactcagctgtatgggagtgctggtgcagacactgcaatcggtcattgtaaccaacgatgaaatcgtggccggtcaggtggctgaacaggagaaaatctcggagctttccagacagtttacttacattaacgggcaggtgctgacccatgtcatgaccaccaacagtgtgacaatggataatttgtcggataagatcctgcaggagatcactgatatggaacaacagatgacggagttcgaaggactgctgtctgagggggatgcccggagagaggcgtttgacagtgcttctgcggaactggcaaaatacaaaaagaccgtggagagtctgctggtcaccagtgcagagaataagacgcaggcctatgtgtccgccacatcgaatctgccgatgttcaatgaacatattgaaagttatatgaatcagatgctggagatcaccggagagcagatggcacaggcacagggacagatggagcagcgtgcggccagagtgcccatgattgtggtggtggcaagtctggtactgcttgcagtagtcgtggtgatcatgctgggattgcggatctgggtcatcggtccggtgaaatatgctacgaggcaggtggatgaactggtggagggcattcgcaataacagaggtgacatcaccagacggatccgggtgaaatcgggggatgaagtcggcagattatccatggccatcaatgatctggtggcgcagatgcagaccatcataagggcgattaccgagagctgcggacatatggaggaaaaacagaccggtattatctccaatgtggaaaaggtaaatgccaccgcggaggacaccaccaagaagctgggagtgatggctggtggcatgcagtctgtcacggaggctatcggaggggtgcaacaggataccggggtgctggataccacggtggagaacatgctggaggtggcacaggatggacgcaattatgcggcggatatcaaggatagggccggaaaaatgaaggcaacggcggtggcgagtaagcaggaggcaacccgggtgatgaaggagatcgacacggcaatgacggagtccatcgccaacagcaggcagatccacaagatcacggaactgacggaagaaatcctgggaattgctggaacaacgaatctgctggcactgaatgcgtctatcgaggctgccagagcaggagaagcaggccggggattcgcagtcgtggcggaggagatccgcaagctcgcagacagctccagagagtcagccaataatatccaggagataagtaaccgggtagtggaaagcgtggaagaactttccgaaaatgctacaaaacttttggattttatgaataccagagtcatgagagattacgatgctctggaggatacgggcacaaattatcatgaggctgcggatcatgtggatgagatgatgaatgaattccgacagaagatcgatgaactgttgtcggtactgcagaatgtcaatagtgctaactcacagatggaagcaaccgtggaggacagtacggaaaagctggcggtggtaaagaacaacaaccggggattacagcaggagatgaaggatatttcctatgcggtggatgatctgaccggtgcagtgggacagttgaaagaaagtatccgctgttttacagtggtatagacagaaaaaataaaatgcacgggattcccgatggggaattaccgtgcattttgaatgactgcagttacattttaggaattttccggagcgtgatgcagctccagagccagataggaattgtggtattccttgcagtaggtgacatctttgtcaaaccatgcgggagggacgaaagcctctgctgcttctttacttccaaactccacttctgccatgatcagaggggcgaagggggcatcaaaaacatccagctcgatggtcagggaataatctgccggaggagtgggaaagccttctttgaatccgggatgctccagagggatcagatagcgtcttttggagattacgctgccatcggctttttcccgtaaatgataataagatgcctcgttcagcggaagattgctctcatctctggccatcatgccgctgcctttgtaagtgagataatattcatcatcctgttttctggctctgaccacaggattataattcagatatacctgctcgatatgatgagaaggatagctttccagattgtcgggtaaggatttcagggtaaactttcgctcgatttccatagtattaatgcctcgcttctgtaattaagacttaaaaatacttctttagtataacatgattttccttgaaaatacagtgaaatctgcaaatatctgcccatgggaattgaattacgcttccaaattgtgtatactaatcataactgtgcaaagtcagagtatatgacttgcaaatgagacagaaaacaaaacggaaagcgagggaaaaccatgagtatgatagcgatttttctggcaaatgggtttgaggaaatagaaggtctgacggtagtggatatctgccgcagatgtggactgaccattgacatggtgtccattacggaagaaaaacaggtgatgggatcacataagattccggtgactgcggatatgacattgtcccaggtgaattttgaggaatatgattgtctggtattgcccggtggcggacagggaacgaagaatctggaggcctgtgagcccctgatgcagcagatcgatgctttttatgcatcgggaaaatacattgcggcaatctgtgcggctcccagtatcttcggacacagaggaatcctgaagggaaagagagcatgcgcctatccctgcttcgaggatcatctggaaggtgcggctgtgactgcaggccccgtggaagtggacggtaacgtgatcacttcccgcggaatggggacttccatccccttcggactggcgatcgccggtgtattctgtggacaggataaggcagatgcctgcgcccacgctattgtatttcagccgtaagcagctgaagagaaagacgaggacaaagaatgaaaaaagcattaattacaggaattaccggacaggacggctcttatctggcagagttcctgctggaaaaaggatatgaagtgcatggactgatccgcagatcttccatcagcaataccggtcgtatcgaccatctgatccgggaggataagatcgttctccacggtggagatatgacggattctaccagtctggtacgtatcatcggagaagtcagaccggatgagatctacaatctgggagcgcagagccatgtacaggtaagctttgaggcaccggaatatgccggagatgtagatgcactgggcgtgctgcggattctggaggctgtgcgtatggtgggactggccgagacctgccgtatttatcaggcatccacatccgaactctatggccgagtggaagaagtgcctcagaatgagaacaccccgttccatccctacagcccctatgcggtggcaaaacagtacggcttctggatcgtgaaggaatacagagaagcgtatcatatgttcgcagtcaacggcattctgttcaaccatgaatccgagcgccggggagagactttcgttacccgtaagatcacactggcagccggcagaatcgcctgtggtatccaggataaactctatctgggcaatctggattccaagagagactggggttatgcgaaggactatgtggaatgcatgtggctgatgctgcagcacgacaagccggaggacttcgttattgccaccggtgtacagcataccgtaagagaatttaccacactggcattccattatgtgggaatcgaactggaatggcagggtagcggtatccatgaaaaaggaatcaacaaggccaacggcaaggtggtggtggaggtcagtgaggccttttaccgtcccacggatgtggttaatctgtggggagatccgacgaaggcccgcacggtgttgggatggaatccccagagaaccagctacgaggaactgtgccgtctgatggcagagcacgatctgaagctggcaaaggctgaagcggtagtgttgaaggaaaccgcggaataacaggagaaataaagagaggaagtactgtaatatcatggaaaaagacgcaaaaatatatgtagccggccacaagggtatggtaggaagtgctatttgtagagcactccagagaaacggatataccaatatcatcacccgcagtcataaggagctggatctgtgcagacaggatgctgtggaggagttcttttccagggagaagccggattatgtgttcctggcagcagccaaggtaggcggcattatggccaacagtgaggcactggcggatttcatgtatgaaaatatgatcctggagatgaatgtgatccatgcggcatggcagaacaactgcaagaagctgatgtttttgggcagcagctgtatctatccccgtatggcaccgcagcctatgaaggagagctgcctgttgacttctgagctggagaaaaccaatgaggcgtatgcactggcgaaaatctccggactgaaatactgcgagttcctgaacagacagtacggaaccgactatatcagtgtcatgcccacgaatctgtacgggcccaacgacaattatcatcccacccacagccatgtacttccagcgttgatccgccgcttccatgaggcaaaagtatccggcgcgaaggaagtagtctgctggggaacaggaaccccactgcgggaatttctctatgtggatgatctggcagatgcctgcgtgtatctgatgaatacctacagcggcgatgagacagtgaatctgggaaccggcaaggaactgaccatccgggaactgacggaactggtagcgaaggtagtaggttatactggggagatcaaatgggatcccagcaagccggatggaactcccagaaagcttctggatgtcagcaaactggaaagcctgggctaccattatacgacggagctggaagaaggtatccgtctgacttatgaggatttcctcaacaatcccatgcgtgcggaacgctaatggttccgggcacgaacagcgcaggcagacagacggcccgggaaaggatgaagtgaacagaatgaatgattttcggaagacagcacaggagatgctggaatttataagaataagtcctacctgttttcatgcagtggccaatatcggaaggatgctggaggcagcaggctttcagcagttacaggaaaaggaagaatggaaactggaaaagggcggacggtattatacggagcgcaatgattcttccgttattgcgtttgtgattccggaaaaggaggtcggcatcaggggctttcatatggcagcagcccacagtgattccccctgctttaagatcaaagagaagccggaattgaccgtggaggagcattatctgcgtctgaacaccgaaaaatacggcggcatgatcttgtccacctggttggacagaccactctccgtcgctggcagactggctgtgaagaacgggaacggtatcgagggcagactggtgaatatcgacagagatctctgtgtgatccccaatgtggccatccatatgaaccgggaaatgaacaagggtgtggagtacaatccccaggtggatctgctgcctttgcttgcggacgtatcatttgacgaatatgatacacatactacatacgatgcacagaccgcatcggagaatgcggaggaacagccggaaacagtagagaagcccacactggcagcgctggcagcagaagcggcaggcgtggatgctgagacgattctcggagaagacctgttcctgtacaccagacaggaaggaaaaatgataggagcaaagggagaattcgtgttgtctcccagactggatgatctgcagagcgcttttgccctgacgaaagcatttacggagagtactccggcagagtatatcaatgtctgtgcggtgttcgataatgaagaggtgggaagcggtaccagacagggtgcagattccacttttctggaagatattttacagcggatcgcggaaggattgcaggcggatcacagcagctatctgcgctgggtggcagacagcttcctgatctctgcggataatgcccatgcggtacatcccaaccatcccgaaaaagcagatcctgccaaccgcccgtatctaaacggcggaatcgtcattaaatatcatggcagccagaaatacaccactgacggtatttcggcagcaaagatgaaggattactgcgaacgggcgaaggtaccttaccagacttatgccaaccgctccgacattgcgggaggttccactctcggcaatatttccaccgcacatgtatcagtgtccagcgtggatatcggactgcctcagctggccatgcattccgctgtggagacagcaggtatgaaggatacggaatatgcggtccgggcgctgaaggaattctggggcgaatgattttggcagcgggaattcttaaaaaagtataaaaagcgtggaagcacttgaaagttctgcacgaaaagtgcatatttaggatacaggaaaagatacaaaaaagatacgaaagaaggctgaagttatgtttgaaatgaaaccggaatactatattggaattgacatgatcgatcaggagcataaacagttgtttgactatgccagtgaagcatacgaactgctgcaggaagagtttacaccggacaagtatgacaagattgatgcaattctggaaaaactgcgtgattataccgtaaaacatttttcagatgaagaagcgtatatggaatccatccagtacaaaaagatttttacccagaagatccagcatcaggaatttatcaagaaactggatgaatttattgatcagcatgagaaagatgaagggaatcaggatgagcagatcatggatattctgaactacctgacggactggctgattaaccatatccttcatgtggatggacagattccgaaagaggcgtaagacctgacttttccggaatgatttcccacatgggacataagatgtaagaagcggaagtaatggggagtgcccatggaccagaaactggaaaacatcctgaatcttgcattggagaccccggaggaagaacgggaacagacggaaagtctgaatgtcggttacagtgcggagagtcgcagctgggagctgatcgtaaaatatcatggcagtctggacggactgcgggaacagaatattgtggtggaagagctgattgccggatatgcgatccttacggtaccggagacactggtagataccgtatcggagactccggagatcgagtatgtggagaagcctaagcggttttactatcagcagacagatccggacggcgcatcctgctttccaccggtgacaagaagaacgccttttctgaatggaaggggcgttcttttggctgtattggattccgggatcacctgggatctggaggtgttccgcaaggcagatggcagtacgaggatacggtatctatgggatcagacgataccatgggatcagacaattccgggaaagcaggccgcatcacgggagcaggagacgctgcggaatccgacattgccacagaatcagatagcgccggaggaaacgggcgatacgggatatgggaggacaccggatggatttcccatcgggactgaatatacggaggaggaaatcaaccgggcactgaacagcagtgttctggaacggtacggcctgatccccagcagggatctgaccggccacggaacggcagtggcagggattgccgccgggagaagtgcggacggtctctataccggggcagccccggaggcggaactgatcatcgtgaaactgggacttcccagggaggaaggttttccccggaccacggagattatgagaggcgttacttatgcgctgcggaaagccagacagttaaatatgcctcttgtcatcaatttgagcttcggcaacagctacggttcccacgatggaagttctctgctggagaggttcctggacaatgcttcggagatcggcaggacggtgatatgcgtgggcagcggcaacgaaggagccgccagaggacattttgccggcaatataacaagggacggccgcgtggaactggctgtgggcaattatgagagaaacctgaacatacagctatggaaaaattacagcgatgtgttccggataagactgcaggccccgggaggtgagaaagcagaattgtccacaaatatccagggaggaaaatacacgctggaattggaacagactagaatactggtttatctgggagagcctctgccctatgcggtggcacaggaaatctatctggacatgatcccggcagagggaagctacatcaatgcagggatctggacaatccggctggaaccggtagtgaccgtgacaggacaatattatctgtatctcccagcgggaagcggaatcggggagagtaccggattctaccgtgccacaccccaggtgacactgaccattccgtctaccgcagccaaggtgatcaccgtgggagcctatgaccaggtctatgatacctatgcagatttttccggcagaggctatgcagacagtacccgtaccatcggcgtggcagctgcgggactgaccaagccggatcttgtggccccgggtgtgaatatccaggctccggatgtgtacggaagctttactcccgtgaccgggacctcttttgcgacacccattgtcagcggggcagcagcccttttgatggaatggggcattgtacgggggaatgatcccttcctctacggcgaaaaagtaaaagcatatttcaggaaaggagccagaccactgaggggggagactgaatatcccaatgaccgggtgggatatgggaaactgtgcgtggcggatagctttcctgaaaatcagcacaattagaaaaaatggaaacagttccggaagcggatccttgcaaaatagcttaaataacttcagaaaaacctgcccttttgtaactattgtatagaaataaaaagggaatttgtgtaaaaaggtgcattgaaagccacatcttaagatgctactataaacatgaacaatcgtttgcgcataaaatggcaataaaatgatatgaaaaaaacggattgcgcaaaggatggggagaatagtgtgtctgcaatccaaggattgcaggtcacggaaaggcgtgacttgatatgaacaatcattcagagaatgacaaggcgatgacgattcatgatgtagcgagagaactgggggtgtctgccagcacggtttccagggcaatctcagggaaaggccgtattggggccgctaccagagaccggattctcgactacatagaagaacatggcttttatcccaatgcggcagcacagagcctggcacagtccaggaccaataatatcgcaattatcctgccggaggtcaataccctggtggatatcccctttttccatacctgtatgtacggtgtggaagaggtggcgcaggccaatgactacgatattatcgtggtgacgacgaatggaaacgataccagaccgctggagcggctgatcaaaaaccggaaagtggacggaatgatccttaccaggacctatgagaacgataaatatgtaaaattcctgaaacagaagcagattcctttcgttgcagtgggaaaaatccctgacgatgatgtggtacaggtggaccacgacaatgtgggagcctgcagagaactggtgacggtactgtttgccaagggcatacagaatattgcatatctgggcagtgatatggatcagatggtcaaccgttgcagatatcagggctatgaggaagcttaccgcaaaggcaaacgcaagctgaatccggatctggtctacacggacttgagcagcaaggctatggtggaaaaggccgtggaagagctgaaaaagagcggtgtggagtgtattttgtgccaggatgactacatctgcgatgaggtggtaagaaagctttctcacatgggtgtgcggatcccggatcagatgaaagtggcatcctgccattacagtcgtattctggaaaattatccgattaccataacctcgctgaaattcaatatcacagagctgggcagaagatcctgccaggtgctgctggacatgattcacgggaaaacggttccggacaagacacttctggactatgaaatcatcctgaaagagtccacgaagggctgatcttgaaatgacaagacataatttagaaaaacgttttccaaaaaaacttcaaaatacaagggtaaaaattgaatttttgaagaaattggatatacagaaaacccagtaaaatcaatggtttcaaaacgcacttgtacaaagtgcacaattttagatctcaatatcagtcattattataaattgacaacataaggaaatgttgctaaactattattgtagacaagcggttgcgcaatacgcacaaacttgcaaaacaaaacaggaggataacaaaatgaaaaagttagtcgctttagcaatgtcactgactatggcattctctctggtagcttgtggaaactctgatgcttctgcaaatgccggaacagataccacagcaacttctgcagcagcaaccaccaccgaggctgcacagcagaccgctcccgctgagaagcaggacgttaccctgagaatctggggtgctgaggaagatcagaccatgttacagggcatgatcgattccttcaaggagcattatgcagattatgcaaacttcgatatccagcttggtaccgaatccgagtccacagctaaggatactgttttagccgatattgaggctgctgctgatgtgtatgctttcgcatctgatcagctgatcgatctggtaaatgcaggtgccctgcagtccgttgatgaaatggatgcagctctggaagcttatgcaggcaagagcgtagctgatgttaagagcgcaaatgctcccggttctgtagatgcagcaaccaaggacggcacactgtatgcattccctatgagtgctgataacggttatttcttatattacaattccactttagtaactcccgaagatgcacagagctgggataccttacttgcagcagctgataaggctggcaagaaggttggtatgactcttgcttccggttggtataacgcttccttcttctatggtgcaggcttcactaccgcactgaatgatgacggcagcactgctatggactggaacggcaccagcgctgatggcgttaccggtgtacaggtggtacaggctatgctgaacatcaccggcaacagcgcattccttccgatcgctgatggtgacgtatctaaccagatcgcttccggtgatctgtgtgcagtagtttccggtacctgggatgcaaccgcagctcagaccgcttttggtgatggctacgcagctaccaagcttcctacctatacctgtggcgacaagcagatccagcagggctctgtagcaggcttcaaactggtaggtgttaacaagtattctgcaaatgcaggatgggcaactctgctggctgactggatcaccaacgaagacaaccaggcagtacgtttcgcagagagagagatcggaccttccaatatcaacgtagcaggttccgaggaagtttcttccaataccgctattgcagctctgtctgagcagtccgcttatggtgtagttcagattgttggtggtaagtactgggatcccgctgctaccttcggtgagaaagtagctcagggtcagctgaaggctgatgatgaagctggtatccaggcagcactggatgagctggtagaaggtgtttccgtacccgctgaataagtttgggaagatgatctgttccggttctgtgacaaatgaatgatgaaaacgttctggtgcagaacgaatacagagaatagaaaggcgtcctgaagctatgaacaataatacgtagtggagggatgccttttttacaggaaacgtttccggtaagtgggttcgactcctgcctgccgggttaggtaactagtcagatgaacgcgggaaggtgttccgaatagttactaaattatttattttaatattaagaaaggagagggcagagaatgaagaagaaaaagagcggaatcggcggattcttcaaggagttcggtgaggcagttgtaaaaggagatctgttcgtaaaattatccctggtctggatgggagcaggatatatccgcagaaaacaaattatcaaaggtattttaatgactctgctcgaagtggcagtcattgtatttacctttggctttgccacagagtatgtacgtgattttggaactttgggaacggttcagcaggagacggttttcaacattgtaaccatgcagaatgaattcaacgattatgacaactcgtttatgatcttgttgttctccgtagtttcatttgttatctggtttacatttctggtgatctggcttaagaatgaagtgactgtttaccggcttcagaaaaaagcacaggcaggagaacatatcaatacgtttgtagaggatctgcagcagttcaagaatgacaaattctatatcacactgctggcacttcccgtcatgggggtcgttattttcacgatcgttcctctgttgatcctgatcgctgtcgcatttacaaactatgatcagggacatatgcctccttccgctttgtttacctgggtgggatttaccaatttcaagaatctgttcgccaacggtggaatgaccattaccttcggttatgctttccgtaagattttgatctggacactggtatgggcactgttcgcaacctttaccacttaccttggcggtatcctgttgtccttgctgatcaataataagagaacgaagctgccgaagctgtggagaacgctgttcattgtaacgatcgcagttccccagttcgtttccttgcttctggtacgtaacttcttcgctaacaacggtatcatgaacacaatctgtgccaatgcaggaattacccagtggctgagagatatcggcgcgatcagcaccagttatattccgtttttgtccgctcccggatgggcacatgtaatgatcatcctgatcaatatctggatcggtgttccttaccagatgctgatcgctaccggcgtgttaatgaatattccttctgaccagctggagagtgcgaagattgacggagctactcctctgcagagctttattcatatcaccatgccgtatatgctgttcgtcaccggaccttctctggtaacggattttgtcaagaatattaataactttaacgtaatctatctgttgacccagggtgtatataccaccaccaatcaggccatggcgaactcccaggcgaaggaagtggacctgctgatcacctggctgttcaatctgacacagagttattacaattacaagatggcatccgccatcggtattatcgtgtttatcctttgtgcggtatttaccctcattgccttcagcagattcctgaagggtgacagagaggaggcgttccgttaatgaagagatttattaagactttattacataacctgttactggcgtttttggcatttgtctggctggtgcccatcgtatggctggtggtcacctccttcagtgcatacaccggcatgaataccagcacctttttcccgaaggaatggagcctggtcaattataagaacctgttgttttccgcagacagtgtggcacagttcccgaactggttcaagaacaccttcatcattgcatgtgtggtatgtgtgatctccactgcttttgtactgatggtggcctatgcgacctcctgcatgcgtttcccggcacgtaagccgctgatgaacgccgcagttattgtgaatctgttccccggtgtattgtccatgatcgcagtatatttcattctgaagactctgaacctgaccaatacgcacctcggactgatcctggtatattctgccggttccggtctgggttacctgatcgcaaagggcttcttcgatacgatcccgaattccctgcgcgaggccgcttatctggatggagccagtgaggctacgatcttctggaaggttgttatccccatgagccgtcccatcattgtatatacagttatcagctccttcctgtccccctagatggatttcgtatatgctaagctgatgttgaattccggtatttcttcccagtggactgttgctatcggtctgtacaatatgctggataagagcctgatcaatacttactttggtcagttctgtgcaggtggtgtactggtatccattcccatctctgtattgtttgtcatcatgcagaagttctatgtggaaggtattaccggtggtgccgtgaagggttaaactgcttcggcggtttaacctgggagaatccatggaatggattctttaggataaacgtatgacatggagacaaagagttaaatttatggataaatttatcaaaggtatggatgtatcgagtctgccggaggagacagctctcggtgcaaggttttatgacgaaggcaaagagggggacgcactggagatcctgaaaaaatacggtgccaactctctgcgcatccgtctctggaatgatccttacagtgaggacggcaagccttacggagccggtaccagtgactttacaaaactggtggcactggcttccgcaggcaaaaagctgggttacagctatctgctggatctgcattacagtgatttctgggcagatcccggcaaacagttcccacccaaggagtgggcatacgcagatgcggatgcactggagaagcatgtgtatgactacacaaaggatgtgcttttgaaattaaagcgtctcgatctgcttccggagatggtacaggtggggaatgagatcaccaatggtctgatgtggccccacggaaaatgggacaacgttgacaatattgcaagattcatcagtgctggcatccgtgcggtgagagaagtatcaccggacagcagagtgatgcttcatctggactgcggcggcaacaatgcccgctgcagagaatggtttgatgcctatgtacagagaggagaggacttcgatgtcatcggactgtcctattatcccttctggcacggaaccattgatgacctgaccaataatatgaacgatctctctcagagatatcagaaggatgtcattgtggcagaggtatccatgggcttcaccatggaggactatgcagacagggaaaagctgtcaccggaacagcgcaagggcatagcgaccaagccccaccttgcagaggcggtggagtatcctatgacaccggaaggacaggctgcatttatgcagaaggtcatggaacgcattgcgcaggttccggatggcagaggaaaaggtttctactactgggagccggcatggatcccaatgcccggttgtggctgggccaacgaggaatccctgaactatattcaggatcccggtccgggcggaaacgagtgggccaatcaggcactgttcgattatgatggaaatgcactgcccgcgttgaaagtgatcagagactttcagaagtaatgtgatattcgttcccgcaatgcggggaggatgatataatgagtgcaagtgagccaatatgcttgcataattggcgaacggcgaatttgatcatgatcgttgcgaagcaacggtaagcaccgtaggtgcgaatcatgatataatgaagcaaaatcacttgcttgcaagtgtgattttgcgaaatgcattgagtgagctatgctcacgatataagatgccaaatggcgagatggaggaaaagatggataagtttatcgtgaatatcattcaccgtccggagatggttcccgagtatgcggaaaaagtaaccggacacggcaaagaagaggatctgggcagaaaagcactactgacagaatctctggatattttcaagtttcagcaggaaactgcgcataagaatggtttgaagactaccattcagatgacctatgcttccctgttcaatgacgaagcggtagcactggctaaggcagatcacgagaagtacggtgatgagatcgcactgtctctgttaggtctgccctgcacagagttccgtgagaagtacaagaccaaggatttctgtatctggatgttctccatggaagacaaaaagtctatcgtggatgatgtgttctgcaagttccatgagaagttcggattctatcccgaatccaccggatcttactacatggatgcagatctgaccaattatatcaaagcaacctatcctaccgtaaaatgtgcggtagcaacctgttgggaggaaggccccaaggcatatcatacctgcaacaactcttggtataccttcatggatggcggcccctgggcaccttggatcccttccaagcagaatacccatgcacctgcagccaacgaagctgaggacagcggtgtagtagcaatccctcacctgtccagagacctgctggcatgctatgacggcaatggctccaacttcggaacccatcctcagaacgtattgcgtggtatgatctatgacaccaagacctgggagtatccttatctgtacaacctgatcgatcagtatcgttccctggagaagtacaacaacggatacgcatacaacatgatgttcgtaggacccggctggctgaacaaaatgggccgttgggagcagccttacgaactgttgaagaagagttatgaagacggtatgaagtattacggcgacctgaagaaggaaggcaagcttaccgatatgaccatggcggagttcgctgattactatcgtcagaagaagacctacaccgagcctgagtgtgctctgtggagagatattttgtacggttccgacaagcagttgttctggtactgtgatcccttcatgcgtgcctgcgtaaatatggatcagggcggtgctatcgtagacctgcgcccttacgctgcaaagctggagtggccggtaggtatcggcaccaagcatgtgaccgatgcttcctatcctttcctgatccaggagaagtaccgtgcaggttacttcacacattatgcaggagaaggtaccgttagaagtgccaagttaaaacacaacggtgaagaagtggatttgtgcctgtgccgtaccaaggctcatttctctcaggaaggcagcaccagaatcctgacattggatcccgtagatatcgagttctatgatctgaccgtaaaattacagaccatcgtttccttcgaggaaggcagctcagcaatcaagatcgagcgtaagatcctggagatgagcgatccgaacgcagaagtagaactgaacgagtacatcgtagcatgctatggtaccactgagtactctgaggacatgctgggtatcaccctgagcaccaaaaagggtgacgaggtagagactctggattacgagtacaagtgccgtgagatggagaaggcagaggctgacgaagtaagagctgtcattcctcagatcgagaccgcagtatccatgaacaccaatgcagaaggcgctgtcggatatgtgaaggaaggatatgcattctccccgatgtttacactgggttacaattccaaaatcaaggataaggaggtcattgcaacatggctcaagctggaaaaggcaaattaaactacagatgtccctcttgcttcatgagagatatcgatatggatatgttctacgataaggataagaaggaatactactgcctgcgttgtcagtacaggggatccgaggaagatgtcctcaagaaaaatgaaatggcaagattccgttatggcgctatgtatgagcgttacaccaaattcgattttgattgagaaaacggataaagcgattgcataagagcattgaaaaaaggggctgtattacagctcctttttcatatattcatatatgaaaagaaatgaaaaataccttttgtaaaatcaatctgtacaatgggagaatgtgttacatgccttatgataaagcagagcaagaacagaattccaatcgcaaaagccccatgatcgatccatttgtccgataagtgaagaagccggaatttccaaagaggaaaaataataaaaattcccaatactacaggccagagaggatgataataaaaggctgttgtaagatcaccgcttaataggcataaaaatgctctggtcattccacagaaagggcatggaatgccaaaaaagaatagtaaagggcattgatatcctgagaaccacaggaaaagcaggagtagtgcaataatagaaataagaaatatagtttgttttatgtttttgttcatgatcagcaacctataaaaagaaaaaagcttttgtcgtctccggcaaaagctttttttatcctgtgattatgctgtatatttaccgtctacgaatacaacttcttcggaaccggcataagcagcaccgtatgccttggtaagagcaatgatccagtcgaccaggctccatactccgcagccaccggcagtgagaagcttcaaaattccgagaccaacctgacctctgacgaatctatcaacacccaactcaccaagtaaaaagcagaaaacccaggcaaatacatgcttgttaacacgcttttccattagaaagcccctcctttgtattagatgatatcatcattatgatccgttagtgagaaaaaatcaatcaataaacgaaaaaaacataaaattatgtgctttaagggtctataaatagttattagaggaacgttttaaaataaagcgcacattgtatccggattcgtcacagatcccgcggacgatctcttccgcagcatccttgacattgtcgttgatgcagatgatgcaggcatcttttttgcggctgaagaaggaagccttcggccagcggatataataagaaatccggtttttcagcaatgctctctcgatgagctgcttgcaatcgggatcggatacttcgcacaattcaatctcattattaactttcagagtggtatatagcggctgcatgatgtcacctccaatagtattacaaggcgattatagcacagattctttgaaatgcgcaagtagcgcttatacttgacgcggtatccggaagaaggtacaataatacacacggaatatggaaaccgaaacagcccggacgggaaggacagacagatccaaagtacgggcggtaggaagagaaaggagatcatacgatggatattatagagaagatcggtgataccatcaccgaaaagggaaaagtagcggcagacaaagcaaaagaactggcagccattgctaatctgaagagccagatctctacctgcgaggaagtcatgaagaagaactatctggagatcggcaagatctattttgaacagtacagcgatatgccggagcctccttttgagaagcagtgcgagaccattaagaacagccagagagccattgcagatttacaggaaaagatcgaacagctgaaaacaaaataaaacgaaatgacgaaaataaaaacagggttgacagcaatcctgtttttatttataatgcagacataacaacgttatgtgaacgagtgaacatatgatagaataaactcttccatagaaaacatacctgactgcttgcaggcaggggatgctttctatgagaggagtattattcccgaaggagatcgcaatgcccttaaaacaggaaacgcaaaatgagaataaagaaaccaggcagcaccttctggaatgtgccaaaagggagtttctggaaaaaggatatatgaaagcttccctgcggaatatctgtaaagaggccggagtgaccacaggggcgctgtattttttcttcaaggataaggaagatctgttggcagcactggtggaagagccgttgcggcagctgtatgcaataatggaagaacattatgccacagagatgcacaacgaggatcaggtggcacagctggatattgcggatgacggggatctggaagcatccagacagatcatccggcagatgtatgcgaaccgggaggcctttctgctgctcctgacgaaatctcaggggtcccgatttgaaaattgtctggatgaggtcgtggatatctcggagcagcagtaccgcagattatgcgatatggtgacgaatgccaccggaagaccgcgggtcgatgattacatgacacactggatggcccacattatggtagatacttttgtacacctgtttctgcatgagacagaagagagagtggcattgaagcatgtggatgccttgacgatgtatctggtgcgcggatggatgggcataatgacagaaagctaaaatacaatgcaccccaaggaagtttggactttgcaggggtgctgtttcagagcattaacataacagtgttatgttaatgaaaatcattatcattagtgatgaggaggcaggatatgtatctggaagtgaaggatctgaagaagagctatggagaaggcggcggttatgtacaggtattaaagggaatcaccgcaggagtggaacaaggtgaaatgtgtgtcatccagggcaccagcggttccggcaaatccacgctgctcaactgcatcggaggactggataccgtggattccggttccatcgtagtggatggacaggaggtggcggggcttaacagtaaagcactttccaattaccgtcgggagaagctgggttttattttccagttttataatctggtgccgaatctgacggtgaaggaaaatatccaggtttgccagtatctgacgaagaatcctttgaatatggaggaactgctgcaggtactgggactgacggaacatcagaacaagttcccggcacaactttccggcggacaacagcaacgctgtgccatcgccagagccttaatcaagaatccgagccttctgttatgcgatgagcctacgggtgcgctggattccaggacttcccgggacatcctgatactgctggaggatatcaacagacagtatggcactacgatgcttattgttacgcataataattccattaaaaacatggtacatcaggtcattatgatcaaggacggacagatcagcaagaactatcggaacgagaaacgtgttcctgcggcagaactggaggatttgtaggatgcagaggatattaagcaaacgagtacttcgggatatccgggaaaacctgcttcggtatctggcactgtttttcctggtggcactggtcatgtatatggtggtggctattgtgggagctgccgagactattatgcaggggacgaaggagagcggacgtgtccatcacagagaggacggacagtttggcgtttttgttccgctgaccgaaaaagagaccgcacagatcacggaaaaaggtgtgacactgcagagggatttttccctggattttcatctgggacagtccacgtttcgtgtctatcaggcaagagaatcggtagatctgttcgttccagcagaaggggaggaaattccggcacagggagagatcctgttggaacagcattatgcggaaaaacatgagctgcaattaggagatatctttatcgttgggggaaaagagttcaccgttgccggaatcggcagcacgccggattacgatgctgcttttgagaaaacgtcagataccactgtagacagcaatctgtttggcttcggatttgtcacggcagaggattatgaagctctgaaagcaggcggacagaatttccggacggaggattatacttacacctatctgctgaatgataccatgacggatcaggaactgaaggaactgttacaatccttcgaactggaccgcagtaaggtgacggatacttattttctggaaatgctggcagatgcggaagagacgaagaacgatattcaggatggtatccaggaacttctggatggcgtggatgagctggtggacggtgtggatgaactggcggatcataatacagaactgacggatgcggcggatgagttgtttgatgccatgctggaacaggtgaatgacagcctgaaggatgtcggagtggaagtgacactgacttcaggaaattatgaacaacagctgaatgccatgatcgctaatcctcatgcctacactgcatccctgcggcagaacctgcaggacgcgaaaaagtctctggaagatctgcaggagttccgggatggtgtgaaatcctacacggacggagttaatgcagcttctgccggcggcggagcactggtgggcggtatgagtcagatcacggaaaacagtgctgcgttgaatcagggagctgatgctatttttaatgccattttgggcatggtgaatgaacagctccaggcagagttggaaccttatgcggcatacgggatcagctttccgggactgacggctggcggttacggagagcagctggatcagctggcaactgtctttacacagatgggggcatcccaggcagcggggcagctgtctgcagtgaaaagtcagctggacaccgtggcacagtttcgggatggggtgaaagcctataccgccggtgtcggagaagcagccggaggatcccaggagctgttccagggactgagcgtgctttataccgccagtgagcctctggtagacggcacagatgccgtggtggatgcactgatggatatggtggaggcacagctggaagaaagtgatattcaggtagaactgactgccgacaattataaggaagagctggaccagctgatggcagagggcagcagtgtggatgccaggctgcgggattccttgaaggacgcgaaggatactttggaggatctggaggatttccgggaaggaatcatcgattatacggatgccgtggatgagattgcggatggcagcagggaactgcgggacggtgtgcaggaactgcaggatgaagccaatgatatgatcgatgagtattttattttcgatatcgacaatctgacacagtttttggtggcaggggataatctcagaatcgatgccgccagcggggatgtgatcatcaataaatatgccggtatggtatccggtattatcctgatggtcatgttcacttacgtgatctccgtatttgtggtacataatattgaaaaagagagcagcgtcatcggtgcgctgtacgctttgggtgtgacgcgagggcagcttttgttccattatctgctcaatcccatgatgatctccttcttaggaggtgcggtcggctgtgtcctgggcttttcgaagtatggtaccggctggcagatgcaggacagtatcgtgtatttttccctgccacccatggaaatcgtgactccggcctatctgctggtctacagtctggtcatgccgccggtgacggccgcattggtaaactgtctggtgatcagcaagaagttgaagcgcacggcactgtctctgcttcgaaatgaacagaccgcaggcagggccgggaagatacaagatgtaaatctgggaaatatgaagttccttcacagattccaggtccgtcagctccttcgggagatgcgttctgccgtggcggtggtgatcggtatgtttatctgcctgctggtacttttgatctctgcagactgctatgttctgtgtaagaactttggagacgcctgcctggatgagacgacctatgcttatatgtatacttacaaatatcccacggaggatgtgccggaggatggtactccggcttatgtggagagtctgaaaaaagaggcttacggttataatctggatgtgacggtactgggaatcgataaggataatccatattttccggtggagaccagcaataagaaaaatgagatcgtgatctccagcgccgcagcacagaaatttggcgtgaaggtcggtgacaaactagtgctttccgatgaagtgaacgagagagattatgcgtttactgtcaaagatatcgttcattttgcctccggtgtttatgtatttttagaccgggatgccatgcaggaactgttcgatcaggaagacgactattataatgtagtattcgccgatcatgcactggacatcgacaacggcagactgtattctacggtatccagagaaaacgtggaggaaagctctcagatatttacggatatgatgggacctatggtcagcatgctggcggccatctccgcactgatcttcatgatcgtcatgtatctgatgatgaaggtcatgatcgaccgttctgcattctccatttccctgatgaaagtattcggctaccgaaagggagagatccgcagactgtatctggacgggaacttctatattataatgttgggagcattgttgggagtaccgttggcaaaatggtccatggatctgatcttcccgtattttatttccaatgtggccatcggaatggatttacagttcccgccgcagttgtacggcatgatctacggaggcatcctgatctgctatctggtgatcaacttcctgctggtgggcagactgaacaagctggtgcctgcggaagtattgaagaatagagagtaaataagtaagtaaatataggtaacagttcagccatgaacatatctgggcacagaaatcatgcttgcatgattttgcgggcaaatatgttcatggctgaactgttacctaacttttttatataaatacatactaaccctattgacaaactaggaaatataaggtaatatcatctaaaacatagaaaacatatagatttactaggatataaaagacgaggaggatgacaccgtggcagcaacctttgatacgacagaacagagaatccttaagatcatagatgacaaccgggagaccatcgtagagttcgcaagagatatttacgatcatgcagagctgggctacaaggaattccgcacttcgaaaaagttcgtggattttatgaagagcttacagctgccggtacagacagatctggccatcaccggagcaaaagcctatttaaataaagaaaaggccggaaatgcatccctggcattgatcggagaactggatgccctgaggattccgcagcatgcacatgcaaatcaggagacacaggcagctcactgctgtggacatcacgcacaactggcaggagtcatcggagcggcgctggcacttacggatgcagaggtggcacagaagctggatggacaggtgatcttcttcgccacaccggcggaagagtacggtgagatcgaattcaagaatcagctgatcgctgatggcaagatcgcttacggtggtggaaaatgtgaactgatccgcatcggtgctttcgatgatgtggatgtggcactggcgcatcatatttccttagagggaatccggctgggaagcaacagtggcaatggttttgtatccaaggtgatccgtatcaaaggaaaagcagcccatgcggcgggatgtccggaaaaaggtgtcaacgccttatcggcagcaagcctggggttacaggcactggcactgaaccgtgagaccttccgggatgaggattgcgtgagggttcatccgatcctgaccaagggcggagatctggtcaatgtagttcccaacgaagcggtgctggagacactggtaagaggcaagaccctggaggctttcgcagatgcatccgtcaagacagatcgttccttcaaggcaggagcacttgccatgggagcagggtatcgtatcgagactatgccgggctatcttccttctctctggcagtcggcaccggaagagatggccgatgcggtgaaagcactggtaggagaaaaaacggtatacgaggtcagaccggaggaacacagcggaggatccacagatgtgggagatgtacagcatctgcttcctgtgatcactttcaataccggcggtgctgtaggtggtctgcaccaggtggatttcgatatcgtggatgaggaagaagcctatgtgctgacagcaaagatatttgccctgagtgcttacagaatgttaaagaatggcgcggaagtgacgaagcggaccaaacaggaatatcatccgagattcgctgataaacaggaatacatagcttttatggacagctttaataaggtggaggaagcggacattgagtaaagcagattataaaatagaaggaacggttcccagagaactgttggtaagtgaagtaagaaaggccgcaagacagttcgccatgcagttctttcatttcagcaaagtattatatgaccagttcggactggagaagaccaaagatatcgtgagacagaccgtattcgaactggcagtggaccggtcggatcagctgcgggaaaaggcactggcgcaaggcctgaaggcagattccgtagaagactttatgagtgttatcgaccttcccttcaccggatggatcccggaatggggagaagatcactgtccctatgcggaagtgtggagaacttattttgacaaatatccctggttccgagagatcgcaccgttttactgtgatgtgatcgataccaccaccattgagaatttttccaggtgtctctcccacaggatcacacagaatgtcatcctggaaggtacctgttgtaagagagagtactttgaaagcgataaggtgaagcgaggagaatacacttatggaaaaaaagaagaaaactaagaataagaaacgttttacctgggtgaatctggcacagctgctcaccgtggcggcactgcttctgtggatgcaatgggcagtagattccggcagggtgcttacgatcttcgtggcatccccgacttccatcgtggaagagggcattaagatcattacagacggaaccttatggccccacttattgctgacgatccaggaggcactggcaggttacctgtccgcagtggtagtcggtattgcggtaggtctgttgtggacactgtttccggtatcggagaaatacatgaatgtgttctgttctgcgatcatggcagttcccaaggtagcgattctgccgctgttgatcctgtggttcggcatcggctttcagtccaaggcatttctggtatttctgttctcggtatttacgatcctgtacaataccgtgaccggagccaaggagtgtaaaaaggaatacctgaaggtcgcaagggtctttcgggccaaccgtttccagaccgtatttctggtcatcattccggcggcactgccgtcgatcttcaacggattgaagctggcagcggcaacggcactgaccggtgtcctgttctcggaaatgcagtcggcgagagcgggactcggctatctgctgacagaatcccagaacctgttgaacaccccgaggatgttcttcctgatcatcctgatcaccttattatccgtaggtgcggtaaaactgatcgatgccatcgaatatgctatcagctatcgatggagacatgtataagcaaataaattttttcaatagacgaggaggaaaatgttatgaaaaagaaagtattcagcgtattactgacggtggcactggcaaccggagtactggcaggctgcggcagcagtgcagcaaccggcaacaatgcagcaaccggaaccgcacagaatgagggaagccaggcagcaagtgcaactaccgcaggagaggaatccggagacaccatcgtgatccgttcctgcttcgctaccggaatgaccggtgcggtgaaccgttttgccattgaaaagggtctgtataaagagcttggtattgagttcgaaaacgtagaggccagcgctgataccaactccacagtaatgtccctgatcaccagaggagagatcgatgtggcagacggagatcccagttcttatatccccggtatctacaacggtgtgcctgccaagctggtaggaaatatgtggagatattccggatgctactggctggtggcaaacaatgatatacaggacttctccgatctggaaggcaaaaaagtcggtaccgcaggagcttccggcggaatgcgactttccgtattgaagatgttggagaagaacggtgtcagcacggataacgtggatctgatcgccaacggcgtataccagaccgcttatgcatccctgacttccggcgaagtggacgctacgatcattcacaacccgtatgcggcactggctgaggcagacggcaccggacatatcctgggaagagcctgggactacatccccgactactataccggaacgatcatcgcaagcaacagctttattgaaaatgagccggagaagctgcagcgcttcctgaccgcttattatcaggtacatgaagaagttaagaatgactatttcgacgaatttgttgcatgggcagcaaaagagatgaatacatccgaagaggttatgagaaaggccatcgagtcggaaatcgatgtatggctggattatccggtaatccccgaagatcgtctggctaccacctttgaatatctgaaggagtacggctgggtagatgaaaatgtcagctacgaaggaacctacaccaacgaattcgcgcaggtagctgcagataccctgggaatgaccgacccggaagcaaaataattgagaatgctctgaaaataagagacacaggaaacggaggtaatggaaatgcccgcaatatccattaaaaatatcaacaaaacctatatcgatcaggatggaaacgaagtacaggcactgcatgacatcaatcttgatgtggcagaaggtgaattcgtctgcatcgtaggtcccagcggatgcggtaagagtaccctgttagagatcgtggcgggcctgctggatgctacaagcggcgaagtattgctggatggacagccggtacacggtaccagcagagatattggcgtggtattccaggatgcctccctgtttccctggagaaccgtacggaaaaatgtggcattcggactggagatcgccggagtacccagggaagagagagaagaacggttaaggcgttatatctccatggtcagcctgaacggttttgagaacaaatatccggcacagctgtccggcggtatgcggcagagagccggcatcgccagaacccttgccatgaatcccaaggtcatcctcatggatgagcccttcagtgccgtggatcatctgaccaaatgcactctgcaggaggaactgatcaatatcagacaggcagagaacaagaccgtattattcgtcacacacgatataaatgaggcggtgttcctggcagacagagtggtattgttaagtccaagacccagtaccattcagaaaatctacgagattcctctggagcagaagagggggcgtaatgatcctctgcttttaaaaattgcagcagaaatcgcaaaagacatcaacagcggtggacaggatattcccaacaactattggggcaacttataggcggagaatacagagaataaggaggcagcagtatgtttcgtgacaccagtatggattacctttccagagatgaagtacttgagatctggaataacaatatgcgtctgacagacgagcagcttttagccatggatgagacagaattccgggcaagagtgagagaacgttcccatcataccttggagatccaggtatatgccaccgcatatcgccaccagaaattaaaacccaaccaggcagattatacgaagcatctgctggaactgtgggagaaaagaggattgggaaaaaatctgccggaatatcggtatgcctctttcctgatcgatgcggcggagaaactggtaaagggggaagacgtggatctgacaccttacaaacctacgccggtgacggaacagatggagaaagactttttcacgattgtaaaggaacgcagaagcgtccgggaattcaaggacaaggaagtaccggatgaactgatcgataagatcctggaagcggggctttgggctgctcacggctgtaatatacagtccatccgctatgtggtggtacgggagaaaaacgagccgggactgttccgcggcagtgacgtgccgggaggtccggtgcatctggtgatcttacaggatatgagatgctacagagccaactcctttaccccggtgagaaatcagctgctggatgccggagccgccggacagaatatcgttctggctgctcatgcggtaggattagagggggtatggctgacgttccccggagaggaattctgcgacagactgcggaagaaattcaatctgccggattatatccggctggtgacctatgtggatgtaggatatggtgatcagactccttatccgccgcagagatgggatgtcaaggatacgatcctcggaagatactaaaacgattgagcggaatagaagatcagataggaatctgactgtaaatgggtgcgataagaaggagacctgaatatgaacattgtgatcattggcggcagccgcggcatcggcaaagcggctgcaagggaactgttacaggatggacataaggtactgattgtcggcagaaatccgaagactttggaagaaaccggaaaagaactggcaggagcagttacctattcctgtaatgccggtaaggcagaggaaaccactggactggtggatgcagtgaagaacggtaaaatagtgggattcggagataacgtggatggactgatcctgtgtgcggcggtatttcccaatccggccacgaagacatccgtagtacagccggagccggaggaactgcaggcaatgcttgacagcaacgtgacggcatattaccgtctggtgaaggaatttcttccgctgctggcaccgggcagccgcatcgtactcatcggttccacttcgggaatccgcagagacaggggcggcatctacggcatttccaaatgggcgctccgttcctatgcctatgccctccgggaggaatgcaagcctatggggatcggcgtatccctcatcaatcccggcggcacctttaccgagaccagaaagaaatcctccgaagaggacaggtcacttttagagacctctgacctcggaaaagtcatcgccctgactttccgtctgtccccacaggcagtactggaggaagtgaatatccgacctttacagggagatacctattaggcagtcgatggactgccttttttcttcccaaggaaactcattgaatgttaaaaaaaagtatggtatgataaagggcagaactgacaaagatacgagaatcacggaggtttttagatacaatggaacagtacaagcaggaatttattgaattcatggtggattgtcaggcgttgaagtttggcgagtttaccttaaagagtggcagaaagtctcctttcttcatgaacgcaggtgcgtatgtcaccggttctcagctgatgaagctgggcgagagctatgcgaaagcaattcacgatacctacggtgacgattttgatgtattgttcggacctgcctataagggcattcccatcagtgttgtaaccgcagtggcttacagcaaattatacggcaaagagattcgttactgttccgaccgcaaggaagagaaggatcatggcgcagataagggaagcttcctgggaagctccttaaaagatggcgacagagtcatcatgatcgaggatgttaccacttccggcaaatctatggaagagaccgttcccaaggtaagaggagcagccaatgtagagatcgttggtctgatggtatccctgaaccgtatggaaaagggtctgggcggcaaggtcagcgcactggaagagatcaaggaaaagtacggatttgatgcacatgccatcgtaaccatgcaggatgtcatcgatcatctgtacaacaagccttacaagggacaggtatacattgatgatacgctgaagaaggcaatcgacgaatattatgctgtatacggtgcttaagcagacggcttcgaaagttttggatagaagacaggaggattccatggaagagaaaatctataagatcatgcgtggagcaggtgctctgaatattgtactgggagtcatttccctggtagtcggaatcgcggcaggtgtgttgctgatcatcagtggcggcaagctggtctccggcaaatcacgtattctgttctgatcacaaataagaaggaaaacgtcgtcagggcgtgaaaattgggcatttccataccggaagtgcccttttcgggttccatgggggattgcaggttactgaaaggcttgaaaatagtatgcggaaaaagaactacatttttacgaataaaaaacattccaacagggcgatcatgtcgaccatcctggggggcatcagtctggtgtccctggggatcgtgacgtatctgtcctacagtcagggcggcgtgatgcacggtggatacggtgttaccggtgtgttggccaccatctattccctgatcggactgatcctgggaatactgacccttcgggaaaaagatatctatcgtatctttcccgtgctgggaacaatattaaatgttgttgcccttggaggtgtcagctttttgctgtatctgggaagccgtctgtaacggatattctggaacagaagcattggatcacacagcagttatttagatagaaggagcaatcagatctatggaagaaagagaattattactggaacgtctggaactggccttagaccggatccgggagatccccggggaggactggcaggaagaaagcctgcagcactggaaagaatattttacagcggtagcaaaatttttactgctgatcgaggataccagacagttcctggagcagggaaaacagaatactgccactttggaagagctgaaacagcgtaaccatgccctgtatgaagatattttaccggaaaattatgagaacagctttgctaatcctgcggtagctgtaaagtgtctgggagaagaattcggcgcactggccgccttcctttatacggaaatgcggagcctgatcggttttacctatgagggaagactggacgaactggtgatccgtatggaactgttttctgaggtatatgcggcatttgtatatgaggagcaggagaatcacagacttccgtcttatgcgtccatccgtgagatcctttactggttcgtcagcgattacgcggatgtggcggcggaagcacgggtacgggaactggtatgcccggggaataattttgcggcagacattatccgaagggcggaactgaccgatctgcgttatctctatgcctatggagaatacgtgggggaaaatgaactggcaatggcgaaattcctgaattccctgccggaagagaccataaataccatggcagacacttataccgaggggtaccgcatcggttttgaagtgaccggcaaggatctgtcgaaaaaagctgcggtggatgtccgttatcagctgggcttcgaacgcatgatgcggagagctctggagaattttgacaaaatgggattgcagcctgtgatctaccgtgcagctgccagtattttatataatccctccatttataaaaacggcttctacagtgtcagccccaacagacagtatgagttcgatcacaaggatgacaaggcactgttcttggataaaatgtattgcagccggaaactggaagtcatgcataccgcttttgaaaaatataagacagaggccagaggctatgcgggcccggccgtggtggagaccttcggtgagaaagatttcgcaccggtgaacaagccggaagcggtgaaaatgacggatgagcagagcgctcttatggtggagcaccgcacccagatgggacagctgcagagacagtatattattgaggaagagcgcagctttacgattattgcgttccccatcccggaggtaggggactgctttgaagaacttttccgggagactattcggatcaacaccctggattataaaaaatatcagaggatccagcagaccatcatcgatgcgctggatcaggcagaccactgtgaggtgaagggctgtaacggtaatcacacggatatcacagtgaatctgtggaagctcaaagatcctgccaaagaaactatttttgaaaactgcgtggcagacgtgaatattcccgtgggagaagtatttacctctccggtgctggaaggcacaaacggtgtgctgcatgtgacaaaagtgttcctgaacggcttggaatataagaatctggagatcaccttcgaaaacggcaggattaaaaactacaactgtgctaattttgccacggaggaagagaacaaggcattcattaaggaaaatatcctgttccgccataagacactgccgctgggagaatttgccatcggtaccaacaccacggcttatgtggcagcaaagcgtctgggcgtggaagccaggatgccgatcctgatcgcggagaagatgggaccgcattttgcagtgggcgatacctgctattcccatgcggaagaggtgaaggtatacaatcccgacggtaaagagatcgtggccagagacaatgaggtggccgcccttcgcagtgtgaacccttccaaggcttattttaactgccatacggacattaccattccttacgatgaactggcagagctgaccgcagtgaaaaaggacggcgggcggatccccattattgcgaacggcagatttgtccttcccggaacggaagaactgaatgagccgctgcgggagttggattaaaactattcagcaagcatttgcagaaagcaattttgcatggctctgaatagttatcataagatttcataaaaccattgcatcattgaaaagattttagtaagataaaatatatatggataaaatcggtgtaaccgatacatgaggaggacattatggcaaatacagagaattgccctaaggttggcattgtaatgggtagtgattccgatatgcctgtgatggcgaaagccgcagacattctggaagaactgggcatcccttatgagatgaccgtgatcagcgctcacagagagccggatgtgttttttgagtatgcaaaaagtgcggaggaaaaaggcttcaaggtgatcattgccggagccggtatggcagcgcatctgcccggcatgtgtgccgctattttccctatgcccgtcatcggaatcccgatgcacaccacttccctgggaggcagagattctctgtattccatcgttcagatgccctccggcatcccggttgccacagtagccattaacggcggcgccaatgcaggacttctggcagccaagatcctggctacttccgacgcagaacttctcggaaagttaaaagcatacagcaccaaattaaaagaacaggtagaagccaaggatgcaaaattgcaggaaatcggctacaaagcttacctggaaggcatgaagaagtaaggtttataaaagtattatttattcaga

SEQ ID NO: 5702 - DNA, 17897 bp, Unknown
  gut microbiota DNA sequence
aatggattacaagaaagctggagtagacatcgaagcaggctacaagtctgtagaactgatgaagaagtacgtgaaggagaccatgcgtcccgaagtaatgggcggtatcggcggtttctccggagcattttccctgagtgccatcaaagacatggaggatcccgtgctcctgtccggaaccgatggtgtaggtaccaagctgaagctggcatttttaatggacaagcatgataccattggaatcgactgtgtagccatgtgtgtaaatgatgtggcatgtgcaggtggtgaacctttatttttcctggattatatcgcatgcggacgcaatattcccgagaagatcgctaccatcgtaaagggcgtggcagagggctgtaagcagtctgacgcagcactggtaggcggtgagaccgcagagcatcccggactgatgcctgaggatgagtacgatctggccggatttgcagtaggtgtggtagagcgtaaggatctgatcaccggcgagaacatcaagcccggtgatgtactggtgggaatcgcttcctccggtgtacattccaacggtttctccctggtgagaaaagtattcgatatgaccaaagagagcctggatacctattatgacgaactgggcaagactctgggtgaagcactgcttgctcccaccagaatctatgtgaaggctatgaagtctgtgaagaacgcaggcgttaaggtaaagggctgcagccatattaccggcggcggtttctatgagaatattcccagaatgcttcctgacggcatccgcgcaattgtgaagaaggacagctacgaagtacccgctattttccgtctgatgcagaaaaagggtaacattgctgacgagatgatgtacaacacctacaacatgggtcttggcatggtgctggcactggatcccgcagatgtggacaagactctggaagcgctgaaagcagcaggggagaccgcttacgtggtaggtacctgcgaagccggtgaaaagggtgtgaccatatgttaagagtagtcgtactggtatccggcggcggaacgaatctgcaggcgatcattgatgctatcgcagcgggcaaggtcaccaatgcgcagatcgtcggtgtcatcagcaacaacaagacggtgaagagcctggagagagcacgtaatgcaggaattcctgcggtatgtgtgtctccgaaggattatgagagcagagaagtatttaacgatgcgttgcttgcaaaggtgaaggaatttaccccggatctgatcgtgctggcaggcttcctggtgaagatcccggaggctatggtgcatgaatacagtaatcgtatcatcaatattcatccgtctctgatcccctctttctgtggtgtgggatactatggacttcatgtgcatgaaaaggcactggagcgcggtgtgaaggtcaccggagccaccgtgcattttgtgaatgaaggcatggatgaaggccctatcattgcacagaaagcagtggcagtggaagatgatgataccccggaaatcttacagagacgtgtcatggaacaggctgagtggctgcttctgcctcaggcggtggatgacattgccaacggacggatctgcgtcgtagacggcaaagtaaagcataacaaatgagtaactattcagagccaatgggcgaagtaatcaccatgagcaaatagcatacaaacatgttattcaggaaagcctcgcagaggcggttttgcgaatgggggtgaatagttacggaataaggagaaacataatatgggtatgaaagtattgatcgtaggtggcggtggcagagagcatgccattgcaacctgtgttgcaaagagtcctaaggtagataagatctattgtgctccgggcaatgccggaatcggtcagatcgcagaatgtgttcccatcggagccatggaatttgacaagatcgttgcttttgcgaaggaacaggccattgacctgaccatcgtaggtatggacgatcctctggtaggcggactggtagatgcactggaggcagagggcctgcgtgctttcggaccccgtaaaaatgcagcaatcctggagggcagcaaggctttttccaaggatcttatgaaaaaatataatattcctaccgcagcctatgagaatttcgataatgcggaggatgccatcaaatatctgaaggagcaggcaagtttccctatcgtgctgaaggcagatggcctggcactgggaaaaggcgtactgatctgcaatacgttggaggaagctctggcaggagtggatgagatcatgctggacaagaaattcggtgcggctggtaatcgtatggtcatcgaagagtttatgaccggaagagaagtcagtgtactttcctttgtagatggcaagaccatccggatcatgacttctgcacaggatcacaagagagcgaaggacggcgatcagggactgaataccggcggtatgggaaccttttctcccagcccgttctataccgaagaagtggatgcattctgcaagaaatatatttaccaggctacggtggatgccatggcagcggaaggcagacctttcaaaggcgttattttcttcggactgatgctgacaccgaacggtcccaaagtactggagtacaatgcaagattcggtgacccggaggcacaggtggtactgccccgcatgaagaacgatattatcgaggtcatggaggcttgtgtggacggtactctggatcagatcgatctgcagtttgaagacaatgctgcagtctgtgtggttctggccagtgatggctatccggtatcctatgagaagggttatgtgataaacggactggagaagttcaacggaaaagacggctattattgtttccatgcgggaacgaagctcacagacaagggaatcgtgacaaacggcggacgtgttctgggagtgacagccaagggagctaccctgaaggaggcccgtgccaatgcctatgcggcaacggaatggattaccttcgagaacaaatacatgcgtcatgacattggcaaggcaatcgatgaagcgtaagacatgtcaggatacagaaggagttgcagatgaaaaagacagtacagagaacaagtaaattcaaggctttctggggaatgtttgcattggtgcttgtgctgggagcaggactttttgccgagaatctggcgtttgtcagccatgcggaaagcgcagccaaggtaacagcatccagtgcaaagatccgtaagagcgcggattcttccagtgaagtcatcggcagtgcggcaaaggataagaccatttccatcaagagccagaccaagggagcagatggctatacctggtatgaggtatatgtggatgcgaatacgctgggatatattcgttccgatctggtaagcattaccgacggatctaccccgccgtcttcttcaactacgaccaccacgacaactacaacgacgactaccgcagcaacaccggctccggcagtgaatgaaacaccggtggatgtcacagcggtggagcctgtaagtgctaccgtgacgggcggacagtcggtgcgtgtgcgcagcaatgcatctaccacgagccagatcgtaaccacagcagagaacggaatggctctgaccgtcaccggacaggctaccggtacggacggcaatacctggtatcaggtgaatttcatcgccaacaataccgaagtgaccggatttatccgttccgattatgtggcgttatccggagaactgcaggcaccttccacagagcagcctgcggaagaacagccttcggaagaacagcccgccgagaatacacagaccacttccaaggactgggatacccagttgcagggagatgcgtggtatctgttagatatggtaggacagaaacaatacaagattgatgatctgttcagctctattgaccagattactgagatcaatgcgcagtttgagaccaatcagaagaagatcaccagtcagaaggtcgtgatcattattcttgtcattcttctggtggcagcggcggcagcagtcactctgctgatcttcaagatcaaggatatgacggatgcggctgatttctctgatgcggaggaagcagcacttcgcagaagaagagtggacagaccccagaccggcagaggtcagggtggaagaccggcacctcagggcggcagaacccagggtggccagaaagtgatgcatgaagtgggagcagagagacgtcccgcaggaaagcccgccggacagggcggcagaccggtgcagggacagagaccggcaggccagcaggcaagacccgcgacacagggagccagacctacggcaccccaggccggaagaccggcaccgcagggaaccagacctgcagcaccccagaccggaagaccggcaccgcagggaaccagacctgcagcaccccagaccggaaaacccgcaccgcagggaaccagacctgtagcaccccagaccggaagacccgcaccgcaagtagacagaccggtaaaaccggcacagaataacggtaatccgcaggatcccggttggaagtccaagaacttcatgtccgatgatgacgagttcgaattcgaattcctgaactgggacggtgacgaagaacaataggaataaacagaccggaaacggcatcttacgagagtgggatgccgctttctttttaaaattttgataaactttcccggtctgcagttgacagcaccgccctcactgttataatagacgtataacaatcggtgacagtgggaagggagtgattttgatgataatagagatagatttcaatagtgatgaagcgctctatatgcaactgcgcaatcagatcatcatgggaattgccacgtcacagtttcatgagggagattccctgccgagtgtacggcagctggcggataccatcgggatcaatatgcatactgtaaataaggcctatacggttctgaagcaggagggctatgtcaaggtcgacaggcgaaagggagccgtgatcgctctggatgtggaccgtatgcgtgcggtggatgaattgcggaaggaactgcaggtaatacttgctaagagcagctgcaaaaatatttccaggcaggaagtacatgaattgattgatgaaatttatgaagaatatggaggactgaattgatgcagtcacagtttacggataaagcgcagaatgcgcttgcccaggccggcagatgtgccagaggcctgaaacagggctatatcgggaccgaacacattctggtggggctcctgaaggaagataccggtgtagccgcaaaagtgttggcggataacggagtagaagtggatcaggtcatggaaatgatccgggatctgatcgcctttgaaaacggtgtggccgtgaaggacaaagagggatattctcccagagctgcccggattctggaagaggcacaccgccaggctgcccgtttcggacagaagcagaccggcacggagcatctgcttcttgcactgatcaaagagggcgagaatgttgccgtgcgtctgctgaacacgttgggagccaatgtgcagaagatctatgtagataccctgatcgccatcggacaggacggcaatctgtacaaggaagatctggggaaaaagggagaccgcaaggcgaagcagtctacactggaacaatacagcagagacctgacggctctggccagagaaggaaaattggatcctgtggtaggcagagaagaagagatccgcagagtagtgcagattttaagtcgccgcacgaagaacaatccctgtctcgtcggagaacccggtgtaggtaagaccgccgtggtagaaggtctggcagcccgcattgtggcaggagacgtaccttttaccgtgcagaataagagagtactgacactagatttgtcgggaatggtggcaggaagtaagtaccgtggcgagttcgaggaacgtatcaagaaggtattgaaggaagtgacggaggacgggaatattattttattcctggatgaacttcatacgatcattggtgccggaggtgcggaaggcgccattgacgcttccaatatcatgaagccttccctggcccgtggagagatccagctgattggtgccaccaccattgcggaataccgcaagtatattgagaaggatgcggctctggagcgcagattccagccggtgactgtggaagaacctacagaggaagaggcggtccgtattctggagggcatcaaaggaaaatatgaggatcatcaccatgtgcagatcaccccggaggccattgaggctgctgtcagattgtccagccgttatatcaatgacagaaatctgccggataaggccatcgatctgatcgatgaagcttcggcaagcgcaagactgagtgcattggatgccccagataaagcgaaggagatcgctgaccgtatccacgagatggatcaggagatggagagagctatccgcatggaagcatttgaccagatggcagagatcaagaagcagcaggatgcgctggtgaaaaaatatgaccgcctgatgaaaaagcgggagaaacaggaagcgggcaatgttatcagtatcggtgagaatgagatcgccgaggtcgttgcccagtggaccaagatccccgtacagaagctggcggaaaaagagagcgaacgactgttaaaactggagaagacgctgcataagcgtgtcatcggccaggaggaagcagtgaccgcagtggccagggccatgcgcagaggccgtgtgggtctgaaggatccaaaccgtcccatcggctccttcctgttcttaggtcctaccggtgttggtaagacggaactgtccaaggcattggcagaagctatgttcggctctgaagatgccatgatccgtgttgatatgtccgaatacatggaaggccattcggtctccaagatgatcggatcaccgccgggatatgtaggctttgaagaaggcggacagctgagcgagaaggttcgccgtaatccctactctgttgttctgtttgacgagatcgagaaagcgcatccggatgtatttaatgttcttttgcaggtactggatgacggtcatatcacggactccaagggacgcaaggtcagcttcaagaacactgtgctgatcatgacttccaatgcgggtgcacagcgtatcgtggatcccaagaatctgggctttgccacagagaagagcgagacaaaggattacgagaagatgaaatccaatgtcatggaagaagtaaagcgcagcttcaagccggaatttatcaaccgtattgatgatattatcgtgttccaccagctgaacaatgagaacatgaaggagatcgtgaatcttctggcatccaatctgtacaagagatgtgaggatcagttggggatccatctgaccatcacagcagcgctgaaggagcatctggtatccaaatatgcggataacaagatgggagcaagacccttgaagcgtgcgatccagtccgtggtagaggatgctctggcagaggagatcctgcagaaaaaggtggtaccgggagataaggtatccgccggattcaaggatggaaaagttgtatttaccgtgaaaaattaagtatttgtaactattcagtcactcaatttgcaaaatcgctcttgcagagcgttccttttgctcattgaggttacttcgtcctataaattatgtcaaaggttcttacgaatgcaagcattcgacgtacctatgacacaatttacatgactctgaatagttacaaaataaataaaactttttgtagaaaaacagggtgagatatattatactgtaactattcaaatcccattcgcaaagaacgaaagagaaagatgtattgcggatgcagttactttcaggaggacagacagatggcagtagtggaagaaatacttcgcagtgaagcagacggatctatcagctttggtaatcacaagctggccaagaaggcaaaagtggaagattatgagcatgcaggagatctgctgaaggttaagacctacaatgagatgacaaagctggaaaagaacggcatgtttttatatgaatctgttcccggaaccagtgtactggagttcaaggaagctgacaacagtgtggagttcatcgtagaaggtgacgaggattcccagatcactgtaggactgaaggacgataccgagtacgaagtatttatcgacggtaagaacgtaggaaccatgaaaaccggacttggcggcaaactgagcctgagcgtagaactggaagcagcaggtgaagtacctgttaagatcgtagaggcgtaaggacgcactgcaaaggagtccaggcacggaggatattgtagtacttcgtgactgggctttttttaaatattcagagtttcctgaggcgggtttgcgggggctgaataggtattacaatgattgaggagagagcatggcaaaaggaaagacggccactgtatttttctgtcagaactgtggctatgaatccacgaaatggctgggacaatgtcccggctgcagagagtggaatactttcgtggaagagacgatagataaaacggaattgaaaaataccggaaacggtgcaaagagagacaggagagaggcttcggagccctgtgtgctgtcggagatcgctatccgggaggaaaataagactctcaccggaattaaggaactggaccgggtgctgggaggcggcattgtgcagggatctctgacgctggtaggcggagaccccggtatcggtaaatccacactgttattgcaggtctgccataacttatccacggcgggacataaagtattgtatatttccggtgaggaatccaaggtacagatcaagatgcgggcggaccgtctgggggctttttcggagcatatgctgctactgtgtgagacgaatctggatatcatcagtgaagtgatccgcaagagcaagccggaggtcgtgatcatcgactccatacagaccatgtacaacgagaacgtgtcggcggcgccgggaagcgtgtctcaggtgcgggaatccaccggtattttgctgcagctggcaaagggactgggaatctcaatcttcattgtaggccatgtgaccaaggaaggtacggtggcaggtcccagagtgctggaacatatggtggataccgttctttattttgaaggggacagacatgcgtcctaccgtattctgcggggggtgaagaaccgttttggatctacgaacgagatcggtgttttcgagatgcgggaaacgggactggcagaggtcaagaatccttcggaatatatgctgaacggacggccggagaatgccagcggctctgtggtggcgtgtaccatggagggcaccagaccgcttctgatcgaattgcaggcactggtgtgccacagtaatttcggcatccccagaagacagaccaccggtacggatttcaaccgtgtgaacctgctgatggcggtattggagaagagatcgggagtgcagctgtcctcctgcgatgcctacgtgaatattacgggaggtatcaagatccaggagccggccattgatctgggaatcgtgctggcgattctgtccagcttccggaataaggcattgaatccgaaaatggtagctttcggagaagtgggattaagcggcgaagtccgcgcggtcagcatggcaaaacagcgtgtggcggaggcggagaaactgggcttcgaggaatgcgtggtgccctacgtgtcactggaagagtgcaaaaaaggaagcaaaatccgtgtcatcggcgtcagctccgtgcaggatgccatggaccgattgttctaaagaagctttttagcatttcattatgaggaggacaaagatatggccgtaagaataggaattgatatcggcagcagtaccaccaagatcgtagcttttgaaggagaacatatgcttccgcccatggcagtcaaggcagacagccaggtggcatccctctacggtgctttcggaagatatctgtatgagaataatctgcagcttttagatgtggaaggtgtctatatcaccggcgtgggaagcaaatatgtggagaaagcggtatacgatcgtccgacctataaggtagatgaattcgttgccacaggaaccggaggctattatctgacggataaaaaggaagttatcgttatcagtatgggaaccggaagctttttcgtcaaggtgacggagaatgagatgaagcatttaggcggtgtcggcttaggaggcggaaccatctgcggactgtcctcgatcatactgaataccggggacatccatgagatcgtccctctgtcccggaaaggtgatgtggcaaagatcgacctgcggatcggcgatctggccaaggaaaagctccccggcctgaacctggacgtgactgcgtccaacttcggcaaagcggatgcccagtccaagcccgaggacatcgcggctggtatcgtccatatggtcatcgagaacatctgccaggccggaatcctggcctcccggaacaccggcatcaaggattatatcctcatcggcggcctgaccaaattcttcgagtgccgccagatcatcgaagacttcaagagcctgtgggatgtaaagattactattccggagtattctgattatgctaccgctattggggcggtgattgcgccggatgcggagaaagaggagatttgagaaataaaaaagtaagagggattgatttctcaatccctcttggtgtataatctatttagaaagtaagtcggaggtgaaaattccgatttgccctcagtaaaatactagaaaagaaatagcatctactttggcgaggggatgctatttctttttgttattatcgtcaccatgtctgtcaatgtatgataaagctgcaaagacaactaacaacagagtaagtacttccatcgtattcatgggcatcaccctcctttgtaagactagagggcatctaacaatcggaaaatcgcatccgctttctgttcgattacacaaatacagtataacataaatcgaacgtatgttcaatatcatgatgaaaaacattcctgttaattcacattaaaataacaccccatcatggcgtgattcttcagatcgcgccatggtgaggtaaaaagtgttaccaaaacagaaaataaaaaaagccgataacatcgacttttgaaagcaggggaagaggggatcgaacccccgttaacggttttggagaccgccgcactaccgctgtactattcccctatgaaattgtatcagctgaatcactgacgaaagctattatagcatagatgtttatcatttagcaagtgaaaattttaaatttttgcaaaaacttttgcaattccggggaaaaccacaaagaataccttataacacaattaaagcagccgcaggcgggaaacctgcagccactttaattgtgtaaaaggggaattcttccggaaatctacttatataagcggttcggctctcgccgaacatcctaagtatattacacatttcggcttttgtctactatttttttgcataaattttacaaaaaaagattgtgttatgacaaaaacggtgagaggaaatgtatataatcagatacatagggggaaaagcttgattcccgccgcagatttcgtgtaatataggtagtaaatgagtatgagaaagtacggcagataagggctgtacggaaatgagggaaaatatggaacagcattttaataccccggcagaagtcattgataataacatgaaggccggagagggcaaggcacatcttcctctgggcaagatgatcctgttaggcattatggcaggtgctttcattgcactgggcggagctaccagcagtactgcggcgcatgctattgacaacgtaggtctggcccgattcgtagccggtatcatcttccctgtgggactgatgatcattgtatttgtaggtggagaacttttcaccggcaactgcctgatcgtcatggacgtggtaggcaaaaaggtgacctggttcgaatgtatccgcaatctgatcgtggtatatttcagcaacctgatcggcgcgctgatcattgataccctgatctacttttccggaaatctggactacaccggcggattgctgggggcttatgccatcaaagtggcagtcggcaaggtaggcatttctccgctgaaaggaattacctccggtatcctgtgtaacattctggtatgtattgcgatcctgatggcagcggcagctacggatatcgtcggtaagatctgggcgatcttcttcccgatcatggccttcgtagtcggcggtttcgagcactgtgttgcaaatatgttctacattcccgtaggcatgatggctgcacagaatcccgcgtatgttgcaaaggcacaggaagcatacggcctgaccgcagagcagatccagggactgacagtactgcacagcctgaacaactttattcccgttaccatcggcaatatcttaggcggaatggtattcgtaggaatcccctgctactttatttataagaagaagtggcagaaatggcatgaggaatccaagaacgcataggacgggaaagtaaatacagagcggaacagaagcagcttgggataatgataagatccccggctgctttttgcttatacgatgtaaccggtatagctttatgtctgcacaggagtttgcaagggatgaaccggatatggattttcagaattataaacgaaatattaaatcgcatttttacacatgtaatataaaaacattagaaaaacggagataaaacgagaaaataaaagaaatagttatttaaataacggtgaatgcgtttgaaaaactcggcatataaaactaatataaactatagaaattagcactcgataaaaatgagtgctaacaaatgaaaaagagtaatatgatatttaaatagttataaggaggcagttgtcatgagtttgaaacctttaggtgacagagtagtattaaaacagttagttgcagaggagactaccaagtccggtatcgtgctccccggtcagaataaggaaaagccccagcaggcagaagttgttgctgtcggccccggcggtgtcgtagacggtaaggaagtaaagatggaagttaaggttggcgatcaggtcatctattccaaatactcaggaaccgaagtaaagctggatgatgaagagtacatcatcgtaaagcagagcgacatccttgcaatcattcagtaattgcaaacctaaaaagaaattaagactaagaacaaataaattggaggctgattattatggcaaaagagattaaatacggcgcagaagcccgtgcagcattagaggctggtgtaaaccagctggcagataccgtaagagtaaccttaggacccaaaggaagaaacgtagtactggataagtccttcggcgcacccctgatcaccaacgatggtgttaccattgcaaaagagatcgagctggaagatgcattcgagaacatgggtgcacagctggtaaaggaagtagctaccaagaccaacgatgtagccggtgatggtactaccaccgcaaccgttctggcacaggctatggtaaatgcagggatgaagaacctggcagcaggtgctaaccccatcatcctgagaaaaggtatgaagaaagcaaccgcatgtgcagtagaagccatcggtaagatgagccagaaagtaaacggcaaggagcacatcgcaagagtagctgcaatctccgcaggggatgaggctgtaggacagctggttgcagatgctatggagaaggtaagcaacaacggtgttatcaccattgaagagtccaagaccatgcagaccgaactggatctggtagaaggtatgcagttcgacagaggttatatttccgcttacatggcaaccgatatggataagatggaagctgttctggataacccttatatcctgatcactgacaagaagatctccaacattcaggagatcctgcctctgttagagcagatcgttcagtccggcgctaagctgctgatcatcgctgaggatgtagagggcgaggcactgaccaccctgatcgttaacaagctgcgtggtactttcaacgtagtagccgttaaggctcccggctatggtgacagaagaaaagctatgctggaggatatcgcaatcctgaccggtggtaccgtgatcagctccgagcttggttatgaactgaaagataccacaatggatatgctgggtcgtgcaaaatccgttaaggtacagaaagagaacaccgtgatcgtagacggtgaaggcgataaggaagcattacagtccagaatcgcacagatcaagaagcagatcgaagagaccacttctgatttcgacagagagaaattacaggagagactggctaagctgtccggtggtgttgcagttatccgtgtaggtgctgctaccgagaccgagatgaaggaagctaagcttcgtctggaagatgctctggcagctaccagagcagccgtagaggaaggtatcatctgtggtggcggttccgcatacattcatgcatccaaggaagttgccaaactggcagcaagtctggaaggtgatgagaagaccggtgcaggcattgtcctgaaagcactggaagcacctctgtatcacatcgcagcaaacgcaggactggaaggcagcgttatcatcaacaaggtacgtgagtctgaggtcggtgtcggtttcgatgctctgaaagaggaatatgtagatatggtaagcgcaggcatcctggatcccgctaaggttaccagaagcgctctgcagaacgctaccagcgtagcaagcacactacttactaccgaaagcgttgtagctaatatcaaagaagacacccccgcaatgcccgccggcggcgcaggcatgggcggaatgatgtaagcgtcaggaccgcttcgacgcagccgtgctaaaaagggagcacactatgcaagctagcttgcaatagtgcgcttcttttttagtgcggatatggcgaagtccagcggatatcgcatgaattgcgaagcaatttatgcgataagccgctgctgcgtcagatccccttgactctcccccaaaaacctcttaaacttatctcaaacacatcaaagaaagaggtatacccttatgaatcgttttgaatacatcgtagaaagcattgacggcgattatgcccatcttcgcagaacagacatcgaatccgatgaattaaagctggtggcccgcgcgctgcttccgcccgagatcatggagggcacgaagctgttatacgagtggatgcagtattccattatggaataattatgccaaattttgaaatgtccggagaaaacgcaatatttgtcataaaataaaagggaaactggcacgacaggagagttggtaaagaatacacttatagtatgagcgtggtacacgcagctttgcgcaaatagaaagactaatacatgtaaaaaggagactccctatgagtgaacctagaacttatcataaccctgtacaacgcggttttttcccggatccttcggtgatccgtgtcggtaacgattattacatggtgaattccagtttccagtattttccggcgatccccatttcccattccagggatatggtacactggcatattatcggtcatgccatcacgaatccggaatggctggatctcagcgacatccgggattcccacggaatctgggcaccggatattgaatatgtggacggaaaatactatatctatgttaccttacgcctgaatgcggacggcaagcgtgataacaacgtaatgcgcagacaactggtgatggtgtccgacaggccggagggtccttatagtaagccggtatgtctggaagtggacgatatcgatccgtctctgttcgtggatgatgacggcagcagatatatgatcattgccaaggcagcacaggcggttcccctgacggcggacggactggcagtggcgggtccggcgaagaccgcatgggaaggcacgggcgagcgttgctctgaaggtccccatatcatgaaaaaggacggttattattacgctatcgtggctgagggtggcaccggttacggccatggcatcaatgtgggaagaagtaagaatttctacggtccttatgagtgttctccctataatccggtcatgcgtcagaaggaccctgcggcacccattcagagagccggacacggcaagctggtacaggatcagaacggtcagtggtggtgttattatctctgcggaagacctaacgagggcaactatactaccgtaggcagagagtctgctctggatcccgtacagtggacggaggacggctggtttaccgtcaacgaaggaaaaggccccagcctgacacagattgcaccggatcttcccgagtgtatctacgagagaaacttatttgatgattttaacgataccaggctgaatctggaatgggagttcgtgcgcaacccggataacggatcctggtcactgacggaacgtcccgggtattacaggatctggaccagagacggacagttgaatgagatccgtgcgaaaaatacgttgttacgcagagaacaggagttgtcctacgtggcagagacgaagctggaattctacccggataaggacggagaacaggcgggactgacctgctactacagtacagccacctatgccagatgctctctgtgctatgagggcggacggaagatccaactggtcatcaaccgcaaccacggcgaggagctggtggcggaagtggaccatgtgaaggaaggcgctctgtatctgaaagtagtggtggagaagctgaccagaactttctattacagctatgacggagagaactgggagcaggtcggagttctggagaactgcatttacctctgtgacgagggtgttcccgatgatcctaaacgccataccggtacgctggtaggcatctatgccaacaacggaggctgtggaagccgcaaagcagcggattttgactactttaaatatgaggattagacaaaaaagaagtcctgattttggctaaaagtgcgaaaaactcgcaactgtaagaaatctgtttgccaaatagtcgaaataatggtagaataattatgattcaaaatgtaagagcttacattatggatcgacaggaacaaatgcaacgcatagtttcatacatctcttttcaaaggatcccgggtgagcagcccgggatcttttgtgcatctgaggtttgtgcatccgaagcagtctggaatagaaaataatagaaaataatttcaaaaaatttataagattttgtcgaaaactgtcacgtatataatgtagtgaggttttaacatgactaaagacgaagaaatcagaatgataaatgaaaaactggattttttatgtaatggaggcaagtgatgaggagttcgataccgaagaggtacgcaaacttgtgaagcgattagatgaattggatcccataccattgccgtggaaatcggatgaggaagcattgaaagacttctgggattattgtgaagagagacagagggaagaacgtataatagcagagatgaaaattaagggctgagaagtcagtgcctttggaaaaagtatgtggtaaaatatatatacgagaaacgaaatgctgcaagaattgccagacgtaggtcaattcatcctagctatggatacttggtttgaaaaactgatggagaaataatctaggaaaatagtttaaagtttacatgttatgatcatgtatgaagttggaacaaaataaagattgtgctatactattgttcaagaaaaaaactcattgacatatttcaatctatttaggaggataaacgatcatgtgtacagcagcaacttataaaacaa

SEQ ID NO: 5703 - DNA, 514 bp, Unknown
  gut microbiota DNA sequence
aagaaataatctaggaaaatagtttaaagtttacatgttatgatcatgtatgaagttagaacaaaataaaagaattgtgctataatattgttcaagaaaaaaattcattgacatatttcaatctatttaggaggataaacgatcatgtgtacagcagcaacttataaaacaaaagatttttactttggacgaaccctcgattatgaattctcttatggtgatcagatagtaattacaccacgtaattatgcgtttaattttcgccatgttggcgatatgaaaaatcattatgcaattattggaatggctcatgttgcagaggattatcctttgtattatgatgctatgaatgaaaaaggagtggcaatggcaggactgaattttgtcggaaatgctgtttatgccgcgattaagccagatgtggaaaatattgcacagtttgaatttattccgtggattttaagtcagtgttcttctttagttgaagttcgcgagcttcttgaacgaattaata

SEQ ID NO: 5704 - DNA, 21969 bp, Unknown
  gut microbiota DNA sequence
cttacatcgagacatgtgtatcgcatgctccgggagttcgtggattttgccaatgtatttaactaactctcaatttacttaaagtactgtaccccggattcaaagatcttcatatcctgctcgccatagatgttcatggccacagcggtatctcttctctcggagtgcgccatcttaccgaggcatctgccatcgggggatgtgataccctcgatcgcacagtaggaaccgttgacattgtattcctcatccatggatacattaccgttctggtcagcgtactgggtagcgacctgtccgttagcaaagagcttgtcgatccattccttcggtgctacgaaacggccctcaccgtgggatgcgggattgcagtaggtagcacccagtgtagcgccctgtaaccagggagacttgttggatacgactttggtgtataccatcttggagatatgacggttgatggtattgaaggtcagggtaggtgaatcctccttctgaccggtgatttcgccgtaaggaaccagtcccagcttgatcagagcctgaaatccgttacagatacccagtgccagtccgtctctctcatttaacaacttcatgaccgcttccttcagcttctcattctggaatgctgttgcaaaaaactttgcgctgccgtcaggctcatcacctgcggaaaagccgccggggaacatgatgatctgtgcctgtgcaatggacttctcgaattcctctacggattcgcggatatcctctgcggtcatgttacggaacactcttgtctccacatgggctccggcacgttcaaatgccttggtgctgtcgtattcacagttggttccggggaataccggaatgaatacggtaggctttgcgatcttgtgcttacatacataaatactgtctgccttgtaaacattgcttgccactgcctcggtacccttcactgccttggtggggaataccttctccagcttggaagtccaggaaacaagtgcctcttccatggtgatcttcacatcaccatatacgaatgcaggctcctcggtcacggtaccgatcacggtgtaatccagttccttctcttccagtgcagccatcttgtctgcggggatctctgccagaatatcgcccagtccgttgtcaaacaggtcgtctgtggttacctcatcgtcgatcttcacacccagcttgttaccgaaggccatctttgctacagctgctgccacacccttggaatccagagcataagcggatacgatcgtaccattttcggtcagttcgtggatcttgccatataattctgccacattctcatacatcggaatgtcgaaatcgtctttattaatagagaaacgtaccagcttattgccgggggtcttcagttccggagtaataatatcgccgtattttgccacgtccactgcaaaagataccagtgtgggaggtacatcaatatcattgaaagtaccggacatactgtccttaccaccgatggagggcagcccgaacccgatctgtgcatcgtaggcgcctaacagtgctgcgaaaggctggctccaacgctcaggatcgctggtcattctgcggaagtactcctggaaggtaaagcggatcttgctgaaatcaccgccggaagccacgattttcgccatggactctgtcactgcatagacagctccgtggtaaggactccaggaggacagatacggatcgaagccgtaactcatcatggtcacggtatcggtcttaccttccagtacaggcagtttggctaccatggtctgggtctcagtcagctgatattttccaccgtagggcatcaatacactgccggcaccaatggaggagtcgaacatctctaccagacccttctgggaacatacattgaggtcatttaacagtgccacccaggcacccttcacatcgccctcttccagtttctcacctacagcgggaacagcccatttatcaaaataattctcttcttcggaaggaatatctacttttactttggtctcctgatgggcaccgttggtatccaggaaagctctcttcagatccacgatgggcttgcctctccagttcagtaccagtctgggttcctcagtaacaactgctacgggaacagcctccaggttctcttcctttgcatagcccagaaaagtatctacatccttaggatctactaccactgccatacgctcctgagactcggagattgccagttccgtgccatccagtccggcatatttcttgggtaccttgtccagatctacggtcagaccgtctgccagctctccgatggcaacggagacaccgccggcaccaaagtcgttacattttttgatcagacggctgacttcctcacgacggaacagtctctggatcttacgctcggtcggtgcattacccttctgtacctcagcaccacaggtctcgatggaagtatcggtatgtaccttggaggatccggtcgcaccgccgcagccgtcacgtccagtacgtccgcctaacaggatgatgatatcgccgggatcagaggtctcacggataacattcctgcggggagctgcgcccataacggcaccgatctccatacgctttgccacataagaaggatgatagatctcttttacaaagccggtagccagaccgatctggttaccataagaggaatagccactggctgcgcctcttaccagcttcttctgggagagcttgccgtgcaaagtctcggatacaggaacggtaggatccgcagcaccggtgacacgcattgcctgatatacatagccacggccggacaggggatcacggatggcaccgcccagacaggtggcagcaccaccgaaaggctcgatctctgtaggatggttgtgggtctcgtttttgaaaaataccagccactcctcagtctctctatggtcaccgtaatccatctccacgggaaccactacggagcaggcattgatctcatcggattcttccatgtcatccagtttgccgtcttttttcagctttctcatggccatcagtgccagatccatcagacagacgaacttgtcctctctgcctttgaagatctcttctctggtatccagatagctctggtaagtggtctctaagggagaacgataataaccctcaccgaattccacatcggtcagctcggtggaaaaagtggtgtgacggcagtgatcggaccaataggtatccagtacacggatctccgtcatagaaggatctctcttctcatcatcatggaaatatttctggatatgcaggaaatctttgaaggtcatggcaagtcccagagattcatacagagcttttaaactgctctcgtccatatctctgaagccgtcaaaaacagcaacatcagcgggatcatcatacaccgtgatcagagtatccggcttctccatgccggtctctctggaatctacagggttgatacagtaagatttgatcttggaaaattcttcgtcggacacctgtccttcgatcatataagtcacagcggtacggatcacaggttcttcgtcctcttttaagaacttcacacactgcactgcggaatccgctctctgatcgaactgtccgggaaggaactctacggaaaatacttttgcatccgcaggaatctcgatggtctcttcatacagatcatctacgggaggctcggaaaatacagtcttgcaggctcttgcaaacacctcatccgaaatattctccacatcatagcggataaactcacgaacctttgccacatcgatacccagataatttttcagttcgtcgtgcagctcttttgccttgacggcataaggttcctttttctctacatagatacgtcttacgttgctcatgtctctcctccgaaattttatactatgcgacactattcagaaccccattcgcaaaaccacatcttgcgatgcttactttttgctcatgtggttatctcaccatataaatatcatcagatgcccttacaatgcgagcctttgacgtacatatgattatatttacatggttctgaatagtatcatacaacatactatattttcccacaatagcagaaaacaacaaatttagatagattttacctgcctttttgaacggttcgtcattcatgcagtctgtggatcagccggtaagcgatgtccttctcgcagatcagggcctccgtgtgggcgaaaaatacgatgccgtccgtgggggccagaatcttctccctcaccgttccatcgtaagggtctataatttctgccatctcatttccatagcgcacatcgtctcccgcatgtacttttccccggaaaattcccgcccggttcgcaggtacatcactcagatccttttcatatataacatgactgatatagccggaatgactctcgtaccggatcagccccatacgtttcaggaaacgtaagaccgctgccaccgcctgtcttgcactcacctcatcgatctgggtattctgattcgtgtataccgaaaaggcggccgtcatctcatcctgccagttataattcagtgtcttggtatcgatgggtaccggcttgcgcaccaccacataaggaagtccgaacagattcgccaacgacgtattctgatagcctgtctccatcatacgcacatggggcacgaactctcccggtctgtaaaaggacgtaaactggatcccataaacgtaatcccggatctccgtaagcaacgcattggtcagacggtccgccggctccccgtaatcatttcccggaaaactccgattgatatccgcttccttgacaccgaaaaagcggcggctgatattcacggaataggcattgatggtaggaatcaccagaatctgtttgccggcactgatacagccgttgttttccagttcccgcagtgccttcaccagttgggaacagatatacatctgctggatctcattgcctctggctgcgcccacgatgcaggcagacttctcgcccttgccgaactgaaagcccttgatgcgcatatcttctctgtaggtcgaatgtatggtataaatatctctctcaaacataatcttttcactccgtcaggatccgcgccagcagatctccttcatagaccaccggataagctctcagggtaaacaacagcccgccttttgcggtacggatctgctgcttcaccgtcccttcaaatggatccaccacttccccgatcagatctccttttttcacatagtggttgtgctcgatcagcggcaggaacacaccgtctgacttgctgcggataaactccacctcaccgtcactggatatcgcaggctcctgcacctttggctccgggcctgtccagatccccatttcactcatgatgtggaaaataccgtccacgatctgattaccgaaggatctgtggatatcatgcccctgtcccatctccagcaccagtgtgggaactcccagcagattcatggaatgggccagcgtcgattcatgcaccgtggcagtggcattcatccagatcatgtcggcattggtcattttcgcatagggaagcagtgcctccgcaaaatcttcactgagtcgtacctgtgggatctcacgcacaaaaatatcactggcgtgcagatcgatacaaatatcggatccgatcagggaatccaccacagttgccgtgatccgctccatcatatcccccgatgcgtctcccggaaacatacggttcatatccatatccagtctcggcaccgtccggctggccatgtcgattcccagcggattcaatgccggatagatatctacgattcctttcaaatactccggatgctcttttactcttctcgccgtctcataacagatgtactgtccctccagttcatccccgtggatgccggacaccagactgattctggataaattccgttcttctccctccggacggatccggttcctgcggattgccagatgtcctcccgccggaagttccatgctgatgatcgtttctgtcatacttaccttttccctctctttatctctttgcagcttttctacacagaaaatgcttcaggaaactttccctgaagcatcatcacccgttgtcttattaatcttctacacccaatccgcgcaacagatacaggatctcacgatccaccgcttccgccgtcacgccgatggtctgggccgaaatcttcagtccttccagcacaaacataatatttctcgcagttccctcacagtcctcgcagataaactctccgttatccacacctgcctcgatcagtttttcaatgatcttcactgcggaatcaaactgcttttttaaaatattgtctctcttgggcagttcgttttcaaaatagaattcataggtagcctgcgtcagtgtatttttcttgcgcagaagctctttcttctgctcctttaaaaacagaagcaggatatccgctgcggtagcatcctccgtaatactgtcggaaaatacgtcatccgcctcctcactctccatgcgcagcacttccatgaagatctgactggtattctcaaaatataaatagagtccgccacggctgatgtcgcaggcctctacaatatctttcatcgttacttttttgaagcccttctccacaaatacttctctggctttctctacgatatatcgctttttctgtactgatttttctcccatggatctatcctgcctttccccactcaaagctttccgttcgccggtgtcttatcccagaattcaatgatctcctgcatctgtttcagtaccagataaaagatctgctccgataccgcctcgctccacagatttccctttgttctgccgcctaagacatattttgacaggattcctctgaggatatcccattccttccatcctgctttctgaataatatcccgctcctcctgatgagtgcggatccggtgtcttgtgtatacataggcatagttgcgatccatcaggggacttttcgtcgcttccctgacgaaattcaggagagtcccgtcatataccggaaaagacacggaattcactccgatatcctgtccgctgtagatagagctggctctcttgccggcgctctgctccagccagggcaggtagggaagtaacggcctcactgcctgcttatatgattccagcaactgctctctgtattcactgctctgttccataaccccaatatacctttccatgtaccgttttctaccgaaaacatcgcttttttcgtctgtcaatgtaaaagtgacacatatgtagttttattttatcacatttctatcaaaagtacagtagaaaattgttggtattatggtgtataatgtgtattaaatatttgtatgataagacgaggtattggaatggctggaatcgtattggagaaggggaaaactatatatagctatgggcagcccatgactgcattgcatctgattaccaacggtaaagtagatgtatcatatcccggcggctcttatactctgggaaagggagacgtgatcagtatctgtgagatctgctccgagatccatctgctgggctataccacgttggaggatacaacgatcctgacgtatcccctgaccagtctggattccctgaatgatattctacagaagcacccggacgtagcacgtctgttctgtctgtcctgtttccgtcagatcaatattctgctgaaccgcagttccatttcggaattgaactgcagtgagctgtatcgtactctgacagatgatattgccacctacaatacactgtgtagccgttaccgtctgcaggcgagatccctggaacatttcgatgagctgaatgcttttcttggggatgattcaccggacatctggctgaacggctattacatgggcttaagcagaatcctggcttcggacaattaccggatcctggtacaggagtcggatctgtcccttggtatgctgcgtaagggaagtctggacttccgccgtacttaccagagcctggaggaacagttccactatctgcagcaggtcggttccttctatttccgggaatccggcaacgatctttttgatttttatacttctttgttctataaactgggacaggataatgaagacagcaaggcggtctacgaccgcattcatcgtatgctttctaaggccggcgatctgtccttcatcgatcaggaactgtttgcctccagatcccagaccttccagagcagcctgaatctcatggaatccaaggattccgctgaggcaggttcttccggagattccgagatccttggcaagcttgccggatcgctgaacactattctggattacgccggttcggatctggataccgtgaccagcttccgtcagcatgtccacgcttacaagctgctgtccgaccgggcttcccaggatcaggatgtcgctcttttacgcagacagctgaccgaagaattttatctgctctactccctcctgttcacccagacgctggaacagccgaacattcccatgccggtcaaaatgtttctgtatttcggttatgtggatgaggagctggccggtctgaaaaatgcagtcaccctgtaccgcatggcagaagccatgtcggatcacagcgatatcggtgtctataccttttatgactggctgatggccatcttccgcgggaagaaatctcccagccggaacgaatttgaccaggattattccgattatattcacaaacaaaaggtcggtggcaatattacggatgcagagctcaaggcattggagaacaatcccatggccaaggtcaattacgagctccggaatatgttccctcaggtcaacaagatcaccttcggacggatcactactttctgtccgctgttctgcgcagatgatgtgctgaaggatctggaaagctcctatgtcaccgtttcccgtgtctcccagattctcgaggagatccgccgggtagattacacggcattctatagagaaagtctggatatggagcacatagatgtcatgggtaaggagacaattcatctggaatatctgccggacatcatcctgatgcccaacgtcggtatccgcggtgtcatgtggcaggaaattgagggcaagcgccgtaacagccccggtcgtatggtcttctccattttccatctggaggatctgaagacgaccttcacccacctgaccggtgaattccgttgggagctgtgcaagagagtccagggtaaccgctggaacgatgtctccatcagttccctgaccagtgaatatttcgattatatccagttctaccgcaagaaccatgatctgagtacagaggccaaggaaaaggtaaaatccagcctgcagcgtgccaagaacagtttcaaggaaatgttcgtaagggattatatgatctgggtgctcttcgaaggtgccggatccccgagactgaacaaagtagcccgtcagatcatgttcacctactgcccgttcccggaggatatttgcaatacgctggctcagaacccgttgtatgccgatcttctggatcgccgtaagatcaagatagcccaaggcttacatcatctggatgttctgacccgaaagctgcaaaacggtaatattccggttcccgagaccgtggcacaggaacgctattatttaagtggcagcaaaaaagcatagcacatacatatagcaaaaagattcactctccacccggggaatgaatctttttgttatgttgtcttatttgctttcagataccttatgcgtttgccagctgtttgccaagttctctacactctgacaggccatcctcgtccggtgtctcatggcagatcaggccctcaccgttcaacacagtagctcctgctgcttccatacgggtgctccagtctctcatccactcaccgtctccccagccataggaaccgaacagtgcgatctttttgccggaagcaaagccttccacatcacatacaaaaggctccatctcggattcctccaggacttccgctcccatcgcgggacagcccagtgcaaacttgggagcagcctttagttcgtcaaggttggcgccggtcacaaatactacctccgcttccttcccggcttcccggataccctctccgatggcctctgccatagcctgggtgttaccaccctgtgtccagaatactacataaatcttatccatttatttttccttcccttccgcacctttccgtgcctgtttctatgctgcggtacatccgcagatatctatgatttctgtcatctttaatccataatgcaacagctggatcaaattttccctggcatattcatatttttcaaaaagtctctgttttccttctttatccgcatatactttccaataaccggtgcagaggctgttcttcccctgatgtctgataaatccttccacatcctccgggggatatcctaacagcaatcccagttcgtgggggaacggcttccctctctctgcataggtttcataacgatcgcaaaataccggcaaaatatcctccagtcgatcggattcgtaccctgcctcccgcagtagtttctgtacctgcggcattttcagatacttttccagccggtcttcccgatacaacagtattaccattttctcctctgtctccaacaagggatacagggaaagcacactgccttcaacgatccttcccacctgtgtaaagccttccggggaaatcgtcagcagattggaaatcttaagtcccgtgatcaacggtgcacactgcaaagccaactgtagttccacatcgtctgcttccatttcacacaggatctcccacgtttcctgactcaatcagcgcttcacctcctgccatccaaaagtcacttagttagttgtagctaacctatataaataatatagaaaaaagcagttcccgtcaagggaactgcctgatagaaattctcaacatataaactttcaaaatagctttggggatttccattctcagatctttctgcggtccagccctgtactgcgatagtattctgccttgtcctgatacatccgtctctcggactccgtcagtaaatgatcctttcccacggcttccagagtgttcaccgctgctcctactgccatggagacatcatgagctgccagctctgtttttaattcctccaccttttgatagaattccttttcagaaattccggtgcacagaaccaccagttcatctccgccgatacggaacattccatttccctcaaatacacgtttcaggcagtcacagcacctgcggatcaggcggtctccggcggaatgtccttcactgtcattgatccgttttaatcctgtaatatcacagtataccacgccgatgggctcggtatggtccacctgctcaatgtacctctccatagcataacggttccccaatgtcgtcagcggatccgaatagctcatcacttccagctcccgtaccagatttctctgcttcagggacgatacgataaagtgtcccatgatctgcagcatctccgacacaaattcaaaatatctggtcgaaggattgtctactccgtagaagccgattactttcccatcatcataaagcggaaccaccaccagggaatgaatattctgtcttaccagaacttcatacatcttcggatccacatctttcatttcttccagattctctgtgacaatactctgattctcatcaaacttccgataccattccgcgaagatctccggcggtagatcctgaagggtatccttttccggtaagactcccttggctacccattcgtatgtattgtggtcatgatcgtggtcatccttttcaaaaatataggcccgtcccgcttccagattctttccgacaaattccagcagcacctgcagtgtctgatccatgctctcctgccgctgtgccacacggatggcttcattcaacgcagcctccatattacggtaatcttcggatttgtgccctctctcattcagattgccgcaatctatggcgatttccatacggtattttctcccgtcttcttctaccagtgtgtccttgatatgaagttctcttcgcagcagcggattgtaatattcccattccttaaaaaaacccggctttaactgttcattattacacattccacagggcagagaatttccctgcaatatctcataacactttaacccgatgatctcttcaagactttgaaatccatagctcttcagagtcttcttgttcatatatatcaattcatgagtctctgcatctgccacatatacatattcacccagattctcgaaaaattcccatattttactcatatacaccaacctgcttccgtattcttccccttattataactaatcagtatacacttgcaaacgctttacggcaagcctgttctctcaaaaatgtctgtaataatctcacatcatccgtgatcacaccgtccgccccacagtttacgatccaaagcatggcaccggaagtattggctgtccacccgtataccgactttccgcagtaatgaatggcatctaccatatccaccgtaagatttctcccctcgatgctatagctgtcggcatagtccagctcataatcctcttcttccagatcatgggcaataaaaactgttgaaatccccggttccagctccttcattttctgcaggattcccttgttcatggagcctataatacactcatccaccatatcatagtcctgcagcagagtcagcacgctttcctccagtgcatcctcctgtccggtatatttcagttcgatcatcagagtgatcctgcctctggcacaggcaagcatttcttccagtgtcgggatctgttctccccggtatgctgctgaaaaaccgctgcccacttccagggttttgagagcatctgcctccacatcccatacgcagatatcctctcctgtggtccgtttaaaattactgtcatgcataacgatcagggttccgtccgacaactgctgcacatcaatctctgcaataggcactccatcccggatggcctgttccagggccgccaccgtgttctccggagctacttttgcccccgcccgatgcgctaccacgatcacaggagcgtctttacctgcggcctgtacctgcggcaatacaccatatgtcagaaaatagaggcagagaagcataacaatcgctgtttttctgataattttcatcacattgccctcccatgaaagttatttgtcaattttattgtaactattgactataaactccatacaaggaaaatgttaactttttgtaaatattcagagccacgtaaatataaccggaggaacgtcgaatgcttgcattcgtaagatcctctggctatatttatgtggcgaagtaaccacatgagcaaaaggaaagcatcggagatgcgattttgcgaatggggttctgaatattacgactattcagagccatgtagcttcaggcagggtattcggaagatgcttgcatacgcaagaatatctgcctgaagttatagggcgaattatcgttctgaatcgtcggtaagcccggataagcgtactcacttccgtaacattactaccagctcatgagccagcagtggaaatgctgccagtacattcaatagcagccattcctgtccggacagatgggaagttccgaacgctccgatgagaaacggtacttccgttaccgcaaactgcagcgcaaatccaataacacaggccaacaccatcagcggattatcccagggtctcatggcaaatacggacttctgcatatcccgcattcccactgcatgatacagctggcacattcccagtactgtaaaagcataggtctgggatcgggcaagtattttttccccggacagtaattcacgaagtccctccacccagtcagacagattccaggacagttctcccctgcctgccatgatcccacagggcaataccagaaatgccgccagaccgataccggtgatcagcgctccatagagtaaggtacaggccattccgccccgggcgaacagactctccgctgcttttcttggaggacagcgcatcaggctttttccgtcatttttatccactcccagtgccaacgccggaagggaatccgtgatcagattgatccacagtatatgactggattttagaggggaagccagccccagagccactgctgcgaacatggtcatcagttccccgagattggaggacagtaaaaatatcaccgacttgcggatgttttcatagacgcctctgccttcctcgattgccttttcaatcgttgcaaaattatcatccgtcaatatcatgtccgccgcctgtttagccacatccacgccggttcccatggctacaccgatatctgctgctttcagagaaggagcatcgttcacaccatcccctgtcatggccacaatctccccattctgctgcagccccttcacgatccgtaccttctgggccggagtcactctggcataaaccctgatattcctgatcctcctggcaaaagaagcatcatccagatgattcagttcttcccccgtaatacactgactgcgatgccctgcaatccccagctgtctggcaatggcataggcggtatccacatgatccccggtgatcattactgtagatacacctgcacggcggaaaatctccaccgcttcctccgcctccggtctggcaggatcacgcatccccacgattcccaggaatgtcataccttcttccccacacccgggagtgtttccgctctgtgctgccgccagtgtccgaagcgccagggaattcatgagttctacaacctcactgatcctttttctctgtccggctgtcattggcacacttcttccgtcctgtaaaatatgggtgcagtgctgtacgatcacatccggtgcccccttcgtataggcaatgcttcccttatgccctccgtttttcgggattctgtgataggtcgtcatcatcttccggtccgaatcgaaaggcttttcatcatagcgggggtactgcttctccagacgttctctatgcatccccatcttctctccgaagtctaagagcgccagttccgttggatctccgatccgttgctctccctgcagggaagcatcgttgcacaacagcattccccggagcatctcctgtacgcatcgggattctcccctgccattgctgccggcagcatcctccagcacatcataccaccagcatttttccaccgtgagccggttctgggtcagtgtgccggtcttatccgagcagaccacgctgaccgctcccagagtctcaacggaaggcagtctgcggatgatcgtatgtactttgaccattctggtcactgacaatgccagacagatcgtcaccactgccggcagaccttccggcaccgcagccaccgccagggaaatcgccaccagcagcatttccggaatatttctgtgttgaaataccgccagcagaaacaatgccgcacatactcccagcgataaaatactcagaagctttcccatatcccccagacgtttctgtaacggtgtcatttcctcttccgcatctgtgatcatggaggcgatcctgccgatctccgtggccatgcccgtagctgtcacgattccttctccgtggccatgggtcaccacagtagacatatataccatattgacccgttcagccaatggaatctcgtgtctgcagtctgccagaaacagcgcatctttttccacaggtaccgattctccggtcagggcggattcctctacctgcagattggagcttctggtcagccgtatatccgcaggtacctgtgcccctgcctccaggtctaccagatcgcccgtcaccagttccgccgccggaatctcctgacggataccttccctgatcacaatggtctgtggactggtcagctttttcaacgcttccagtgcctttcgggcttttccctcctgcagcatgcccaccagggcattgaccactaccacagtgccgatgatcacggcatcactgagctcccccagaaagacggataccacagctgcgatcaataatatgtagatcagcgggtcctttaactgctccagaaaaagctgtattttcgtcttttttctggcagctttcatttcatttctgccattttgctgtaaacgacgaaaggcctcaccatcggtaaggcccttcactgcgtcacttttcagttcatttacggtttcctgtatattctgtttttcgaacacggctgcctccaatgcttgtttctattaagcattgtatgtcatatcttcagaattcattacaccgaatcatcgtacattttgatctcttaactggaatgctgcggtcagctcgttcatgttggtggcctgcgcagacaattcctcactggtggcagaagtttcttctgcggtcgcagagttgttctgcaccactgtggatatctgttcaatgccctgttcgatctgcatcatggcatctgcctgtgccttggattcttccatggctttcttggactcgttggccagatcctcaatgccttccacgaccttctgcaatgcttcggctgtcttgtccgtgatctggttgccatgctcaatctcctgcagggaagtctcaatcaattctctggtatgtaccgcagactgtgcactgtcatctgccagcttacggatctgatccgcaaccactgcaaagcctcttccggcctctcctgctctggctgcctcaatggctgcattcagggacaacagattcgtctgggatgcgatatcctcaatctcaccaataatatcgctgatctgcctggaagtatcgttgatacgctgcatggcatctgtcagacccttcatttcctctccgctgtccttcgcctgctgctggtaatccatagccttctggtaagaacctcccagtgccttggcattcttctccacgatctcggttacattcgtgatggtagcctgcagttcctctacggaaccggcctggtcggtagcaccttccgcaagtccctgggcagcatctgccatctggtttgcccccagagatacctgtcccactgccgtcttgatctcattaagtgtctcactgagcttatggttcagcttacggatagattccaacagtccctgaaagtctcccacataggcttctgcgcaacctgtagtcagtgcaaaattgccctgtgacatctctcccaacagataatccgcatcgccaatcactttctgcaggttaccggataatgcggcggtagcctctgccaggatctgtgtctcatcctgtgtccggatcactggtgccggagtatgcagatcgccctcagccaacagacgtaatctctcggtacactttgccaccggttcaccgatcgcctgaccgatcttttttgccctgcgcacactgaaacataaagctgcagcacctattgctacaccaatgacaatacatacaacggtagaaccaaggaaatctgtcagtggtgcatttactgccacgctccatccattggttccttctattggtgcataagcctgtattgtgagggttccgcctttcatataagtgccatatccggttgctccggtcatcatcttctgctctacctttgcaattccccgcaaagatctgtccgtctgagacagttcaatgttgctcttctgctcctgggcaatcgcagaatcacagtgagcaatggtgatacctgtttctcccaacagatagcactcggaattcttactgacagagactgccgcagcaatatcatttaagaactccggatccggcacaacgaataccacgccgacaatatcaccattcttatctccgtctgcatatacaggtgcggaaatgataacgctgagtctgccgtctgacttcgagatcactggatccgataccacgacctctccctgcatggatctcttaaaataatcacggtcactataatcggttccgtcataagcacagataccgttggagccgatcagcttgcctctgaccattccataagcttccacacgctggttgatatactgttgcttctgctcctgggtaaataccggagaagacagctgatagctgcatccgagttcggatacgatcgttgttgtcacccgtagttcctcattgatacggtctgcggaaatctctgccaccaccagcatatcgccttccagtgttctcatggtactggacagattcaggatcacggtaaggatgaccaacggaataatcgagaacactaccagcctgctgattgccttctgcagacgttcccggatcgtcgtcatgccgggtgtctgcccctttgtgcccttctgtgatgcttttgtactcatatgtcctcatttctgcgctgcatttttattatatgctttattttcctgtactctgtgaagtgaccacttgtccggcagcgcccggatattccattcatctccctcatttggaacagtgatcttctgcagagatactcaattttatatgtcgattttattttaccatgattcaggaaaattttctatcttttgaagcccaaaaagagagttaatattccgttaagaatatcaactctctcctgtcatttatctctctatcccctcatgataagaaataccctgttaatagccgaactcctgggcaaaatacaacttgccattggtctcatagaccgcaatgctgcaggtggtaaaatcgcctgccaggatattcgctgcgtgtgtaggagaagccatccaggcatctactacactctgtgcggaatcatagcccttcgccagattctcgccccacatcagttcactgttcactgtgtaccagtccttaccgttgggtctggtatgggagaacttggaagctgcttcctgtgctcttaccatagcgcaggactccagaccgttgctccagttcagtgctgccaggccgttctctgctctcttcgcgtttacaatatccaacgcatcgatagccatggcacgaagttcatctgcacgggccagctcagcttcactcataccggcttttctcacagaacccgccagtgccactgcctcttcatcgaaccagacagttccgtcatccgtggcaggatcacggcttacagaggataattctgtactcttgccgcagcctgcaaggctcagcaccatgatgactgtcagaacaagactcatccatctttttttcatttgttctacctcttctttccttgattgtttatagtaaatatatgcttattcgttatgattgcttcttcttaataataagccatgctcccagccctgtcaaggaaagggcaaagcccagattccatgtattggaatcatcgccggtcctgggtcttctggaagctcccaggactgctctgtccgccaatggtgtaggatcatcggtaatgcttacaacccgctgacgtcttacaccaagcacctgaggtgttaccggggttgccggctcagacggtgtaccgggagtatccggggtatcggaatcatccgaatcgtccggagtatccgggggtgcggtcggagtagtggtcggcgtcgtgggtgtggtatccggtgtgcctgtcggcgtaggctccggagtagcactgggagtaggttccgggctggtagtcacgggcggagtaacctccggctctctggacaattcaaactgcattccgaagccgtatctggtcatctgatagccgttgttggccaacacaccgttaaggttagtggtgatcttcacttctccgtcctttaacaggtcggataccagagtatctgcataggaaccttcctgtccgtttttcagcatccggtcatacagaccttcaccgtcaaaagtatatacattatgatatgtcgtgtaatataaagcatctgctactgcagaacagctctccgctactgtggtatcggcggttccgttggtcaggattgccagttcctctgccgtaagttctgaaaagccgtagaccttatttccttcttctctggaagtattgttgaaccagtctaagtaatactgtgccaggcagctctgcgtaacctcttccggcttcatttcttcgctgccatatccttttttcaaaagagcctctccgacaatcgcatccgtaaccttgcctgcggtgattccgagatcccgtaacggagcatttaaaatacggcggggcaatgtacagaacgctcccacttcaccgatctcataaccttcaaaaccactggacagaaccgttactttctctcctgccttaggcgccgccgggatcgtaccgatcgtggcctttgcaggatcatactgatactccttattgctctcatttaccagctttatgttgtagcacagggtatctccgggctctgccgcatttcctcctgccacggtaccgttcagataaccgatggcatcggacagattgattcttaccttgtccggggcattgctgtggatcgtaatggtgatcgttgcatcataggtcaccctgccggtgccgctttcccaatgctgttccagttccggagttgtagtaatggtaataccttcggaaatataatggaacactgcgccgttctcattctgttcaaaagttaccgttcccgtgggatattcataataatctactgcggatacccccggaatcctgtaatcgtatccgtcataattgatccaggtctctgtgggtgtggtcacataccataccgtggcaatggtgactccgctgaaggaccgaccggtggtgagcaactgattcataaaactttccgttacattttcaccatacaagacgccgttgttgtcattcacatactgttttacatcctcaagggtttttccgcagttttctttataataggaagtgccttcgctgtctccaccgtaataaacatagtgtaacaaatctgcgggcttgcagtcagaatatttgtttacatctaatgctacgaatccaacgcactgccagcttgctccgttacttccggttaactttccttcggcatctacccctgtattatccacagaaagatatttaaaggtttcagcatcatccaaagtcatcttatgacctgcaaacaatgaaaaatctccgtttgccggcttgtaattattgggccatacgttggggctggctacctgtcctcccacatattttgccatggtgcctccagcaagaatcaccgttttgatggtgggataggttttctcttttacagcaacgctgtcgtttccgcttacacttgccatttcaacaacatcgttctgctcattctgcgttgcttcttccgcctgtaccgtaaatccgatgttggagatgctgccgatcatcagtgccgctaccagagtttttgccagtttggtctgtattacgttttttaacttcatttctgtttcccctcaaaaccagtatttctgtttttattacttctttttactctcctaataaggaagactgcgccaaatggaaaaaaggaccagaatttgaaaaatttttcaagattctgatccttttatacttttacagctaagatcggctgtcgttccgttcctgtttaatgttcttttcgcttaagaacaagccatgctcccagactcgtcagggaaaaggcaaagcccagattccaggcatcggagtcatcgctggtctgcggtcgtctggatgctccgaggactgctctgtccgccaagggaactgtctcatcctcgatggtcaccattctgcggcgtcttgcaccaagtacctgcggggtgtccgggattccaccggccggtgtgccgggatctgccggggtaccgggatcatctggtgtatcgtccggagtatcgggttcatccggggtgtcaggtgttgcggttggtgttggtgtaggttcttcggttaccaccggtaccgtcggtgtcggcgtaggctcctcggttactaccggtaccgtcggtgtcggcgtaggctcctcggttaccaccggtaccgtcggtgtcggcgtagg

SEQ ID NO: 5705 - DNA, 138 bp, Unknown
  gut microbiota DNA sequence
ttcggttaccaccggtaccgtcggtgtcggcgtaggctcctcggttaccaccggtaccgtcggtgtcggtgtaggctcctcggttactaccggcgtaggcgtaggctcctcggttactaccggcgtaggcgtaggctc

SEQ ID NO: 5706 - DNA, 322 bp, Unknown
  gut microbiota DNA sequence
gattggaatttctcccctacccacacctcatcgccacccttttcaacggatgtgcgttcggccctccactacctcttacggcagcttcagcctggacatgggtagatcacccggtttcgggtctactcttactgacttcacgccctcttaagacttggtttcccttcggctccgtacctatagtacttaaccttgccagtaaacgtaactcgccggaccgttctacaaaaagtacgcggttgtgcacataaggcacttccacagcttgtaaacacagggtttcaggttctctttcactcccctcccggggtccttttcacct

SEQ ID NO: 5707 - DNA, 4897 bp, Unknown
  gut microbiota DNA sequence
ttcgcccattaaagcggtacgcgagctgggttcagaacgtcgtgagacagttcggtccctatccggcgcaggcggaggatatttgagaggagctgtccttagtacgagaggaccgggatggacggaccactggtgtatctgttggctatcggagccatggcagagtagccaagtccggcagggataaacgctgaaggcatctaagcgtgaagcccccctcaagatgagatatccctcagaaatgagtaagaccccttgaagactacgaggtagataggaatgaggtgtaagcacagcaatgtgttcagctgacatttactaatcggtcgagggcttgaccaaaggttttggataggaaaaggatgtaagttaaggtataagagatagagtttcagtgttcggttttgaaggaataaattaaaaacgatagctttctgctatcgtttttttatgcattaatttcagataattgtttctttttttaaaatatatgttataattaattgagaaagtagtaaaaggctgcattgcaggcttcttaaaatatgtggcataaagaatatggcataaagaacaaaagcagcgggaagggcacaggagtaagtatggatactaagatattacttgaaaacggaacaaatgaattggagattctggagtttaccctggcaggtaattcctacggaattaatgttgccaagatcaaagagatcatcacctatcagccagtaacaccggttccgaattcacatcccagtattgaaggtattttcatgccgagagatactatgatcaccgccattgatctgaagaattgtctggggcgtggtgaatctgagaaaaaaggattatttatcgttaccaactttaataagctggatattgcattccatgtagaatctgtattaggtattcacagagtaagctggagagatattattaagccggatatcaccatttctgcagcagatgagagtgttgctaccggcattatcaagaaaaatgacaagctgatcattattctggatttcgagaagatcgtatctgacatcaatccggagacaggactgaagatgtccgagctgaatgaactgggagagcgtacaagaagctctgttcctattctgattgcagaggattcccctctgcttaacaagctgattgtagattccctgaaggcagccggctatgtaaatctgatccatacagagaacggtcagaaagcatatgatgttattacgcagtgcaaagaggatggtacactggatcagcatgttcgttgtatcatcaccgatattgagatgccggaaatggatggtcacagactgaccaagcttgtgaagagcgatgatgcgaccaaggacattcctattatcattttctcatcactggttaatgatgacatgaagagaaagggagaggctttgggagcagatgcacagctttccaaacccgagatcggtaatctggtaagaattgtggacgaactggtagcagagaagcatttagacagatagtaagtttagagaagcaaaaaggctgggatagtcccagccttttgctataatatcaggatacagttatggataatcaaaaagaagaaatccttcagaaaattgaagaagcggaatatgtgctggtgggcctgggacaggagtttgacatggaatttttcctgcaaagcagagaagattaccgcagaatccgggaacagttacaacagcagaatgtactttggctcttgccatatgtggaagcacagtttcgaaagcaatatatgccggagatggaagcagagatcgaaaagggattgcagaagctggcaaaagtattggaaaaaaagagttattttgtggtttcatcttccatgaatcataaattggcagaggttccctggaaaaaaatgttattgaaaaaagagcgattcgtggcaccctgtggagactggacgaaaaaacagtgcccggacgggtgtgaggaaggcatccagacagtgacagaagcagatgaggaacaattgcaggagagttttaagaagctgcagactaacgggttttcggttccggatttgggaaaatgtccaaagtgcgggaaaaagttggtactcaacaatgtctatgccggccgatacgatgaaaaaggatatttgaaaacctggacagaatatcagaactggctgcaaaataccctgaatcataaaatggtgttgttggagattggggaggggaaccgttttcctacgattatacgttccccttttgagagaatcgctttgtttcaacaaaaagcagacctttattgtatagatggagaacaaaatcccattgcctggctgctcagcctgtgttaaacttaacatgctagtaacttgtgagaaagcggaggaatgacatatgccttcacaggaggaatacctggataatttattaaaaggaattgaaacagaaaatacggaaacagaggttacaaaggagccgaaaatgaccgggacggaggaagaaactgccaaagcaccggaaacgccggagcctgtggaagagagtggaactcaggtcgatatgagcgatatggatgatctgctgcagtcggcgctggatgctcaaaaagctgattcatcggagcaggaaacggaagcaagtcagcctgtagcggaaaatacagccattcttccagaggagacagcttctatgtctgaggatgaaattaacaggctattgcagcagagccaggagcaatccggggatgctccggcacaggagagcaacgatgctaatgacgatctgatcaaaatgttggagaatgcggatgacgagggattgtcaaatattctggatcaggtgacaccggagactgcacagccggaggaaacagcagagcgggaagaagacaacggcaagcgcggaaaaaagaaaaaagaaaagaaaaagaaggaaaagaagctgggattttttgaacggtttaagaagaaatccaaggaagaaccggaagcagcaccggatgagacagaatcagcacagcctgcgggagaggaagttacatcggatatcccggaaactgtgccggatgatcttgcggatctgtcttccctgacggatggcatggatgatacagacaaaacaccgatggaggcttctgacaacacggaaagtgtagaaagtacggaaaatgctgcggaaaacggagatgccggcggcctggatgacgatctggacgctttactggcgggagcatttccggagcagtcggagaacagcacggataatgcatccggagaaccggaatctgcagatgtgatggatattctgaaggctgcaggcgcagacatcatggatgagccggaacagaagaaagagaaaaaaggcttttttgccaaattattagatctgttcaccgaggaggacgaggaagaagaggaagcggatcagttgcagctgtccgatgagaacaagaagatcctggaagagatggacaagggcggcaagaacaagaagggaaaaaaacagaaaaagcctaaaaaagaaaagcagcccaagcccaagaaaccggcaaaagaaaaaaagaaaaaagaaaagccggaaaaggaagataagccgtcagtatcggagaaaaagctttctccgaagaaaatcctcccgattgtagtggtatgtatttctctgggggcggtgattctgttgctgggtaacttcctggcggattataccgcgaagcgcagtggtagagaagcttactatgccggagattatcagacctgttaccagaatctgatgggcaaggaactggatgagacagaacaggtgatgtacagtcagtccgagagtattctgaccatccgtatgtggctgcgggagtacgaagtattcgtaaacgaaggctctgaattggaggcattggacagcctgcttcaggcagtcagggattatccgacattgttaaattatgcgacacagtggaatgcgcaggatgaggtaagtctggcattccagaatattttgaatatcctttcccagaaatatcagttaagtcaggaagaggcacaacagattgcggatatttccgataatgtagaatatacgaagaatgtaatgttggttctgcaaaggctgggactgggattctgggagttcccgcagggaacggtaacggaggaaacatctgcacctaatacggaggaggcgcccgcacagctgccggatcctctccccgaggaaaaggagatacagcaatgatcacagtgctcgactatgatgctggcaacataaagagtgtagaaaaggcattggattttctgggagaagaggtgaagattaccagagacagagaggaaatcctgtccgcagacggtgtgatcctgccgggtgtgggagcgttcggtgatgccatggaaaaactgcaccagtacggactggtggatgtcattcatgaagtagtggacaggcagatcccttttctgggaatctgtctgggcttacagctgatgtttgagagtagtgaggagacaccgggagtagagggactgcacctgttagacggtaagatccgaaggattcctgcggcagaagaactgaagattccgcatattggctggaatgaccttacttttcccaatgaaggaagacttttccggggcgtggaagagcattcctatgtatattttgtacattcctattatctggaggcagcagatccttccattgttactgccaccacagaatatggaactttgattcatgcttccgtggaaaagggtaatatttttgcctgtcagttccatcccgagaaaagttcccgggtgggaatgaaaattctgcagaatttcatagagatcacacaagagttccgggaaaaagataagcagggaggaagatagtgtgaaaataagcatgatagcttattt

SEQ ID NO: 5708 - DNA, 1262 bp, Unknown
  gut microbiota DNA sequence
tgaaggatggcagagtagtaaaaggtgtgaattttgtgaatttccgggatgccggagatccgtcggaggtagcatctgcttatgatgcagccggtgcggacgaagtggtatttttggacattacggcttctgcagacagtagagcaacgcagttagagtgggtgcggaaggtagccagcaaggtatttattcctttcactgtaggcggaggaatccgtaccgtggatgattttaaggcgatattgagagaaggagcagacaagatttctgtgaattccgcagccattatgaatccgcagctgatcagtgatgcagcagagaagtttggcagtcagtgtgtggtggtcgctatcgatgccaagaagcgggcagacggcggtggttggaatatttataaaaacggtggtcgtgtggatatgggcatggacgctgtggagtgggccagaaccgcagagaagatgggagccggagagatcctgctgaccagcatggacggtgacggcacgaaggaaggctatgatctggagctgaccagggctgtggcagagagtgtaagcattccggttattgcatccggcggtgctggacagctgtctcatttctatgatgctctgacagagggaaaggcagaggcagttctggcggcatctctgttccattacaaagaattagagatcaggcaggtgaaagaatacctacgggaaaaaggaatcagtgtccgtctctagggacgacagggaggatttgactatggcaatgatcacgaatgactggctgacggctttgggcggagaattccacaagccttattacagacagctttttgaatttgtcaaaaatgaatacaacaccaccgtggtcttcccaccggcggatgatattttcaatgcatttcatctgacgccgttaagcaaggtaaaagtggtgattttaggacaggatccttatcataatgtgggacaggctcatggactgtgtttctcggtgaagccggatgtagatattcccccttctctggtgaatatttatcaggaacttcacgatgatctgggatgctatatccctaacaatggttatcttgtaaaatgggccgagcagggtgtcctgatgctcaatacggtgcttactgtgcgggcacacatggccaattcccatcacgggaaaggttgggaagagtttacagatgccgccatccgggcactgaatgcacaggatcgtcccattgtgtttatcctgtggggcagacctgcccagatgaagaa

SEQ ID NO: 5709 - DNA, 2138 bp, Unknown
  gut microbiota DNA sequence
ttacaaaaataccaccgtctgcctcgactgcctttctggctgcatcttccagtttcttgttggtagcttctccattaccaaacagagccttgatgtcattccaaagggagccgaaggtactctggtctactgtcttcttagttacctttgcataagttgcggatacagtgccggatacgaggaagtcggaatcatcataccagtgatcttctgtatagccggttaccttaagatcactgcttacaccgatcaggtataagtcgtcatcatcgttaatcttattgcttaacgccttctcctgctctttcgtaacctttgctactgcttcttcctctgttcttacaccataatccgtctttttatctgtatgcttccattcaacctcttcatccttcacattcacagtcttcgtaaaggtaggaatgtaggttccattaccggtataagtataatccgttttttctgttcctgtaacggttgcatccttgccggcagcgtccttcaaatccttttcctttgcagcagctgcagcatctctctctgcctctgtctgatactgttcggtagaagtgaattttgcatcggtataggtgatggtggtcacatcagcggtcacggtcttgatcaggttgccgttctcatccagtttccaggattccttctcggtagcctcatttacatcagtatcaacctcgccgttttcggtcttctggttattgtcagaaataatgatactctcggttccgtcgttcttgatcactttctttccatctactgcaataatggttccgtctttcagacctttttccacttcggaaacagtgatagtatccccattttccttcacatactgatccggattggtctcctgcgccgtcttccagtttacttcctcaattcgcttctcaaagatcacgatattgtccttggaagtctgtttgtcatccatcacatagttgtaaaactttgtctgcttattaccattctcatcggtataggttacttcaaaataattcttggtattattgtcttcaccctgtctgcggacaaccttaatatcatcggcagtgatcttctgtacctcgggcagatagtagttctgcataatggaaatgaaaagctgatcctcatttttccagttaagtccctgatctccctgtgtcagagcttccttatctgcaatatccatggcacctgctgcggaggtatccactgcgctcttggcagcttccagagcctttgccagtccttctgcatttttctgtgctgccgcaagttcctctgctgctgccacagcgttagcatccgcactgtttatagcatcctcatatgccttttcataatccgccagtttctttgcggcttcttcataagctgccttggcggtattgtactccccgagctttgcgtcaaaatctgcctgtgcctgatccacggtagtctttacttcttcataggcagcattggcatcggtgatagaagcagcatccttgatattctcgatctgtccatttaccttatcctgggaagcctgcatggcatcttttgcttctgccgcagtctgtcctgcatttgccgcagcatcagctgccttattcagttctgcgtcggacagcttgtcattggcttccgcaacccccagcgcagtatctgcattctctacggcagactctgcgtccttcagggatgaaccgtctttaacagtcttatcctctactttggcattggcatccagaatgtcctgagacagatcctttccctcggcatccttcacatctccggctgccaccttgtcaaccacttccgccttcacatcagcggcactcttttcggcgccctctacagccttatcggcatcttttgcggctgcttccgcctgatcgcatacaccggcttccggtgtcactgtaatgttcttatcctcgtttccttcggaagaattcccctctccttctgctgccagtgcagtcaacggtgaagatgccatcagcattgcggaaatgccgatcgccatagcacgaatcactttttcgttcttactgttttttctcatatgatttttcctctccattctatttttcaacaatatgttcgaataaatactgcaacacttccggcgtgaattttttcgccgaaat

SEQ ID NO: 5710 - DNA, 200 bp, Unknown
  gut microbiota DNA sequence
cgccgagacaacacaacagctcgaaagaaacttgaaaagatttcaaaaaaagttgttgacaaagtctgacagatatgttaacataaatacctgtcacggaaaacaaagttttccaagacgaaaaagatttcaaaaaaagttgttgacaaacgaaagcggttatgataagatatcagagttgccgctgagaacaacagcaa

SEQ ID NO: 5711 - DNA, 157 bp, Unknown
  gut microbiota DNA sequence
aaaaaagttgttgacaaacgaaagcggttatgataagatatcagagttgccgctgagaacaacagcaacgaacgaacgagctcttgcgaagcaagaggttatgatctttgacaaataaacagtaatgcaaccctgaaaattccaagattttcagaga

SEQ ID NO: 5712 - DNA, 154 bp, Unknown
  gut microbiota DNA sequence
catgttaaaatggtgtttgtgtcctgccagttttatctggcattgtttactgttaattcgggtagcttcttcgtctttcgactaagttgcttgttcttgaatttctctgaaaatcttggaattttcagggttgcattactgtttatttgtcaaa

SEQ ID NO: 5713 - DNA, 3587 bp, Unknown
  gut microbiota DNA sequence
cttggtctctaagtctgcactatagccttcttcatcagtcaggatatcctgcaacttccagactctctcaaggaatctgcggcatccctttacgccttcctcactccaggaagcgctcagatcaaaagcgccgatgaacatctcataggtacgcagagtatctgcaccgtaatcctgtacgatgtcatccgggtttacaacgttgccacgggacttggacatcttctcgccgttggagccaaggatcataccgtggctggttctcttctggtaaggttcgggagtaggtactacgccctgatcatacaggaacttatgccagaaacgggagtacaaaagatgcagtgtggtatgttccataccgccgttgtaccagtcaaccggcagccagtacttcaatgcttcaggacttgccagtgccttgtcattgtgaggatcggtataacgcaggtaataccaggaagaacctgcccactgaggcatggtatcggtctctctctttgccggaccgccacagcagggacaggtggtatttacccagtcagtcatggcagccagaggagattctccggtatcggtaggcatgtagctctctacatcgggtaactgcagaggaagttcgctctcatcaatgggaacatatccgcacttatcgcaatgtacgatagggatcggctcaccccagtaacgctgtctggagaatacccagtctcttaatttataattggtcttgcggttaccgatgcccttctcttccagatagttcatgatcttctctttggcttctgccacagacagaccgttcaggaaatcggaattcacgagagtaccgtcagccacatcggtatatacagcttcttctacgctgacagggcttcctgcaacaacttcaatgataggcataccaaatttcttcgcgaactcccagtctctctcatcgtgggcaggaactgccatgatagcgccggtaccgtaagtcatcagtacataatcggatacccaaacagggatttccttgccattcacggggttggtagcggtcaggccctgaatgcagacaccggtcttatcctttgccagttcggtacgttcaaaatcggacttcttcgcagccatctcgcgatatgccacgatgtcatcccagttcttgatctcatctttatatttatccagaacaggatgctccggagatactaccatgtaagtaaccccgaacagagtatccggtctggtggtgtaaatgcgcagcttctcatccttgcctgtcagggtgaaatcaacctcggcaccctgggacttaccgatccagttcttctgggagactttgacacgctcgatataatctacggtatccagtccctggatcagcttgtcagcatattcggtgatctttaacatccactggctcttgaccttacggatgacttcggaaccgcaacgttcgcagacgccgttcactacttcctcatttgccagacctaccttacaggaggtacaccagttgataggcatctccgttttgtaagccagtcctgccttgaacagctttaagaagatccactgggtccagtgataatactcgggatctgtggtgttgatctctctgtcccagtcgaaagaataacctaaggaatgcagctgattcttgaatcttgccacgttgttcttggttacgatcttgggatggatatgattcttgatcgcgtagttctcggtagggagaccgaatgcatcccatcccatgggatacagcacattatagccctgcattctgcgcttacgtgctacgatatccagtgcagtataaggtctcggatgacctacatgtaatccctgtcctgaaggataagggaactctaccagtgcgtaatatttgggcttggagaaatcgtcggaagtcttgaatgctttttcatcatcccagacagtctgccattttttctctacctctctgtgattgtaaggtactgccataattatttcctcctaaactatgagaagctttctatttaaattttttgttctcaagtcgttaaaaaactatcgattattttatcgtgttttcccgatactgtcaaggactgcggctctatccgcatggttttttgcatattttcgtctgccggggcatatgctgtatacgagaggtgatgaatcatgtttgcatggatcacattactgatcaatctgatgcagcgatatcgatgatatttactgcacaataccgaaaaagagaccggaaagccaaccggtctctttttgctgtgtatgttatgtaattactcgttagtcttctgcattgttctccgcaacctttgctgctctggccgctacttccttctcctgtacgtcggaaggtgcctgctcgtagcgggcaaattcataggaataatcccctctgcctccggtcatggaacgcagatctgtgcaataaccgaataatccgctcatgggaatatccgcttcgatgatctgcttgccgccgctcatgggtgtcatgcccagcacccggcctcttctcttgttcagatctcccatgatgtctccggtataggcatccggcacggtaacctttaaggacatgatgggctccaacagaacggggcctgcttccatgacaccttttttgaaagcctggatagccgcggtcttaaatgccatttccgaagaatctaccggatgataggatccatcatacagtaccgctttgacaccgactaccgggtaggccgccagaggtcctctgcctacggattcctgaatacctttttccaccgcagggaagaaattcttcggtaccgcgccacctacgacttctgttgcgaactcatagggtttggtcagatcgccggaaggtgaaaaacgcatttttacatgaccgtactgaccgtgtcctccggactgtttcttgtacttatattccacatcggactgtttcttgatagtctctttgtatgcgatcttcggtctggacagctcaatctctactttgtattcgttcagcagtctgcttaccacgatatccagatgctggtcgcccataccatagagcagggtctgacggttttctgcatcatttactactttgatggtcagatcctcatgggtcatcttctgcaatgcctgggagatcttatccacgtccgccttattcttcggcttataccgcatataggtataaggagtggaaatatcgaacttgccatatttgatggtcgtggccttggtagagagactgttgccggttctcgctgcagtcagtttcgccagtgctccgatatctccggcatgcagttcgctgacttcaatgggcttattgccctgcagtacatagattttgccgatcttttcctcaatgtcacggtctacgttgtacagcaggtcgtcggtcttaagtacaccggagtttaccttgatcagagagtattttccgatgaaaggatccactatggtcttccagatataggcggattttgccttggcgaaatcgtaatccgcatggtaaatctcattggtctttaaattgatgcccgccacttctcttttctcggggctgggcatgtatttgacaatatcatctaacagtg

SEQ ID NO: 5714 - DNA, 16457 bp, Unknown
  gut microbiota DNA sequence
aaacgaagtccgccgaaaagggaatatgaatattttgtgtaaaggctttacgaacggaatgtttcgtgttattataagtagtattaaaaactacatagtatggtttttaaaaaatgaaaataattgtaactattcagtgccccattcgcagaatgactctttgggagttatatttttgaatagctgcaatcaataatatggagattaatatgagttttaaaatcgtagtagacagctgttgtgaattgccggaagaatatttgcaggattcccggttcgagatcgtgcctttgggactggaagtgggagattaccagattcaggatgatgagaattttgatcaggcggaattcctgaaaaaggtggcagagtgtccgaaatgtcccaagtcggcatgcccttccccagagcgtttcagggaagcctaccacacagaagcagagcatgtgtatgtgatcactttatcctcccacctcagcggaagctacaacagtgcggtgcttggtatgaatctgtatcgggaaaaatacgggaagaagcagatccacgtcatcgattccgagtccgccagctgtggtgagacccagatcgtgaagaaactggtagaactggaagagcagggcctttccttcgaagaaatcgtgaagcagatcgaagagttccgcagcaatgtgcatacctattttgtactggataatctggagacgctgcgcaagaacggcagactgaccggtgtgaaagcactggtggcatccacgctgaacatcaagccgatcatggccggagacaagggcagtatcgtgcagagaggccagagcgtcggcatgaagaaagcactccgaagaatggcggagatcgttctggaagaggcaggggatacgaaggaacgtttcctgatgatcacccactgcaatgctcctgaccgcgccgagaccatgaagaagcttcttatggaaaaggcagagttcaaaggatgcctgatcatggacacccgcggtgtcagcagcatgtacgccaacgatggcggcgtgatcgtgacggtgtaaaaagattaatatcataggcaatatagctccggcggattagcctgtcattttttgtttctgacagcctgttccgcctgggcttttgttttcctgaaaactaggaaaaacaggcgatttccgaggaaaaagcgttccgaaagcggccagaaaaggtgagtttccttcaaaagtgggtatttggtcggaaaaggtggaaaaaatttcttctggcaaggaaaaatccactattttgagcctgttctatcattgtaaaaggaacggttttgtatcaaaaacaggaaaatgctgcaaaaaaatacaaaaacacaggattttcaggaaattggagaagatattttcgttaaagatacgtttttggctgtttttgtacaaaaaagtggcagaacagtgacttttttgtatgaaatcggttattttatggggatttacgaaaatacctgattctatcggattccctacgaaggatccgatgagattgtctggcagaaaaaccgatgtcaagagagtattgctacggatgtagcagaaaaagcaaaaaatgtaagagcttacatctatgtgagccaaacatcctcatgcatattccacaaaaagatagataaaaaattaactttcctaaaaactattgatagtttttattatttaggatacaattgcacatatacaaaaatcagtagccgacaagaaacggctattttttaaaaaacaaaatgtaagcgcttacacggcgtaacaggcagccagctcaggtggccaatgccatagtacgtgtcagtaaaacaccgcgcccgcagacggagagcagcacgccatagccgttgccggcagcgcccgtggcgcagggcataaaagtaacgcaggcatcagcccgcagaatggagaagattatgagccgattgaagatagctaccccgaataaagcacagcttacggtggaacgcctgtacaaagatctggagagaagaattatcgccagcccgcccggattatgtccggtggacctgcagctttcttttctgaaaatgtgtcatgcccagacctgtggtaaatgtgtgccctgccgtgtgggactggggcagttgcagaacctgatggaggatgtattggcaggcaaagccaccctgaagacactggatctgatccgggataccgcttccgacattgtggactccgctgactgtgccatcggttacgaggcggcccatatggtactggccggactggaaggcttccgtgaggattatgtctaccacattgaacatggcggaaaatgttcctgccatattacccagccggttccctgtgtggcgctgtgccccgcaggtgtggatatccccggttacatagcactggtgaaggaagggcgttatgcagatgccgtgaagctgatccgcaaggacaatcctttccccaccgcctgtgccctgatctgtgagcatccctgtgaggcaagatgccgccgcaacatgatcgatagtgccatcaatatccgcggcctgaagcgtatggcagtggacaatgccagagccaacacggttcctgtgcctgagaaagcggagagcaccggtaaaaaagtagcaatcatcggcggaggccccggcggactgtctgcggcatattatctggagctgatgggacaccatgccgtggtatttgaggaaaagagcaagctgggcggtatgctgcgctacggaattcccaactatcgtttcccaagagaacgcttacaggaggatattgacactattctgtccaccggagtggaagtgaaattgaacaccagagtcggcaacggcgaaggtgagatttcttataataagctgcacgaagaatacgatgcagtctatattgccatcggtgcccatacggataaaaagatcggtatcgagggagaggatgccaacggtgtcatgtctgcagtggaaatgctgcgccgcatcggtgacgatgacatgccggacttcaaggacaagaccgtagtcgtagtcggcggcggtaacgtagccatggactgtacccgttccgccattcgtctgggtgcgaaaaaggtgggaattgcctaccgcagaagacagaccgatatgacggcgcttcctgaagaagtggaaggcgccatcgcagagggcgcagagctttacagcctgaaagcacctcacaagatcgaagccgacgagaacggcaatgtgacggctctgtgggtagaaccgcagatcatcggccccatcgatgcctggggacgagcccgtccgatccaggcggatgtgcctctccttcgaatcccctgtgatatcgtcgtggtggccatcggtcagggtatcgagacccgccatttcgaggaggcgggtatctccgtaaaacgaggcaccattactgccatgagtgacagtgaagtcaaggatgtccacggtgtatttgccggtggtgactgtgtgaccggtccggctaccgtcatccgtgccattgccgccggaaaagtagctgcagccaatatcgatgaatatctgggttaccaccatgtagtaccctgtgatgtggagatcccgccggtatcctacgaggacaaggaaccctgcggacggatccagctgagtgaaaaggaagccggagagcgcaagacgaatttcgatgcatttgaatgcggcatgacgaagcaggaagcctgccaggaagcgggcagatgcttacgctgcgataaatacggctacggaagcttaaagggcggccgagctgccatctggtaaaaagaggagcaaacaatgggcgagaaaatgataaaccttacaatagacggcgtgcagctgcaggtcccggagggaaccagcgtcatgagcgcagcagcaggcgtgggaatcgaagtaccgcatctgtgctttttaaaagacatcaatgagatcagtgcctgcaaggtctgcgtggtggaagtgcagggaaaaagcaagctgatcacagcctgcaacagcccggtggaagagggaatggtagtgtataccaattctccgaaggtacgccgtgtgcgcaagacaaatgtggaactgatcctgtcccagcatgattgtcactgtgccacctgtgtcagaagccgtaactgtaatttacagcagatttccaacgatctgggaattctggaagtaccttttaccgaggaggttcccgagacaccctgggatcattctttccctctgatccgggattccagaaaatgtattaaatgtatgcgctgtgtacagatctgcgataaagtccaggccatgcatgtctgggatgtacagaacaccggatcccgtaccacagtagatgtggcggataataagaccattgattgctccgactgtacactgtgtggacagtgtattacccattgtcctaccggagcattgcgggaacgggacgatacatacaaggctttcgaggcactggcggatcccgagaaggtcacagtagtccaggtggcaccggcggtaagaaccgcatggggcgaggaactgggactgaatgcggaggaagcttccgagggcaaaatggtggcagcgctgaagcgcatcggttttgactatgtatttgataccaacttcgcagcggatctgacgattatggaagagggaaacgaactgctggagcggctgggcaattcccggaaatacgcatggcccatgtttacctcctgctgtcccggctgggtaagcttcgtgtccaagaagtatccggagtatctgcggaatttgtccacggcaaaatccccccagcagatgttcggtgccatggcgaagacttattttgcacagaagaaagggattgatcccaataatatctgctgtatctccatcatgccctgcgtatccaagaagagagaggcttctctttcttatatgaagagcgccggagccggacaggatgtggatattgtactgaccacaagagaattcgtgcggatgatccgtgccgagcatatcaatacccggttcttaaaggagcaggcttttgattctcctctgggagaaagcaccggtgccggagtgatcttcggcgtcaccggcggtgtcatggaggcagcacttcgtaccgcatatgcagtagtggaaggcaagaatccggaagcagatgctttccgggcagtccggggaagagacggcagaagagaagcagacttcacactgggagatcagaccttacatacctgtacggtcagcggactggccaatgcggagaagctgatggaggacattaaggcaggaaaggtatcctatgatttcgtggaagtcatggcatgccccggtggttgtgtcggaggcggcggacagcccatccacgacggatgcgaattcgcggagcggcgcggaggcaccctgtaccgtctggacagtgagagaaagcttcgcttctcccatgagaaccccgaggtacagaaggcctacgaagagttcctgggcaagcccctcagccgcaccgcccataagcttttgcattccgaacacgtgaacgaactgtactttgaaacacataactacttgtaataccaggtgaccgattcagccgcagggcatgcttgcatgcacctgcggctgaatcagggaaccgcccaaacatgaggaagaagcgatttgcgaagcaaatcagcggaatccgaatgtttgcaagaccctattgacattttttcacacagggtctatactgtgtatagtttaaagatgattactagagtaagagtggacgcgcgccactctttcttgttgttgtaacgacagctcatatcagtaaaggagggcctacatgtccaaacgagaggactacgaaaacagaaccgaagaactgctgatgcccatcgcagaagtaagtcaggtggagatctacgatgtggagtatgtaaaagaaggcagtgactactatctgagagcttacatcgacaagccggaaggtgtgaacattctggattgcgagaatgtcagcagagcattatccgaagctctggacaaggctgatttcattccggatgcttacattctggaagtcagcagcccgggactgggtagaacgctgaaaaaggataagcatttgcagaagagcatcggtgaagaagtagagatcaagctgttcaagcccattgacaaatgcaaagagttttctggcattctggagagcttcaatgcagataacattacgatcacggaagacggcagcccgagaacttttgccagagcagacattgccctgatccgtcttgcattagatttttgatactattcagagccaaagggcgaaggaatagttatagcttgtagaataagaagaaaccatacactaagaaaaggcgaaagccggaatggaggaaatgatgaataaggaattaatggaggcactggacgttctggagaaggagaaggagatcagcaaggagaccttgtttgaagccatcgagaactccctgatgacagcctgcaagaaccattttggaaaggctgacaatgtccatgtggagattaatagagagacctgcgattttctggtatatgctgagaaggaagtcgttcccacgaaggatgatgtggaggatgactgcctacagattgctctggaggatgcacaggagatctccaagagagcacaggtgggcgacatgatccatgtggagatcaagtccaaggagttcggccgtatcgctacccagaacgccaagaacgtgatcttacagaagatccgtgaggaagagagaagcgtgatctacaaccagtactacgagaaggaaaaggatgttgtgaccggcgtagtacagcgttatgtaggcaagaacatcagcatcaatctgggtaaggcagatgccatgctgaccgagaacgagcaggtaaagggcgaagtattcaagcccaccgagcgtatcaaggtttacattgtggaagtaaagaacaccccgaagggaccccgcatcaatgtcagccgtacccatccggaactggtaaagagactgttcgagtccgaagttaccgagatcaaggacggtaccgtagagatcaagagcattgccagagaggcaggaagccgtaccaagatcgctgtatggagcaataaccccaatgtagatgctgtcggcgcctgtgtaggtatgaatggtgcccgcgtcaatgctatcgtggaagagctgcgcggtgagaagatcgatatcgtgaactgggatgagaaccccggtaacctgattcagaatgcactttctcctgccaagatcgtagcagtatttgcagatcccgatgagaagaccgcaaaggtagtcgtacccgattatcagttgtctctggctatcggtaaggaaggtcagaacgcaagactggcagcaagactgaccggctacaagatcgacatcaagtccgagactcaggccaaggatgctcccggcttccgttatgaggactatgtggatgattacgaagatgataccgtagacgattttgatggagagcaggaataatcaatggcaaaaaagattccactgaggcagtgcgtaggctgcggagaaatgaaaggcaaaaaagaaatgctgcgtgtcctgaaaacaccggaagatgagatatgtctggatgcaaccggcaaaaaaaacggacgtggtgcatatatatgcagacagaaggaatgtctgcagaaagcccggaagaataaaggattagaacgttctttcaagatgagtatttctcctgaggtatatgatacactggaaaaggagtttgatcagcttgaaacagaataagatttattcccttttgggacttgcgatgagggggcgtaacctggtaagcggtgaattccagacggaggacgctgtgaaaaaaggttctgccatgttggtgatcgttgcagaggatgcatcggccaatacgaaaaagttgtttcacgacaaatgttcctattatgaagtcccggtatatgaatatggcacgaaggaagaactcggctgggccatcggccgggatctgagatcttcggtaggtgtgtgtgatgcgggactggcagatgcactcatcaagcaattggaagcgaatttgcccggttaggcagaatggaggaaagcatggcgaaaatcaaagtacatgaactcgcaaaagaattggaactacagagtaaggatatattaagttttttacaggaaaaaggaattgaggcaaaggcagcacagagctcgctggaagaggatgcggcagcactggtacgcaacagcctcggaaagaaaaaagcagctgcacccgcagcacagaaagctccggtaaatgccgaaaacgcaaagcctgctgaggaaaaggctcaggcacccgcaggggaagcaaaggctcaggaaacgaaagtttccgaggagaccaaatctactgaggagacgaaaaagaagaaaaagattattttcgttagcaaccctcagaattccaagatgcccggacagcgtcagggtggtcagagtggacagggacagagaaatgcaggcggacagcgtccgaatcagggcggcagataccagaacaatggttaccagaataattcctacggcaaccgtgttcaggcacaggctcccgtacgtcccatcaagccgctgacccctccgtctcccactcccagcgtggcaatggtacccggcaaccgtggacagcagcctgcgaaaaagcctcagacacaggcaccggtaaaggagcaggcagtacagaatactgcagccgcacaggcacctcaggcagcacagcctgcacagaatgtggcacagaccagaccggcagacaaacctcagaacggtaaccgtgacaaccgcgataaccgtcagggcggttacggtcagaataatcgtgacaaccgtggacagaacgagcgtggccagggcggttacaaccgtgacaacagagacggcaatcgtgacaatcgtcagggtggctacggacagggtaaccgtcagggcggacagaatggtaacagaggaggtatgggcaatggcagacctcagggaggcggatttaacagacagggtcgtccgggtatggaaggcggtcagggtgatcgccgcggtaacggcaatggtgagcgcggttacggcaataacggccgcgacggaagaggcaatggcggatcgggtaatcgattcggagataacagacagaataagggcttcgctccggaacctgcaggcaaggatcttgagaagaagcgcgaagatgaaaagagacgtttcagccaggagaaggacaacaagcgttccaagaaggaccatatctacgaggacgaggacgcgctgaagaacaagcccggacgtttcatcaagccggaaaagaagaaggaagaggtacaggaagagcaaatcaaggtgatcgtgctgccggaatccattaccatcaaagaactggctgagaagatgaagttacagcccgcagccatcatcaagaagctgttcctggaaggtaagattgtaaccgtgaaccaggagatctcctatgaagatgcagagaacattgccatggaatatgacattctctgtgaaaaagaggtcaaggtagatgttatcgaagagctgttgaaggaagatgaagaggacgaggcagatctggtggagagacctcccgtaatctgtgttatgggtcacgttgaccatggtaagacttccctgttagacgctatccgtaagaccaacgtaaccgatcgtgaggcaggtggtatcacccagcacatcggcgcttatactgtaaatgtgggagaccgtaagatcaccttcttagatactcccggacacgaagcatttaccgccatgcgtatgcgtggtgccaatgcgaccgatatcgctatcctggtagtagcagcggacgacggcgtaatgcctcagaccgtagaggcgatcaaccatgcaaaggcagcaggtgtggagatcatcgtagcagtgaacaagatcgataagccctcagccaacattgaccgtgtaaaacaggagctggcagagtacgagctgatccccgaggattggggcggaagtaccgtctttgcaccggtatctgcgaagagcggagaaggtatcgaccagctgcttgacatgatcctgctgaccgcagatatcatggaactcaaggccaaccccaagagaaaagcaagaggtctggtcattgaggcagagctggataagggacgcggtcccgtggctaccgtactggtacagaaaggtaccctgcatgtgggagatttcatttccgcaggcgtggcacacggtaaggtaagagccatgatcgatgataagggacgcagagtaaaagaagcaggaccgtctacccctgtagaaatcctgggcctgtccgatgttcccagtgcaggtgaagtattcctggctcatgataatgataagacagcaaaatcctatgcggagacctatctggcacagaacaaggaaaagatgctggaagagaccaagggcagaatgtccctggatgatctgttcagccagatccaggagggtaatctgaaggaactgaacctgatcgtcaaggctgacgtacagggtagtgtcgaggctgtaaaacagtccctgatgaagctgtccaacgaagaagtagtagttaaatgtatccacggcggcgtaggtgccatcaatgagtccgacgtatctttagcaagtgcgtccaacgcgatcatcatcggattcaacgttcgtcccgatgcgactgccaaggcaaccgcagagagagagggcgtggatgtacgtctgtacaaggtcatctaccaggctatcgaagatgtggaagctgccatgaagggtatgctggatcccgtatacgaggagaaggttatcggtcatgcagaggttcgtcagatcttcaaggcatccgctatcggtaacattgcaggttcctatgttctggacggtgtgttccagagaggctgtaaggttcgtatcacccgtgagggcgagcagatcttcgaaggcaacctggcttccttgaagagattcaaggatgatgtgaaggaagttaaggccggatatgagtgtggtctcgtattcgaaggctttgacaagatgcaggagctggatatcgtagaagcatatatcatggtggaagtaccacggtaggttactagaacgcatccgttcgcagatgcattccgcttacccacgctcgcgctctgcaaaaaacgtagcggacactaagaatcttcctgcgctttgcttgcaagattcaagtgccgacgtttttcaacggggttacgcgaaacgcattctgttcgcggatgctcgccaagacgtctacgatacccgcaggaaagaattaagaaggaataagaatgagaaagaatagtgtgaaaaatacccgtatcaacggggaagtacagcgcgttctggcagagatcatccggggcggtctcaaggacccccggatcagtccctggaccagtgtggtcgctgtggaagtggcaccggatctgaagagctgtaaggcatggatcagcgtgctgggagacgaggaagtcagaaagtctaccctgcagggactgaagagcgccgaaggctttatccgcagagaactggctcgtaccatcaatctgcgtaatactccggatatcacttttgtgatggatcagtccattgaatacggtgtcaatatgtcccacaagatcgatgaggtcattgcagcggatgaacaggcacagaagccggaaaatgaagtggtggaagatacggaagaaacagaggaaggtgacgagtaatggatttgcgtgaagaatgtctgggtgcgaaaaagatcggcatcagcggacatattcgtccggatggagactgtgtgggtgtatgtctttccttacagatgtatctgcgtaaactccttcccgaagcggaagttaccgtatatctgcagaagccgtccgaagagttttcatatctgaaaggatacgatgagattcagactgaatgtcccgtgcaggagccttttgatgtgtattttgcgctggattgcagtggggatcgtctgggagatgcggagacgtatttccagaatgcgaaaaagaagatcaacattgatcatcacatcagcaattccggttgcggtgatgtgaatctggtccgtccggaagtgggaagtgcctgtgaggtgctgtatcacattatggatgcggaacttattgacaaggatattgcggaagcgctgtataccggcatcatccatgataccggtgtattccagtattccaatacgacaccggagacgctgcaggcagcagcgtttctgatctccttcggattcaatttcccgaagctgatcgaggaaagcttttatcagaagacctatctgcagacccagatcatgggcagagctctgatggagagcattcgtttcatggacggacgctgcatcgtgagcatggtggaccgcaagaccatggaattctacaatgcggtaccgggagatctggacggcattgtgaaccagttgcgcaatatcaagggcgtggactgtgcgattttcatgtatgagaccaacgtactggagtacaaggtcagcatgcgttccaatgagaaagtagatgtggcgaaggtggcatctttcttcggaggcggcggacatgtacgtgccgcaggctgcactatgaagggaaccttccatgattgtgtcaacaatttgtcactgcacatcgacaaacaactgcggggagaacaggattaatggacggcatcatcaatgtatataaggaagcgggctttacctcccatgatgtggtagccaagcttcgcgggatctgccggcagaaaaagatagggcacacaggtacactggatccacaggctaccggtgtgcttcctgtatgtctggggaatgctaccagagcatgtgaaatgctgacggacaggaccaaggaatatgtggcagaacttctgctgggacagatcacagatacccaggatatcacgggaaccgttctggaagagcgggaagtggcggtgagtgaagcacaggtacgtgaagtgatcgccggttttgtcggcggctatgaccagatcccacccatgtattctgcactgaaggtcaatgggaaaaagctctatgagctggccagagcgggcaaagaagtggaacggcaggcaagacatgtggatctgccggcaatcgagattctggaaataaagtttcccgtggtaaaattccgcgtggaatgttccaagggaacctatatccgcagtctctgtgccgatattggggaaaaactgtgctgcggcggcaccatgcagagcctcgttcgcaccagagtcggggaattccggctggcagatgccctgacacttgcacagctgcaggaacttcgggacacggagaggctggaggaagcactgcttcccacagaccgtattttttcggattttcccatgttgcatgtggaggaaaagtggcggaaactgatcgataacgggaatgctttttatccgggacagactgtggaacagaccacacatccggcaggagagtgggtgcgcatctacagagaggatgacagcttcgtgggcatttatgcgtatgatgaaacgaaggaatggtacaagcccgtgaagatcttcccaagtaatacagaaagcaggaaatagacttggaaatcattgcaggaacaacagacttttatctggaaaaagatacagcagtagccatcggtaaatttgacggagtccatctgggccacaggagacttttggaagagattcttggccgaaaaaaatatgggctggcggcgtgcgtgttcacctttgaccctacaccggcagtgctgttcggcctgtctgacggtaaagaactgaccaccagagaggaaaaaagacgcctgtttgaacgtctgggaatcgacactctgatcgagttccctcttacgaaggagactgcagccacagagccagagcgttttgcaacagagattctggccaaacagatgaatacccggtttgtggcggcaggcgaggatctgtcttttggcaagaacggcgcaggaaatgccgaacttctggagagaatggcgccgcatctgggcttttgcgtccagaccatagagaagatcgaagtgaacggcatcgaagtcagctccacttacatccgcaagctggtggaagagggccggatggaagaggccgaagagatgctgggaatgccttatacactggtgggagcagtggagcatggcaatcatatcggacataccctgggatttccaacggtgaatctgctgcctcccgcaggcaaacttctgccgcccaacggagtttactatgcggcggtgcgccataatggaaagatctataaggccatcagcaatgtgggaaccaaacccacggtttcttctgaaaaagtgatgggggtggaatcttatctgtatgattttgaccaggacatctacgggcaggagatcgaggtggctttgaaaagatttcggcgcccggaacgcagatttggatcgctggaagaacttaaggagcagctggaccgggatattgcggatggtcgaaatgcgtaggaaaaacagctgttttacgcaaacacggtagaaattgcgtaaagttttgtaaagaaaagtaaaagaaaagtaaaatttacattgcaagtttttattctatctcgtaaaatatattttggattgtttatataagaataaatttgaaaattattgttttggtttttcggaagagaatcaagagagattgagggattaaaaatgagctttggaacaatattgacaatggcaggaggtctgggactgtttctattcggaatggagttgatgagtgattccattgagaaggtagcaggtgccagacttcgacgtattctggaaatctttaccaccaaccgtttcatgggtatgatcgtcggtattatttttaccggtatcatccagtcttcttcggcatgtacggttatggtcgtcagcttcgttaactctggtctgatgaatctgtatcaggcggcgggcgttatcctcggtgcaaacatcggtactaccattacttcacagctggtatcttttaatttatccaaaatagcaccgctgatcctgctggtgggtgtggtcgtgatgatgtttacgaagaaggaaaaggtccgtaaggtggcggaagtggtcgttggtttcggtatcctgttcgtaggcctgagcaccatgtcccaggctatggcgaacatgaagaatgagccacaggtggtcaatctgctgatgtctctgaagaacccgttcttagccacattgatgggatttgctctgacagccattatccagagttcgtccgtaacggtcagcattgtgttgttgctggctaatcaggatctgctgccgttacctattacgctgtacattatcctgggatgtaatatcggtgcctgcgctaccgcaatgttagcttccatgaccggtaaaaaggacgcaaagagagcagcactgatccatctgctgttcaatattatcggtacggttattatctacattgccctgtttgtggcaggagaccagatcgtggaattgatcaagtccatttccgcagataacggtcgattcgtagcaaatgcacatacgctgatcaagattgcgcaggtaattatgctgttcccgttcaccggatggctggtcaagatgacttacctgatcgtaccaggcgaggatcagaaggttggctacagagagagctatcagttaaaatacatcggcgacaaagtggtgttcaaccctgctaccgcagtggtagaggttatcaaagagctggagcgtatggcttctctggcagaggagaacttaaaccgtgccatgaatgccctgatcacgctggatgaagaggacattgaggaagtctacgaggtagagaaaaatatcaacttcctgaatcatgccatcacggattatctggtgaagatcaaccagaccacgctgcccatcgaagacttgaacagtctgggtgccctgttccatgtggtgaacgatatcgagcgtatcggtgaccatgcggagaacgtggcggatgctgccagacagcgtaaggaagaaggcgtttccatcagtaaggaagcccagaaggaactgggagatatgttggaaatggtcaacaagatcatccgttatgctgtagaaatgttcgccaagagcgatgaatcccatatgcaggagatcgttactctggaggatcaggtagacgagaaggaacgcgaactgcagaagaaacatgtagagcgtctgaccaagggagagtgttctcccgaagccggcatgatcttctccgatatcgtatccggactggagagagtagcagaccatgccaccaatatcgcttttgccattaccacagaagaggatgccgaagacggcgatatcaaacggtaattaactagaaagttagcatagctacgagccatgcaaaaatagagtggaacacctcgatgggcgcttgcgcacaag

SEQ ID NO: 5715 - DNA, 16169 bp, Unknown
  gut microbiota DNA sequence
actggacagagtgcaggccggttcgctggaggaacaggtggtggaagaactgccggacggcggacatgtggcagcagtggctgtcagcgtggagaacaacacgatcctgtactggcaggtgtatgatctgaagaagatcgacaccatatccttttatcagatattggatctgctgcgggataccagcgtagatatttacagagatcgtatgtcctgcttcagcgcggaggcagagagcagaaggagccgttccgctgaggaagagatgagtcggaatctccatactattgaggcgaccacggagatcgtccagctcttagatagtgatgaacagattgaacttgccatgaataagtggctgaagatcctgtcagagcatatccgtgtagatactgcggatatttttcaactgcattccgacacagataccatgaacgtggtctgtgaatggcgtgccccgggacagatttcttattttgacaagataaacggagtggaagtatattccttccttcatgctgagaaaccactggtggtatccacggacagcctgggcaatgccggctcgaaggaaatcgaggagatcggcatgaaggccgtgatgatcttcccgatcctgaagcaggagagcggaaatatggtgctgtctctgaatcatagaacccaggggcatgtgtggagcatggcggagatcaagttcacagcggatgcagtgaagatcctgcagagcatcctcaccagaaggatccagaagaattccctggccggttcctacgcagcattggaggagattctggacaacgtgggctgtgccatttatgtgacagaccagaccacaggacggatgctgtttgccaatcagatcctgaaaaatacctttgccaaggaactgctggatcacaattttgatgctttgttacagagcagtgtccgcaaggaaaaaaccaagtcagtcagtgtagtctaccatgcggagaaggagacctggtacgatctgctgtgcaaggagattgcctgggtggacggtaaaaaggccaatctgtactctctgtatgacattacagataaaaaactgtaccaacgccgcatcgagcagcaggcctatacggatttcctgacgggactgtataatcgtatgtgctgtgagagggatctggcaagacagatcgatcaggcgaagaagaccggcggcgaaggtgctctgctgtatctggatctggatgatttcaagcatatcaacgacggactggggcaccagtacggagatgtgctgttaaaatccatttcccatgcattaaaacggatcaacggcatcgagaatacctgttaccgcatgggcggcgatgaatttgtcatcgtgatcccgcccgacagctattcccggtttgaaaatattgtggaagatattaaaaagatcttcagcaagccctggtttttgaaggacgcggactattactgtaccatgagtatgggtatcgtcactttcccggatgccggggattccgtggctgatctgatcaaaaaagcggatattgccatgtacgaagcaaaaaagaccggtaagaaccgggtggcaacctactgcgagggcattgattccgtatcgggacgccgcctggatatggaaaagaacatgcgtgatgccacggtggagggctaccgggagttcgaggtctattatcagcccatcattgatattcagggcggcagggatgtctgcgccggagctgaggcactgatccgctggaacagtgcaaagctgggatttatctccccggcggaattcatcccgttggcagagtatctgggactgatcaatcccatcggcaattatgtgctgaccgaggcctgcacccgctgcaaacgctggaacgaatccggttatccgaattataaagtgaacgtaaatctttccgtagtacagctcctacagccggacatcgtggagacggtggaaaaggcgcttgcggacacaggtctgtccccgaagaatctgaccctggaagtgacagagagcctcgccatcaacgatatggagcgcatgaaggagatcctgaaccggatcaaatctctgggtgtttcgctggcgctggatgatttcggtaccggctactcctccctgaatcatatccgggagattcccattgatgtcatcaaggtggatcagagctttgtcaaagatctggcggaggatgcctactcccagtcctttatcaaaatggtggcggagctggcggagaccatcggcgtcagcgtctgcgtggaaggtatcgagaccccggagcagttcagagtattgcagggtatgaaggtcaaatacattcagggctattattttgaccgtcctttggagaggcatgcatttgaggcaaaatatgtgaagtaacagttcagccatagaatagtaaaagcgatgctccgggtgcttgcacacggagcatcgcttttgctattctatgagcggagcgcccaaaacatgaataaaagatgagctgcaaagcagcgacggctgcgcagcagacgcttttatgaatgttttggggcagaactgttacggaagcaacaaaattatcaaaatccctcttgtcaagtatcggggaaccatgctactattaaaacagctacacgactggcggagcgcagcttgctgcagtggagatacccacagggagtgtagaatagtgaaagccgaccgcctgggcaccgtctatttctggtgcttaggcggttttttgtaactattcagagctggtgaagcgaatagttacgcgatatatagtaaacggaggaaaaactatgttacaactggaacaggaattgaaaagcaatgcttatcccggcagaggtatcgtgatcggacgttctgctaacggtaaatatgccgtgaccgcttatttcatcatgggaagaagcgccaacagccgcaatcgtgtgttcgtgacagaaggagagggaatccgtacccaggctttcgatccttccaaactggaagatcccagtctgatcatctacgcacccgtacgtgtccttggtaacaagaccatcgtgaccaacggtgaccagacagatactatctacgagggaatggacaaacagctgacctttgagcagtccctgcgcagcagagaattcgagccggacggccccaactatacaccgagaatttccggtatcatgcatatcgagaacggcaagtacaattacgctatgtccattctgaagagtgacaacggcaatcctgattcctgtctgcgtttcacttatgcttatgagaatcctcttcccggagagggacgtttcattcacacttatatgcacgacggcaatccgctgcccagcttccagggcgagccgaaactggtagagatccccgatgatatggatgcttttaccgatatgctgtggaacagcctgaatgaggataacaaggtctctctgtttgtacgtttcattgatatcgagaccggtaaatatgagacaaagatcgtgaataagaatatgtaaagtaggttgtgaagacgcgttttgcgaatgcaggttctgaatagttaatatcgtagaatagaataggagaaaaataagatgaacgagattcagttaaaatacggatgtaacccgaaccagaagccttccagaatcttcatggaagacggcagtgatctgccggtgaccgtgctgaacggcaagcccggatatatcaatttcctggatgctttcaacggctggcagctggtaaaagagctgaaggaagctacaggacttcccgcagccacttctttcaaacatgtgtctccggccggtgctgcggtaggacttcctctgagtgatactctggcgaagatctactgggtggatgatctgggagagctttctcccctggcatgtgcttatgcgagagcacgtggtgcagacagaatgtcctccttcggtgacttcattgcattgtctgatatctgcgataccgataccgcccgcctgatcaagagagaggtatccgacggtgtcatcgctcccggctacaccgacgaagcactggaactgctgaagcagaagaaaaaaggcgcctacaacatcatccagatcgatccttcctatcagcctgatcctatcgagcgcaagcaggtatacggcatcaccttcgagcaggggcgtaacgaactggatatcaacggcgatctgctgtccaatatcgtgactgtgaacaaggagatcccggagagtgccctgatcgatatgaagatcgctctgatcaccttaaaatatacccagtccaattccgtatgttatgtcaaggatggtcaggctatcggtatcggtgcaggacagcagtctcgtatccactgcaccagactggcaggcagcaaggcagacaactggttcttacgccagtctcctcaggtactgggcctgcagtttgtagacagcctgggcagagccaaccgtgacaatgccattgatgtctacatgggcgatgagtacatggacgtgctggcggacggtacctgggaaggtatcttcaaggtaaagccccctgtatttaccagagaagaaaagagagcatggcttgacaaaatgcaggatgtgactctgggaagcgatgcattcttccccttctccgataacatcgagagagcacataagagtggtgtaaaatacatcgcacagcccggtggatccgtgcgtgatgcagatgtgatcgcatgctgcgataaatacgatatggtgatggcatttacaggcatccgtctgttccaccactaagacagattttgcgggcaggactgtaacaggacctgcctgtaactattcagagccatgtaaatctgtaataagctgaccatttatggtcagacttttagagatttatatggcgaggtaaccacatgagcaaaaggtgagccttgaaaaggcgattttgcgaatgtggttctgaatagttttttgaggaagaagaggaaagcgtagttatggacagacgaggggatgcaaagagcagagaaatgatgctggatgaattattgggctatgaccatgtgacgatccagtgccacgacaatccggatgcggatgccatagcctccggctatgggctgtactgttttttccgggacaagggaaaggataccaggctgctgtattccggacggaataaagtcagaaaggccaacctgatgctgatggtggagaaactgcacattccgctggagtaccagcctcagatggaagatacagtagacggactgctgatcacggtggactgtcagtacggtgccggcaatgtgacgaagatcccggcggaggagatcgctgtcatcgaccatcatccactggaagtcatctgcaccgagcggatgcgtctgcagcccaatatgggaagctgtgcaaccctggtgtggacaatgctgcaggaaatgcattatcccgtggaaaaaaacagagatctgggaactgcgctgtattacggcctgtatatggataccaaccagttctccgaactgtcgaacccggtggacatggatatgcgtgagagtctgaattttgataagaaccagatatccctgttccgtaattccaatatttccctgagagagctggaaattgccggtgtggcaatgctgcgttgcaattataacgacgattaccagttcgccgtgatccattcccagccctgtgatcccaatgtacttggcctgatcagcgacttcctcctgcaggtggcgggcgtcaatacctgcgtggtctataatgaggacagcggcggatacaaattttccgtcagaagctgtatccgggaggtcaatgccagcgaactgtcggattatctttcggagggcatcggttccggcggcggacattacgagaaggccggcggctacattagtatgaaattatatgaggaaaaatatccaacactgcattccgaagcgtatttcaataaccgcatgacgcagtatttcgatacgttccggatcctctacgccaaagaccgggcattcccggtaagtgagggcacaagatatcagagaaagaaaatccctctggcctgtgtgagggcctctgatctggcggagcttggcagggtggtgtccgtccgcacccagaacggcaccatggacatcgataccagacagaatatctgctacacgctggagagaaacggtgaacttcacagggtggcgggagagcggttccacaggatcctggaactgtccgacgctccggtgtccgaggactactgcaggaatatgacatacgttcccagggtcaaggacggtacggacggcagaaatcatctgatcacggaatatgtgcgcatgtgcatgccgaaggatgagttccgcatctatgccatccgggtgacacagggggtaaaagtgttcccggtatgggacgaggacggctatatgaccggaagggccggagattatctggcggccagtgaggatgatctgcacaatatcttcatcgagacggagcagaatttgctgaattattttgaagagaagggtttataaaagttttcttgtgtggtaagataaaggatacgaaaacagtattaagtaaacgaaaggcaaggacattaccatgagcgagatcgaaaaggaaatcgtagattccgcagaagtaaaggaatcgaagaattttatagagcagatcattgagaaagatctggcggagggcgtatacgatactgtacacacccgtttccctccggaacccaacggatatcttcatatcggacatgccaagagtattctgctgaactacggcctgtcccagaaatataacggcaaattcaatctgcgttttgacgataccaaccccaccaaggagaaggcagagttcgtagagtctatcaaggctgatgtaaagtggctgggagcagactgggaggacagactctttttcgcatccaactattttgaccaaatgtatgaagcagccgtaaagctgatcaaaaaaggcaaggcatatgtctctgacttaagtgcggagcagatccgtgaatacagaggaagcctgaccgagcccggcaaggaagatcccggcagcaccagaagcgtagaagagaatctgacactgttcgaggatatgaaggccggcaaatacgaggacggcactaaggtactgcgtgcccgcatcgatatggcctctcccaacatcaacatgagagatcccgtcatctatcgtgtggcacatatgtctcaccagaataccggtgacaaatggtgcatttaccctatgtacgatttcgcacatcccatcgaggatgctattgagggcgtgacccattccatctgtacgctggaatttgaggatcacagacccttatatgactgggtggtaagagaactggaatatcctcatcctcccaagcagatcgaattcgcaaagctgtacctgaccaatgtggtgaccggtaagcgttatatcaagaagctggtagaacagggcatcgtggacggctgggatgatcccagactggtatccatcgcagcactgcgcagaagaggattcacaccggaatccatcaagaagttcgtagaattgtgcggtatctccaaggcacagtcttccgcagattatgcaatgctagagtattgtatccgtgaggatctgaaggcaaaggcaccccgcatgatggctattctggatcctgtgaaactggtaattgacaactatcccgaaggacagacggagatgctgcctgtagtcaacaatccggaaaacgaagctctgggcagccgcgaggttcccttcggcaaagaactgtatattgagagagaggacttcatggaagagcctcccaagaaatatttccgtatgttccccggcaacgaagtgcgcctgatgagtgcttatttcgtaaaatgcaccggctgtgtcaaggacgagaacggaaaagtcgtggaagtacattgtacctatgatccggagagccgcggaggcaacagccccgatggacgtaaagtaaagggaacgatccactgggtaaatgcagagcagtctgtaaaagcacaggtgcgcctgtatgagaatatcatcgatgaagagaagggtgtatacaatgaagacggaagtctgaatctgaaccccaattctctgaccacactgacagagtgccgtctggagcctgcatttgcacaggcacaggcgtatgaccgcttccagttcgtaagacagggcttcttctgcgtggactacaaggataccaagccgggagaactggtatttaaccgtatcgtatctctgaagagttcttatgtactgcctaagtaagcagtaggacaaccgataaggggaattgggaaagttgtattcgtattgtcaccgggaatggacagtacaaaagaaaaggagagacatatgtcggacaaattgtttggactggccggtctgggtctggatgacctggagaacatggatatttacggacaggataaaaaagaagagaaggcagcagccgaggccccaaaaatagaagaaaaggatctgatctttgacaagacatttacctgtcctgtctgcggagaagatttcccggcgaagatcatgaagaccggaaaggcaagacttttaagtaccgatcaggatcttcgtgcaaaatacgaaggcattgatgcggtgaaatatgatgttattctgtgtccgcattgcggctatgcagcactgaaccggtatttcaacagcctgaataaggtttatataaagcagatcaaggaaaatatcagcagtaaagtgcagctgcatacctacgatgacgatatttacagctatgaagaagccattgagcgctataagctctgcctggccaacgctgtggtaaaacgggcccatgccagtgaaaaggcttatatctgtctgaagagcggatggctgatgcgtggttatcaggagcatctggaagagtccggggatacggatatggccagactccgggaagtgaagaccatggaggagacttatctgaagaacgcttacactggttttacggaggccctgcagaccgaaggattccccatgtgcggtatggatgagatcacggtagaatttctgattgcggtacttgctgccagattccagaaatatgatgtggccagccgtatggtagccacgatcctgacgtccccttccgccaatgcccggactaaggacaaggcaagagagttaaaagaccagattctggaagaactgaagaaccagaaaaagtaggataaccgtatgtatgatatgacgatccggctgcgtacagacagtgacaaatgtctgtaccagcagatatatgagcatatacgacaggaaatcagggaagggaagcttctggcaggagagaggcttccctccacgcgttctctggcagaatatctgcaggtggcgagaagcactgtggactatgcctacgaccaactgttaagcgagggatatatcgaggcacgaccttataagggctattttgtctgccgtctggaagggatatttgccatggaaccgcgggaagagaacgaaccggagccggacacttcaggagaagaatctgttccggaagagggatgcattgatttttctccttatggtattgatatgaacggtttccctgtgggcgtatggaagcggatcacgaagaatattctgaatgacaacaacagtgacctgtttgcgcagggagaacctcagggagattatgatctgcggctgaccatcagccggtatctgcattcttcccggggggtgaactgccgcccggaacagatcattgtaggagcaggaaacgattatctgctgttgctattggagaaaatactgggcagacatgtgggcattgccatggagaatcccacgtacaagcgggcataccgcatctttgaatcttttgcctatcgcattcacacggtagacatggatgataagggaatgcgggcggacagactttcgggactgcctgtcagagtggcctatgtgatgccttcccaccagtatcccaccggtgcggtcatgaccatcggcaggagagcagaactgcttcgctgggcggagagggagccggatcgttatctgatcgaggacgattacgacagtgaattccggtatcggggcaagcctattccttccctgcaatcttccgatgaaaagggaaaagtgatctacatcggtacattttccaaggctattgcaccggcaatccgtgtcagctatatggtattgccgggggatctgctggatatctaccgcagggattgctctttttattcctgcacggtgtccagaatcgaccagaggatcctgaatgaatttatccgggacgggtatttcgagcggcatctgaataaaatgcggatgcgctaccgggccaaacatgacctgctgctggccgggctggaaccgtttaagaagcagtttgtgatctccggagaggatgcgggactgcatcttctgttgacagcgaaagggaatgtcacggaacaggaactgttggagagagcagcggcggagaaagtgaaagcctatgggatgtcagagaatatggtggaagccacaatgcggaaagctaccgtgctgttgggctttggaagtattgatgaggcggaaatgcaggaaggtctcagacgcttgcaaaaagcatggctctgagaccttcgaaatagaacgattattcttcatttacgggaggctcttcgtcctcggcatcttcttcatcgaagaactcttccacgtcttcgacggtctcgccctcttcgccggacaatccggtagcctgatcggtgagcggtgtgaaatcagatgcctctgcggaagcgggtgccgcctcttcggaagccggtgtggactctgtgcctgtctcttccttcggggcagaggtctgcacgggtgtattcagaggaacataattgcgggagaactcggtactcttgtccagatcctcgtggaaatcatcataatcatcatctgcatcggaagattccttcagctgagaatctttctgttgcatatagtagtaagcagctgcggctgcggtacctactgctgcggtaaacagcagaaatttgccaaattttttagccatagggttgctccttccatgttgtagtgtatgtaactggtctgaatttcatgcatatgcccatacagttacataataaaccttattgatgaaaatgaaaagggatatgttgcgatatgaatgagaaattttttgatttaaaaaaagaaaaacaggaccggatgatcaatgcagctctgaaggtatttgccctgaacggttaccgtcatgccagtacggatgatatcgtgcgggaggcagccatcagtaagggattattatttcattattttgagaacaagctgggagtctatgcttttgtctatgactacagtgtacggtatctgttgctggaattgtccacagcggtagatgcgaaggagacggatctgttcactctgatgcagcaggtggagaccgggaaaatgcatgccatgtgcggctatccttatctgcagccgttcctgaaccgggcacaggcagagaatgtcaatgaggcactggtggcggtagaagagcgaaaacagcagatggaagaggcttatgagaatatttatgccagagcggatctgggaaaatatgcggctgcggaagacgtggtgaaacttcgtaagatgatggaactgaccattaagggattgatgaacgagagaatcctggaagatgcctttcagccggagatgctgtatgaggaaattctggagtatctgcaattaagcagaagactggcggaacggtccggacagccctctgacgaagaaattacggaaaaatagcatcataattgcatcgtatttttgaataaaattttgtggctatttagacatcttataggcgggatctgcgggatatccgccttttaatttctgcataccgcgctggatggcatccctggagctcttccagtcggcgtctttgttgcgatagtcgaatttttccaccagccaggagacgtcttcggaaatgcgctgcatgttggattccatgaccggcagcaactgatcgtaaaagtcctgtttttccttatcggaaagtttgcggtcagcggcttcgcagagatcgccgaagtggggcaggcagaagcctttgccgtttatgactttattgcggaagttttcatcatttttccacaggtagaaaaaggtgtccagatatctggcgtaggtatctttatactgggaacagatatagcaggaatcctcttttgcacggatccacatgccgatggtattttcattgctttcggcttttttgaatttacccaggagagagcttttgccggggcggaaggaggcaaattcctgctgcatttcccggatcatgcgctggtagtgggtctttaagatccaggcattgcccagagtattgccgtagtcgaacattttctgaaaatgataccggcagaagcctgctttgtcggtttgttcacggatgtccgcttccatataagaggaaccggagcctaacacgaaatccagaagatcctgttcaatactacggtggataaagcagaaagggcattcgtcctgtgcatttatggcatcgtttaaagggatggtatataactgttctttcatggaaaatatcctttctcgggcgcagccctgtggtgttaaaactattgtaaacgatgcggtgaaaaattgcaaaaagattaagcagttgtaaaattctgtcatttaaaattaagaattgttttgttgtaatagaaacggtttcaagctactatgatagtaagacagataaacagaaatagaaagatgtgatttttttgatattcagcagcattgaatttctgctgtggttcctgccgatctttctgatcgtctacgggatcacacctcgcaaatacaggaacctgacactgctcgtgggaagcattgttttttatgccatgggagacgtcaggtatcttccccttttaatgatatctatattgtgcaattattttctgggtcttcatctggcaaaacgcagtcctaagacgttgtggcggaaaaagcttctgctgatcctgacacttggcgcgaatctggcggtactgctctggttcaaggactggggaggctctgcggggctgccgctggggatcagcttttacaccttccagatattgtcttatcagatcgatgtgtaccggggagaggtgagcagggagtattcttttttgaagtttgctacttatgtgagcatgttcccgaaactgatctccggaccgatcacaagatatggcgatatctcggacagcctgacggagcgcactttcacggtgcgggggctggaagacggtatgaagctgtttattctgggactggcggccaaggtgctactggcagaccgggtgggaatcttgtggcacgaggtgcaggtgaccggatttgaaagcatctcgacaccgttagcatggctggcagccatcgcctattccatggagatctattttgatttctggggctattccctgatggccatgggactgggccggatgatggggatcgaactgccggccaacttccgcagaccctatatggccagaagtgtccgggatttttaccgcagatggcatatgacgttgggacagtggttctgccgatatgtgtatattccgttaggcggcagcagacagggagagcttcgcacgatttttaacctcctggtggtatggatgctgaccgctttctggcatggtgccggctggaacttcttctgctggggcggactgctctggatctgcatcgtactggaacggcagctgggcagattaaaatttgtacataaaatgaaggtactgccgcacatttatctgtggctggtcatcccaatgagctggatgtgctttgctatcacggacctgtcacagttacaggtctatctggataagatgctgtggctggtaccgggcttcagcggcggttacgaggatgcctggaaggcactcagtacctatggaggactgcttctggtctccggactggcctgcacaccggtcattgagaagctgtaccataagtggcaggataagctgccggtgaaggtgcttctggcggggctcttctggtattgcatctggagacttttattagaaggaaataatccttttatgtattttagcttttaggaaaaggtcattatgcaatgaatcatgcagaaaataaaaatatttggtcgaaaatgaaggaaaaattgcataaatactcctttttgggatgtcttttgctggcgggaattgtattctttacctggacggataactggcaggtatatacggaaccgctgcaggagacctatacgaaaggagtgcttctggcggagcagctggtggaaggaaaatggccgggaatatccggggaacagagtgatgcaacgggatccgtatccggcaatgtgccgggggaaaacgtacagaccggagatacagtgagtgacgggaaccagacggatcagacgagggggacggtgcagagtcccgctacgggagaagaggccgcaataccggagaccaccggaacagagacgcaggatcccaccgcgacggttcctgtggaagagacaccgcaggaagtggtctatcacacggtggatgacagttattttgatgatgcggtatttatcggggattcccggacggtaggtatgtatgagtacggtgggttggaggagacatccacgttttatgcttccaccggactgacagtctacaagatgttcgacagtgccattgtatcggtgcctggacagaagaaaaagatcacggtggaggaagccttgtcggagaagcagtttgccaagatctatctgatgatcggtatcaacgaaatgggtaccggcacagtggaatcttttatgaaggcttacggggaagcggtacagcatttgcaggaattgcagccggatgcggtgatctatctgcaggccatcatgaaagtaacaacggaacgctccgaacagggggactatatcaccaacgaaggaatcgaagccagaaatgcagaaatcgcaaagctggcggatgaccggaagatatttttcctggatgtaaatccgctgatctgtgacgagaccggtggaatggtggcttcctatacttatgacggtgtgcatctgaaggcacagtatattcctatctggctggatttcctgaaagagcatgcggtggagtgattttcctcttgactgtagaacggtgaaaagctatcatgtaactaatagagtcacataggtgtgggcagatagaggactatctgcccgaatttatgcgacgaaaaatagttacatgttcacatgtctatgacacaggaggaaaaaaatgagcgagaagactacactcggcgaaaacggcatttacgatgccagatccttgggcgtgcccaagatgcttctgctgggacttcagcacatgttcgcaatgtttggtgccaccattctggtgcccatgctgacaggtctggatgtttccacaacattgttatttgcaggtctgggaactttactgttccatctgctgaccaagagaaaggtacccgcattcctgggttcttcctttgcattcttaggcggttatgccgcaattgcccctatggcagacggagcggacaattccgcactgcttccttatgcctgcttcggcgtggcctgcgcaggtctgctgtatctggtattatccctgttaatcaagattttcggtaccggcaaggtaatgcgtttcttcccgcccatcgtaaccggccccatcatcattgccatcggtctgaccctgtcccagtccgctatcgacaactgttccgcagactggctgatcgcagtggttgctatcgcactggtagtgatctgcaatatctggggtaagggaatggtgaagatcgttccgatcatcatcggtgttgtcggttcttatgtgctggcagctatcttaggccgtgtggatttcgcacccgttgcggaggctgcatggatcggacttcccatccactggaatgagactgctttctgggcactgtccgatggtaacacttctctgttaattacttccgtgatcaccattatgccgatcgcactggctaccatagtagagcatatcggagatatctccgctatttcttccactgttggtatcaactatatcaaggagccc

SEQ ID NO: 5716 - DNA, 1206 bp, Unknown
  gut microbiota DNA sequence
tggctcagtcggtagagcgtcgcattggtagtgcggaggtcacgggtccgattcccgtcagcagctcttttgaaaagcgtggaaaccttgaaaatacaaggtttccactttttttgtgtgcctgaaagtttgtagacgatggtagacaaccagaataccagaatacaccagatgtacacttgcacgggccaacgattcagcttacaatataaaatagtaaatttatgttcggacacaaaccaacccggtcagatgaggaaaacgtatggaggaactgcacagagtatgtaaaaatttcacacgtcatgacaagaagacccgtacgatcctgctgtgcgagatgctggagtacacgaatgtatttttggaggcggcattccgggcggaggggtattccttcgagactttaaagaacccggtgaaggaccgcactctggcacttcgctatatcagtagcgactattgctatccgacggtattgatccttgcacagttcctggaatatctggaaagcggggaacgggatccggaggagatcaccttcatggagccccaggcgggcggtgcctgcagggccggaaatatctacaatctgctccagagagtgctgtaccgcatggtagagcagggacagctggagtatgcccagattcccgtaatctccctgaacctcatgggagaagaaaaacatacaggctttcgcattactccgtcactgttgtccggtgggattgctgccggatgctatggcgatctgatcatgtgcctgtaccagcaggtgaagccctacgaacagaatccgggagagacggaccgcatccgcagtcaggtggaaaagaaactgtgcgagagcattcggagacacaggaacggacggcacaccagagagaagaattaccggtatgcctgcgaagtattttcgaaggtaccggtgaaacccgggaagaaaaagagagttggcatcaccggtgagatctatatgaaatattcgaaactgggaaatgacgatatcgaaagttttctgctccggcagggaatggagccttacagtggtggtttcatcaactactgtctgtatttggtggatacagagcggtataaggcagaaaagtaccagcgcaatcccatcatggcgaaagcctgtgcctttgtgctccaccggttgtgtgaggcacaaaaacatctgcttacggtgatcggggagac

SEQ ID NO: 5717 - DNA, 22879 bp, Unknown
  gut microbiota DNA sequence
ctttttcccgctgcgccctgggtatttcctatccttttcggcctctataccctttttcccgctgcgccttgggtatttcctgcactttccggcttttcataccctcgcaatactgagattttgtgtatgtcgttctcttacaatacacaggatagcataggaaaacgttttccgcaaccttttctttaattttcctgattttttgtgcaaaatagcttaacagataatgtccttatagtacattttcacgatactgtggggcatgattacctgatgcccttcccctccgttcatcagctggtgtacctcttccacggctctgctggagatgctgtagaagtcctgccttatggtattcatctgcttgccgacatatcccatcagggtgataccatcgaagccgcacaccggacggaaaatatccatatcgatcaatgcattcatggcacctatggccatcagatcggaagcgcagaccaccacatccttattcttcgcatatttcaatgccacgtttcttgccgtcagctcactgaagtctccctgtctgaccatcatggtcagatccagatccttcaccagacgcttcatccccttcaatctctgatccgtgacataaccgtctcttctgcccgcaatgtatagcactcgtttacagttgtcatccagcacggtcttcttcgccacatcatactgggcctgttcctgatcaatgctgatggatgtagtcctggaattgacaatcggcgcatccactaccacacaggcaaactgtttctcccggatcagcttctgcagcaccttgtcctccttagacatgccatagatcaccacgccggagatactctgggacagaaaagatcttgtgatctcttccgccgtcatccccgcgatcatggacggaaagatcgtcacaacctccacgttcagttccttggccttatccagtgcccctaccagatactgcatgaagatctggtcaatggcctgagtctgtctgttaggatccagtaccagtgcgattcttccaaactgtttggaggaaagtgcagcggcaatggaattcggaatataattcaactccttgatggcgtcctgtacctttttcttcgtctcttcactgacattaggatagccatttaagaccttggatactgtggaaatagccactccggcatgttttgcaacttctttgatcgataccataaatcccccgttccggtcgcagttcctgcgcccgttgctctccgttaccgcagcaaaatgcggtctcgttccatttgacgtttactcatatattctctatactataagttaacggtagtttcgtcaatgtacagcatttacgaaatatagtgtgattttttggaaaaggttttccaaagcataatacctcggacaacgcaagcatcagaaaggctacagataccatggcagtaatcaaaagtgtggaagaaaaatatatgaaggaagctctgaagcaggcaaaaaaagcctatgccctgggggaagtccccatcggctgtgtcattgtacatgaaggtaagatcatcggtcgtggttacaaccggagaaatacagacaagaatacattggcgcacgcagagatcacagcgatcaacaaagccagcaaagtgatcggcgactggcgtctggaagaatgcacgctctatgtgaccctggaaccctgccagatgtgcgccggtgccattgtgcaggcccgtatccctgaagtagtgatgggctgcatgaatcccaaggcgggatgtgcaggttcgatcctaaatatactggaaatgccccagtttaaccatcaggtgaaggttacccggggcattctggaaacggaatgcagccagatgctgaagactttttttgaagagctccgcatccggaacaaacaggagaaagctgccagaaaggcatcaggcgatctctcgtaagctttcttcctgtgtctggttctgttcggttgtttttcttctatgcttcggtaatcgggaaatcgctcttcccgtttcataaagtcccatcggcacaaagaggatcaaaaatacatagtacggaaatacatatctgctctgcgcttcccagatgatactgaacaggaagccacctactatgccaatcaacggcagccacaatgctgtcggaatttcttttttttgccaccatcttccgcacaaagcaattccaagtacaagtcctgccaagtatacgatactctggtaataattggccagcttccatacggtttcatgtatgttcccatagtacagactggtaatcccggaggacagcggttctccatccgtatcaaacgactctgttgccttgaggctggaaaacagcggttcgatccactgatcttccagttttctcttaaagaaatctctggccatagccggattctcccggaactcccgcaatcgttctcgaatatattcctttccttcctgtgcggcaggctcctgttgaaaatcatgttctgcaaacgtggtttgctgatagcgattgtacaccccggccatgccatccgtctcctgtaatcccatcgcaatccagagaatgctcggaatgccaatgtcactgggatatccggaacggtattcatacattacatctaccgctttcaccgtcagtgctgccgtcagaagaattgcaaaccctgccagcagatattgtcccttctttttcttcaggcagaccagaactgcataaattcccactccaatgagtatgatccatgtatttttccgggcaagcacagcaatccctgccacacatgccgccaacgcaatatacctcttcttctcataatgttcataagcagacaccgcccagaacattaccattccaaagctgatactgagcacgtccccgtaaatatacggtaaatacagcaaaaaaggaatacagcccaacatcataatacaatatacgattctaaatatggctctgtcggtattcagtttcaggaaaccgtatcctgccagaatcgccagtacccaccatattacatgcaggatttttgccggagtataattgaaatttccaaacagggcaaacaatatctcatacaatattcccagccctttttgctgttgatacatcccgacatagcctccgggttccagcatgataaaattaccctcccgacaatacgccgcaaacgccgttgcattgatctgatctccctcgggataataggggttcttcagaacataaacacacccaagaataaatgtcgtcatgccagttgccagtaacgtgtatctacagattttttcctgtttttcctgattttgagcattcagccatttatctccctcatagacaaggacagatgtcagcaggaaaataacaaaatgtttccaggtactgtcttttatcaggagatttctgatgctgtaatccaccgttccgtaataagaataccgacaggaccaataactcaggaccaaaagaatgggaatcagacagacaagaaatattcccaacagaatacggtatattttttccattaatgttccctcatttttatcttatagttccacataatttctgtcaccgacatatactgccagcttttcattctcatattccagtatcggtgcttccccttccggaaattgctgttcaaaggcttcacgcatttctgtccgtacgacgtaagcggtccgcatttccttgggcaacgtcggtggataccatttcatactggtgagccaccagtatccggaaagactggccatggtataggaatgtcccatcgtcacccggccgtccgtgatcagacagatccgttcggcatcccagaattctgcatatccgtagtcgattcccgcttctgtcagataatccgccacttcctgatattccttcaggttatcctgtgtggtggccgcttcacagtaggtgtatttcagattcagcaccgcgaacagcgctacggccgttaagatcagaccagcgaacaccggctgtccttccgacatatgatccaccatcaccgctaccagaacagctgctgcgaaccatgccatgaaaaagtaataatgggccgcctccgcgctggtgatcccgatgataaatgctgtgactcccacagaagcaaggagaattgtcagtgcatctttttgtctgtctgtgctctctgtatttttccggaacacataccagagtccataccccaacaggatcaggaacacccagacaagaagctgcatcagagaagcaaagctccctacctttgcatttcccaccagtccgaagttctccaacagggctgccggaaccccaagaagcagtttctctactgcctctcccggctgcagcagatagactgcataatctcctctgccgccgtacagacaggataccagaaaagcaagtgcaagacttcccacataggctgtggcaagataacgtccaccgggcagcttctgccggagatgtccggattccatgaataaagcgatcacttccactacaagcagtggcaggatgatgacctgcagacatctctgtcctccacagttcagcaaaactgcggcaataaacaataccagccactccagaaaggtcttccggttcatctgccggttttcttttaatttcaggtaaaacaggatattgaaaaacagaaaaatgccatgaaacacataatactctgcaaataggaataaaagcagcgttacaaaaggaaccatctgcccctcattgcgaaaaccgttgattggcagcgcacacaataccagcaatgccgtaattgatgccggtctgctcaaagataattttctcagaaaaaaataaaatgtccccagcaaaatcgcacccaatagaacacaggtaatccccgccgccgtctgcatgctgccggtgataccgtaaaatacggctgcaaccgtaggcattccaatgatccgtctctccgtgctggagatccagtcgttgggtgtaatatccttctccacccagatctcccgggccagcaaagcctctgcggcaatatccgaatccacatgttgtgcatatttacacagattcaggtagcaaaatactcccagatatatcagtaaaagtgcacctattatccatcccagcagggatatactttttcgcttgtttctcatggatccttctccgtaggcaactatctttcgacaaaattacatattattttaattataacactcttccctgtttccttcaaggcaaataggcttgacaaaaaccggggaacaggatacacttaaaaggccgtacatgtccggtatcatgggaatagtgatgaaactcggtcttacgcaatgggaatctacgaaccgtgtcaggttgggaacaaagcagcactaagtagaaccttccatgtgccgtgaggaaactgggtggagctgttatcctggtccggcatgtgcggttttgatatttaaagtgttctgtgaattcatggataagtcagttaagaggttatagattgtgtcaggcgatatgtcatccccttttttggtttccaacagcatagcatccgtttccggcgatctggctccccaagatgccgcatggttccggaaaatcatgtccgactgcgtcctgtgtcccagggcctgtcatgccgatcgcctggatggtggcgtgggatattgtggccagacggcagatattatggctgccagagcctctctgcattattgggaggagccctgtatctccggtacttccggttccggtaccgtctttttctccggatgcaacctgcgctgtgtcttctgccagaaccataacatcgctctggggaaagccggacgagtcatcactcccgaacatctggtgaaaatctttctacaattacaggaacagggtgctaacaatatcaatcttgttacccccacacattttcttccccagatcgtcattgccttacagcaggccaaaaatcagggactgtccatccccattgtatacaataccggcagttacgaatctccggaggctttacgccatctggatggtctggtggatatctatctgccggatctgaaatatttttctccggagctttccgctgcgtattcgcatgccccggactattttgagattgcctgcgctgccattgcggaaatgtaccggcaggtcttagatccggtcatggatcccgacaccgggctgatgcagcgggggatgatcgtacgccatctgctcctgccgggacaagcgaaagactccaagaagatcctgcggtatctccatgagacctacggggatcatatctatattagcattatgaatcaatatacacctcttccgcaggtggcagatattgaagcactcaatcgcacagtgacaccggaggaatatgaccgggtcctgcgctttgcggagcgaatcggcattgaacagggcttccggcaagagggaagtgccgcctgtgaaagctttattccggaatttgacgagcggggactgtgattctctcacagttccactgcgatcagataatatccgaaatccccttcccatgccggttctctggttccttcaaaactttcaaagccaaacattctggctacctgtttttctctttcataaaaattacccgggactcctatgtaatatttcacttccccagagacttcctgacgcattaataataaatgtctgtaattataatagccatgcaacaaaaaactgttgtgggtcatctgatagcaacgctcccgcaacacaacgaaatcctccggacccacggaaagaaattctctggcatcccggaagggatggatgtgggggtagatactgcttaattgctcccatttggtgtctttcatgtggagagtgtgttccgtggcagtttttttcgagctccgggcttccgatccactgaccattttttcgtttgcgactacggtttctgccactttttcggtctgttcacgggcttgcctgccttgctcctgcacccgctcccgctgcatctccctattttgggcttcctgctgttctgtctgtatcggccgctttgcctgctccggctggtttccaccttgcccctgtccttcgatttcccccaccgtaaccggtgcaatcgcagtcacaggcgcaggtactttcttcgcaccagccgctcctgcaaaccgccctatgatctcaaaattacgttccaggggaatgcgtatccccagtgtcggctcccaatccgcttttctggaaattcttttttcacaggaaacggtcccccgttctgccgtcatttcacataacagttcttctccgctttcccgctgcagatacagcatcatctccttgccagacacgatcccctgtcctctcagctgcaccatcagaatctcttccttttcccagctttccagctttgcatacccggctccccggatccgttgcccgttttcctgtaattccaaatagctgatctgtttccgatatgacataaaatcccccccgtataaagtttctatctaactttatgcgaggggttgtccttaatattcctggctgtccagatatttcatataatttacgaccatcaacgcgatcttgaaagtcagtgcatcatcaaagctccgcagatccaggccggtgctcttctgaatcttctcaatacgatataccagcgtattacgatgcacgaacaactgtctggaagtctccgacacattcagattgttttcgaagaacttgttcagggtgttcagggtctcttcatccagatccatgggtacattgtcaccgaagatctcctcaataaagatcttgcacagattcaccggcagctgatagatcagacgtccgattcccaacgtgctgtaggcgatcacctttttctctgcgtagaatatcttgcctacatccagtgccatcttggcttccttgtaggacttggatacgtccttcaattcctgtaccacggtgccatatgccaccttcacatccagaagagcctccgcattcatcatggctacaatagtctcggccagttcatgcagtgtctcaggtgtggtggtgctctcaacagatttgatcaggatcaggctggactcatccaccgctgttacataatctcccgcctgcggggaaaacatgcccttcagcacttcagatacaatgccatctttctcatccttggtctcaatgagatatacggctctgggacagctgacttccacatgaagtttcttcgcccgattgtaaatatctaccagcaacagattatccaacaacaggttctgaaagaaattattccggtcaaaccgttccttgtaggcaatgacaagattctggatctgactgacagcaatcttacccaccatatatacgtcatccgtcattccccgtgccaccagtacatataaaagatccccttcgtcacggatcttcagaaggtgatgtactccgatcacctggctatccgccggagaagccgcaaagcctgtgatcagatctgtggttatgtcatccttttccatggtagatgccacttcggatccgttcagatcatagactccgaggtctaccttagtgattgcttttaattcatcaatgcttgtctgtataatctggcctgtaatcatattgtccacgcctttctgtagcataatctatatcgaattcttcgctcttcgcgttctcgatttcgcaacgtctcttcgcattccggactatcgtcctacttgctcatatccattcgttctgttcataggcgaaaagctccacctgcaagcagtctcgcttttcatctatgccagaactatatatacttagtatatctgatttactcaccccgtgcaagcaaaatgcataaaaaagccctgtctgcattcacagacaggaccttgaaatctcttatgaaacttaagactagttggtaataacctgctcggtctctttgtcgaatacgtggatcttctcaacatccagagcgaacttaacggtatcgccaggtcttgcagtggtacgagaatctactcttgcggtcatagggaactcgtcaagatcgaagtacagatatacttctgcaccaagtaactcataaaccttgatggtagaggtaaatacgctctgaggagaggtctcgatgtacatctcggaatcatatacatcctcaggacggataccgaaggtaacaacctttccatcgtaaccgccatcgatcagcttcttggacttagcgggaggaaggggaatgctgtggcctgcgattaccaggttagcgatgtcgccttctaccttaacagtagcatccaggaagttcatctgcggagatcccatgaatcctgctacgaacaggttgcaaggcttctcatacaggttctgaggagtatctacctgctggataacgccgtccttcataacaacgattctggtaccaagggtcatagcctcagtctggtcatgtgtaacgtagatgatggtggtgcccagtctctgatgcagcttagcgatctcgatacgcatctgtacacgcagcttagcatccaggttggacagaggctcatccatcaggaataccttagggttacgaacgattgcacgtcccatagcaacacgctgtctctgaccaccggacagagccttgggcttacgatcaagcagcggagtcaaatccaggatcttagctgcttccttaaccatcttatcgatctgatccttgggaacttttctcagcttcagaccaaatgccatgttgtcgtatacggacatatgaggatacagagcgtagttctggaataccattgcgatatctctatccttaggctctacatcgttaactactctgtcaccgatcttcagttcaccggaagagatatcttccagacctgcgatcatacgaagggtggtggacttaccacatccggaaggacctacgaaaatgatgaactcctgatctgcgatctcaaggttgaaatccttaacagcttcgaaaccgttaggatatactttgcagacattctttaaagataaacttgccatttgaaaatactcctttcatatttaccaatgttattttctctcattgtgaaacgatatgtctcgtttgaatctgaattcagtataacgaaaatcacgaaaatgtgccataccactatttcacaaagattttgaatcatattgtaagaattgcttataaagtttgttttttttcgaaatgcttgtcagattgaacaaatccgcccgcatttcttggacatattccacaagaatcgccctactttgtctcattttccggctttttatagaagctaagctggtttttgccatgtctttttgacacatacagcgcattgtctgcggctttgtacagttcctcgaaagacttgccgtccccggggaagaccgctgctcccacgctggccgttacggaatattttacatattctcccacttcaaactgatggaagaactgttcgatcttcttgccttcccgttcgatcatactgatctcgcggatatccttcagaaacaccatgaactcatcgccaccggtacgacccacgatatccgtagcccggaacatggattgcagacgtactgccaggttgcggagcacttcatctccgaaggcatgtcccatagtatcattgatcttcttaaagttatcaacatccagtacgaacaatacgccctgcttgtccgggtacttttccatgtattcccggatcttacgctctgtggccatcttattgttcagatccgtcaataggtcggtatctgctttatcctccaacaccttactgtgttcagaggctttgatgcgtaccagaatattgattgcggtgataataataagcgctactgcaatggaaatactgatcttgacgatcagattcacaatcgggccgcggaaggactgctggattccagacagataggattcattaataccgaccaccaggttccactcggtaccgcggattggaaaatgacagatgatcttgcctacaccgtcttccttaacatgtaaaatgccgctgttgcccttctgctgctgtctttcaaacagggtccagcttcccaggctttccgaaatatctttcagggaattccagaaatcattctgcaaaatagtcgttccgtcagtggcaccgtagcatgccataatggttccgttccggttgaccagagagaaaaatgccttgtcaccatatacagaattgtcgaagaattccttcatgttatccgggttcatataactgagcagatatccggtgacatttccggatatcgcaatcggacacacatagataaaggcagtctgtccgttgatcccatccgtgccggcataaatataatgggcggaggttccgctgatgctgccgtaatagtttaactccgacatatcgaactcccggcggtcactcagcattccttttccgttcacagcacaataagcagacatataggcgttgctggcttttacaatggtgtccagcttctcatatacaaaagcatcacttctgtccggccggctcgccataatgtttgccatggcactcgtgatatctcccagtgcccccagcttgtcatctactcccgcggaatagtaatagccgatctgctctgcctgatcatccaccaccgtctgtatggctgaattcattttattattaaattcgtaaatactcagaaccagtgcaactaccagcaatgcgcagggaaagacccactggaaaacaatttcccaaaattttctcttttgcatactccgaacacctctcgtctgatgcccccgcaggacatttttgttacttcacgtctgttttcaggctttcatccagttcatcatggaatactctctcatcctcttccggcgagatttccggtgcaggctcctgttctgacaacagctgatcttccagcttctggaagaatttattgtacagcatggcagaggcataagccggcagcgaaaaaccaaacaggaaaataatgggtatcagtcttaaagataccagataaataatcaacgggaaaaatgccattacgaacattacaactgtcttgggcagctgtaaaatactcatgataaatgcatttcgaatggttcccatgattgtattgtcaaatttggcaagtaccggaaatacatataaagaagtgcagatcaccagcactcctgctgccatgatcagtaccaccaacacctgactgaactgcattccggatttggtaataatgtagtaatcaccgccaaggatcgccgctaccagcataagcagcaaccagatcagggttgcctgacggaaattggttttaaaggatttaaaaaagcttcttgtaatataactctcctcgttacgcacgatcttcaatgccacataatgcatggaagtcagcgcagctccagcggtaatgacagggatgcagcagatcagtgtcagaatattgagccacatcagatctgccattttgttcagtacattcattaaagggctatccaggtcaaaaattttcatttacatcttatccttttctgttttataaaaatttttccatgggggtcacacgtattccggaaaatgcctcctcttcatgtaccgcatgaaaccccagttttctatagaactctacggcatacggagctgctttcagcgacatataccgttccccttcctcttttttcagatattcacacattcttctcatcagatcccgtccgattccccgatgatgatactcctcatcgacaaaaagaagtgataaatgattataattccgcacggaagccgctccgatgactctctcaccgtccagcgccaccatcatctggtatcttccctgcaggaacgacttatagaggtgttcatccgtaataaaatcataaaagttacggattccctcctctgtataatccaccgcctcaaattttaaaaatgtcttccagatcatatgcatggcaggaatccagtctttgtcttccgcccatctgatctcgtaagtgcccactgccgtatccgacatgatgcaccgcctctctgatccgaaagctttccggtcttaatccagtcccggaatctccctgcggatccattgatagatgtcctccatggcctgttcaccgtcttcctcattcaaaagctcatgtctgtcattctcgtacagtttgacggtaatatttttcacaccagccttcttcagagaatcacatgccttccggacacccttaccgtaatctcccaccgggtcctcggcaccggataccataaggattggcaggttctgcggtaccttctccagattctcctgcttctgcagtctgcggatcagttcaaacagcgtctggaacccgttcacagtgaaggtaaatccacacagcccatccgctatatagcggtccacattctccggattccggctcagccagtcactggatgtcctcggagcatcgatccgcttgttatagccgccgaaagcagccttgtcaataaaacggctgatatgctttgaaccacagaacagcttctgtatgcctgccatggctttggaacaaaggatcaatcccccggactgcattcccgttccgacaattaccgccccgtcgactcccttaccgtaacgacacagataattcctcgtaataaaggaacccatactgtgtcccaaaataacatagggcacctccggatagctttcctctgtgatcttcttcagccgatgtacatcccttaccactaccgttgccggatcctgttcgcagaagtaaccgtaagtgccgccttccgccacagattttccatgtccgagatggtcttctccggtaacaaggattcctctggcagtcagaaattcagccaggttctcataacgctccacatactctgccattccgtgcactacctgcacaatgccttttacattgccgtcatcgggagtatatctcactgcatggatacggctttcgccgtcccgggaatcaaagtaaaattcttccttaatcatagaacctccttggttacggaaaaatcataggacgcacaaaacaaatgtcaattttacagccatctgctttggcatcctattcattatatatcatttcttataaaattttaagccctatattgctttttttgtaaaatagtaacagttcatcccgcctcattcgtaaagttgcgttgtcatatactatttaacagatctctgctccggcaggcatattcttctccggggtgaccaaagccagattgccttccgcgtcttctgcgcacaggatcatgccctcggacattactcctgccagtttcgcaggcttcaggttcaccagtaccataaccttcttgcccaccatttcctccgggctgtaatgtgccttgatgccagagacgatctgacgtacctgactgccgatcttcacctggctgcacagcagcttcttggacttgggcactgcctcacaggaaatgatctcacctacctggaactgcatttttgcgaagtcgtcatattcgatctctgtcttaggctcaatatcgatggcttcctgctctgccttttctgcctcggcatttgcctcttccgcttcatgctccgctgctgccttgatcatggcttcttccagctctgcctctttttttgctacatccttcatatccagacgggcgaagaggatctcaggctgatctgtcaccctgttgccgctctcatacaggccgaactgctctaactgatcaaagtcacgcagggaggtattcagctgttttgcgatcttctctgcggtttcgggcatataaggctctaacagggatgcgccaatgataataccttccaccagattgtacagaacggtagccagacgatctgccttggcttcgtccttggccagtacccagggttcggtctcatcgatgtatttattacagcgtttgaagatgccgaagatctcggtcagggcatctgctactcgcagttcttccattttggctactacttttgcataagtgccggtcacagtctgtttcagatcggcatccactgctgcatcgttctcggtcagctgtacattcctattctctactacaccgccaaaatacttgttgctcatggaaatggtacggttcaccaggttgcccagggtgttggccagatcggaattggtacgctctgctaccagttcccaggtcagattaccgtcattttcaaaaggcatctcatgcagtacatagtaacgtactgcatctacgccgaaataatctaccagatcatccgcatagaccacatttcccttggatttactcatcttaccaccgcccataagaagccagggatgtccgaatacctgcttcggcaggggctcacccagtgccatcaggaaaataggccagtagatcgtatggaaacgaatgatgtccttgccgatcagatgcaggtctgcgggccacagtttcttgtactgctcggtgctgttgccatctgcatcgtagccgataccggtgatgtagttggtcagtgcatccagccacacgtagatgacatgcttgggatcgaaggtcaccggaatgccccaggtaaaggaggtacgggatacgcacagatcctgcagtccggggagcaggaagttgttcatcatctcgttcttacgggaaacgggctgaatgaactcgggatgctcattaatgtgcttgatcagtttgtctgcatatttgctcatgcggaagaaataagcctcctccttggcaggctttacgacaccgccgcagtccgggcacttgccgtccaccagctgggactcggtccagaaggactcacagggagtacagtacattccctcataggctcccttgtaaatatctccctgatcgtagagacgcttgaaaatcttctgcacctgcttctcatgatcctcatccgtggtacggatgaacttatcataggaaatgttcagcagatcacacagtccgcggatcacaccggcgatcttgtccacatgctccttgggtgtgatgccggctgcctcagccttcagttcgatcttctgtccatgctcgtcagtaccggtctggaagaagacatcatagccctcctttctcttgaaacgtgcgatgctgtcagccagtacgatctcgtagttgttgccgatatggggcttcgcagatgtataggcaatcgctgtggtaagataatattttcctttgctttccattgtgtctgttctccttttctactcctataacactatctaatgccacacggattgctccgcgctttgcgctcccgcaatcctacccgccattcgcatatcgaaaggcttacgcctctcttctatgctcatatcggggcaggtcatcaagacagaaaattactctcgtgcaagcacatcgtaatttctgtcttgtgaccttgttggcattaaaaaagtctcctcaaagaaccttatgttcttcaagaagacgagcgttatctcgtgttaccacttctcttcgtctgtacctcacagtacagacctcttcgggtccgtaaccctatccgctgtaacaggcggatcctgtcgcagccttgcttctaccgttcctattctccccggtatccgttcggtgcgccgctcagaagccatcttctctatctgtccgttccattcctctcagccttacgggatgttctctgtaaaacttctatgataaatactctcttcctcattgcatttgcgtattcttacagtagcacaggaaatccggactgtcaatgcagtttttgttgccatgcaatcgtaaatgtgtataatggtatattatataaggtaatttttataacatacataagaggatataaaatgaaaaaaagtaaattaccaaaacaggccttgatcattctgagcattgctctggtgctggtaatttccacagttatgtggagttctgcccagatcacacaggatacagaggaagaagtacagtccactctccgggatgttgccacgcagaacgccctgatcgtacaacaggagctccgtgaaaacttcaacttattatacagccttgccgatgcgatcagcgtttccccggatgcagtcaatgcaaaatccattgctgcacagttgggatcttttatctccacctatgagtttaaacggatcggtttcgtctcaccggacggtcaggtgataaccaccgatggctatgtacaggatctgtccagcagagatttttttaaggatggtatgcagggacttcctggtattaccaataccctccaggatcgcctcggtactccggaacccatcaatgtattcagcattcctgtgtatgatcagagtgattccattatcggtgttttatttgccacctatcggaaccaacattttgaagaagttttaagcgtacaatcctttaataatcagggcttcagctgtctggtaaatcaggacggtgacctgatcgccacatcttccaatgcaccggcttccctgcaggaagccgaccggatatccgattatctgactcaggatgcccgtaacgaccagcccttgcaggatctgcatacgctgcttcagagttcttcttccagcggtggtcatttctatggaggcagtcagaagtattattactatgcggctgcaatggacaatctccgcagcgacagacagtggttcgccctgactattgttcccgatcaggtactttccagtcgttccgctccgatattgtttcaggtgcggctgctgatcctgctgatcattgtgatcgccggagtcggtacttttgcttttgtgcacagtatccggacacggcgcaggcagttatatcgtctggcttatgtggatcctctgacaaatggtgataattttgcctgcttcaaggagaaattatcccactgcaacggagacagcggcttctatgttgccctggatcttcaggatttcaagctgatcaataatacctgtggtgtggccaagggtgacgaaacactgttggaagtatggaagctcctgcaaaccggtacacatctgggtgaattttctgcccacatcaatgcagaccggttcatcctgttcctgcgggataatgaccggtgtaccttagaacccagattggagtgcctgtgtcaggatatttccaatttgtccacaaagcttaatattccgaaactgttcccactgtgcggcatctatgagaccgccgatcataaggaaatcgagcagaattacggcaaggctgtacaggccaagtatccgataaaaggaaaacgtaccagacattatgctttttatgatgagctggatatcaaacagctctccgaggatcgtctgatggaagatgtcttcgaagatgccctgaagaacggagaattccagctgtggtatcagccgaaagtagaccccgtcaccggaaacattctgggtgcggaagctctgatccgttggaagcgccccgacggcaccatgctctctcccggcaagttcattccattatttgagaaaaacggtaatatcacaacgctggatgaatatgtgttccgcacggtgtgcgcacaacagcagagatggctgcaggctggagcaaaattgtatccgatttctgtaaatatttccagagtcagcctgtactacaacaatgtggtagataagtaccgggagattttgaattctttccagctggatccgaaatatgttccgctggagatcaccgagagcgctaccattaataacagtgatatctcctccctgatcgagcagttccatgaagcgggatttactctactgctggatgatttcggaagcggatattcttctctgtcttcgctgaatgtcatgcatttcgatacgatcaagctggataagagtctgatcgattacattggtgaccggaacggtgaaaagctgctgttgcatatcacgcagctgctgcagagcttcggtatgaccattaccgcagagggtgtagaaacttcggatcaggtagagtttctgaagaatcttcactgtgatgatattcagggttactacttctcgaagccgttaccggtaaacgaatttgaagattttgtaagaaagcatacaggtctgtagggttcgcccacagacctgtttttgttcctgtattctgttttgctcgtcttattcttctcccaggatcaggatcgaataagccggaagcgtaactacagtaccggcacgctccgcggtctcttctccggtataaagttcccccagcagtaccagttcctccgccgtggtgcctcctacggtaagtccggtcagatccacgctcacagcctccgcagaggtatttcccaacaataataagttactgccttcatagcttcttgtcagagcaaagcattgttcaccggaatactgctccagataagcggtggtgcctctggcgatcaccgggttctggttgcggacacggatcacctgtttcacataattatagatggaatcgggatcctcctgctgttcttccagactgtcaaatttcatccggaaatcatccatatctgccgggcccttacacatgccttccgcattgccgtccttgttccagtacatgggggcccgtttgttctcgtctttgccggagcccttcatgcccagttcttccccataatagaggaatacattgccattcattaagagattaagggcattgcccattttcgtctgagcttcgctattctccccggcatagtagcctgcactgcgtcccatatcatgattggtgtagaagggagcattgatataatccggattgtactgcgcatacatgccctgctctgtttccagattctttgcataagatgttgccgatgccttaccgttcatcacattggcaatgataccggacttgtcggcaaaagcaaaatcaaacatgctgtccacgccgctctcataatatttggcataggtattctgatccgtccagcattcacacaccagataattctccggatctttgccatgaacataatccgcgaaccagcttagaatttccacattgccctctgtggatccggtaacatactctttcaccgcatccagtcggaagccatccacacccatatccagccagaagtccgcgatctgctcaaattcccggcgtaccgcctcattctccagattcagatccggcattccgtcccagaatctcgcttcataataccaggccgttccatccagctgcgcatacccgccctggtattctctggaaaaatggtaataatccacgtacgggcattcggaactatccggttccgccccttccggcaggctcttcagatactccgcagcctgttggaaccagggatggctgctggaagaatgattcattgccagatccaggatcacacggatcccacggtcatgacaggccgtcagcaactcctgaaatgtttccagagtgccgtactgcggatcgatattctcataatccgtggtatcgtatttatgataggtgacggagggcatcaccggcatgagccagataccattgattcccagatccatatctgtggtatcatcaccgtcattcaggtaatccagcttttccagtacgccctgtagatctccaatgccatcaccgtcgctgtcatagaaggaatatacgaaaagctcatagtaggtacggtagttgtcgtccgggatctgcagtacccggttgtcctgcaccagagacgtggtactgccggtgctgtcagtgttactgtccgtgctctcatcctgtacgatggcagtctcattctgtgtaccggcagcagacgcattgctgttttctcctttgctgcctccacaggcagtcagagacgctgtcattcccaccgccagtattgctgcccatatttttctgttccatttgctcatagttatcgcttactcctctgatccgcttttttcaaaccggaaccatttgaaatcaaaattgcatcccggcaggaaaacgaaggtcacattctgctctcccgtcactctttccagagggaaacgcagttccctatattcctcgctgtgcgggaagggaagtacctgtgtagctccatcggtaaacctaagctggatcgtattctgctgtaaaggagttcttccgcagatgacaatgctatcggttcccgcttctccaaagttcatatccgtaaattcgagagagacattattgccgatctgttcaacggcatccccggttctcacaaagctgtcaccataggtaactccgtccgtgagagcactcagtcttgcataagctttttcctgtctggtgaaatggaactctttcaggaaaattttgctttctgacactattgtcagttttgttacaccctttaatctccggggcaatacgaaggtatccggctggaagacttcccagatgcccggcttctgataggttatttcacccaccagtattccctgtgtcccggaaccgctctcttcgggctctcccttccatatctgaatccggtggggatcattatcgttggcaaaaatggacagcgtgatctcgtcacttccgaattcaccaaagtctaacgcttcatagaccagtccggtaggctgtgccttgtccgttccggcactgttctccactccgcggcttacgtctccgccaaaacttccgacataagaaatacccgtcaccggctcatacggagaatggaacgtctgtcccatgccctccactgcaaagtcaagttgggaaatcattttaatattggttgttccgttacaggtcatacaccttacctgaaaactgccatcactgacgcctgtgatccggatgctctcgccgtcttccagttcctccagttttgccacagggctggggataccggaagcatcagtaatgctccagagaagcttacggtctgtggcttccatgggatagatacgggtatgtagcaatacatacggcttctccggtgtcaatctcatatagggagcgctcatttccagtttccgcaccggaacaaatccgggatccacaaaggcgggcggatattctctgttttcttctgttgcgcagacaccgggacgaatcggtgcttcgactgcctgtaacgtcactgtcgccgtgcggtgtccggcagctgccgtattgtccggagtctcgactactgccgtggccgttccggcaccggtttcatcggtcatgctcaccgtggctgtccatgcgtcctccacggtcacacgaatctctccgggaatcgttttcgctgcgatcatcgccagtagtttcccctggaacagcttacggacagttcccttgtaggcatcgtaatcggtactgtcaccattgtccaagcctatgagacgtccagcgccttccacggtcactctcacataatcggaagcattttccacagggtatccatcccggtcctccgcagagatctccacgaagatcatatcctcgccgttggcgcacatggtagatttattggcttttactatataatgatctgtgttgccgaaggaatgtctctcctgtctggcgatttccctgccggtctcgtcataagccacagcacagatactgccgggtacatacggtactttccaggaaggctgtaatactgttcccttctgatggtcgatctgctgttttccctgcgacactccgtttacgaatagttccacctccggggcattactggtgatccgcacatccacctgctgtcccgggttaaaatcccaatagggatatacatggatcatgggatcttttttcccatccgtccattccgaacggaaaacgtaataagaatctttgggaaatcccgccgtgtccatctgtccgaaatagctgtttttcgtctgatagggagtcggctcaccgatatagtcaatagccgtccagatgaactggccgcaggaatagggagtatctctgtccataataatacaatattccgtattttttgctgcccagcttgtggt

SEQ ID NO: 5718 - DNA, 1517 bp, Unknown
  gut microbiota DNA sequence
cgcttccgtagatgacccagtccggatatttttgatgatgctcttcataatatttttctgcgtaattatagcctgccagttttacgatatccgcacatttccgggcattttcccagggcatataattggagccaatggtaatcggtgccacattgcgatagtcccactttctgaccgccgtgaccagcctgcgggtgatctcctgaccatgagcatccgcatgggtatccgggatctcattgccaatactccacatgataacagagggatgattgcggtctctgcggatccagctgcgtacatccttctccatccattccttgaaaaatctggcataatcataaggattctttgccatctcccacatatcgaacgcttcggatacgatcagaaatcccatctcatccgccagttccatcagttccacagcgggcatattgtgggaagtccgcacagcattgacacccatggaacgcatgagttcaaatttccggcgcatggcttctttgtgaaaagccgctcccagtgctccgaggtcatggtgatcgcaggcaccgttcaggcgcacttttctgccgtttaataaaaagcccctgacaggatcaaattgcatggtgcggaaaccgatgcgaagatgttcttcctgacatagttcccggctgttggtctcctgcaccggttgttgttctgttctctgtgatgcactgttaccgatcgtctccgcactaccgttttcccgcaacatgtctctccacaggcatacctgcaactcatacaagtaaggatccgtaatgtcccatttcctcggattgtccacaggaatcgtcacagatgtcttctcctgtccaccgtcaaggggctgttttacccggaaaatctccctgcttgctgtttctgcggagcttttactgtcccctgtataatacagacaatattccagtgcataatttccgttgtccgttccccatttcaactccgtatcgatggtcaggtcatagcctttttgcgtctccacagaagaggtgtagatgccgtccaacgggatatgtgtctccggcagacatatcatccatacattacgatagattccggcaccgctgtaccatctactgttgggtgcctgaaaggttacccggagaacaacttcattttcaccttcacgcagatgatccgtaatgtcccagtcaaaggtggagtagccgtatttccagtcaccgaggcacacgccgtttatatagatggaagaatccatgtaaacaccttcgaagcgcaaaatgacacgtttgccacactttgttccggacgtggaatacacaaatttcttccgataccagccgatgctgtcttcgtacaggttcttcgtatcatagatcagccagtcgtgaggcaagtctgccggctgcatctcccgctcccagagcgcccggtcttcccattccacatccaatgctgttttggcaaaataccagttatcattccataatgttctgctattcatcgaaatttctaccctttct

SEQ ID NO: 5719 - DNA, 32399 bp, Unknown
  gut microbiota DNA sequence
cccagtaccatgccgcccagaatatccgtgggatagtggacaaagaaataaagtctggaaaaggcaatgactgctgccataagcagacttaaaatacccgccttacgataataactgaaaatggtcaccgctccggcaaaaccattggaagtatgtcccgaggggaaggaatactccgaagggaacggaattttcaatgtcacgctggtatccaccgcacaggggcggggtctcgcgatcacatttttcaggaacaaatttcccacaagataggtgattgccatggcgattatcatggtcagaccgcatttccgggtcttcggaatgcatgtcagcacaatcgcaatgacgatccataccagaccgctttctccgatcgtagtaaaaaaacgtaggatctctgtcagccattcctgatggatcccctgaatcgcatgcaatatctgtaattccatccttcgttcctccttatccgtcttccggcttgcttatcgaccactccgtaatttcaccgtcagacattcttttgaactattgtaatctattcagaaatgcctttgcattggctgcaatgtcatccttaaatacagcggaaccggctacaatgacattggctcctttttccatggcaaatgctacattgtccagattgataccaccgtctacttccagatcggtagacagccccttatcgttgatcattttccggatcacctgtaccttatccaggcactccgggatcagcttctgtccgccgaatccgggctccacagtcattaccagcaccagatccaccagttccagataaggttccactgcctctgccggagtggcgggcttaatggtgatgccggcctttttgcctgtggcatgtattttttcaatgcatccctccacatcttctgtggcttccaggtgaaaattcaccaggtccgcaccacaggcagcgaactcttccacataacgttccggcttctcgatcatcagatgcacatcgagaaacatatccgtgtgggatctgacagcttttaataccggcataccgtaggaaatcgacggtacaaacaatccgtccatcacgtctacatgcagccaggggactcctgctccttccacagctttgatatcctctcccagtttccataaatccgccgaaagaattgaaggtgataataaattcatgttactcctcatttctgccccgcaaggccttgtctgttgcttattaccgttctattctagcaaacttgttttcgtaaaacaagactaacgaaaaggaaccttttccttttggaaaaaagttcctccgttcgcaattctctataggtttttcacgtcttctttcagtttgttccaggcatcttcatgctccgtatagtaaatgggacatttctttccaccacaatcatagtggcgcaagatgtcatcgggttgcaggtcataggcatcagtcagccatttcaataatttgatcagagaatcataggtctcctgagtaaactggccgttgtccgccttgtagcagcattcgatagaaatagaatcctcattgcgggtctgtactgcataggcgatctcgtccagaggaacgcactgaaggatctcgccatcatagccaatgataaaatgggcactggcactgcgttcatgattgtctttcagctgttcgaagtagctgcggttctgggctgcgctggtcccaggattcgccgtgtaatgtacaaaaatatttttcacttccgtcaggggatctcccggtctggaatattcattcacggtgagaaaatcttctgtccagttgggatgtgctgcatatacatccgccggaagtccctggatccgggttcccgtggtctccccgatctgtttttcgatccgctgcacagcttctgccgcaacttccacaggagtactggcctccgcagtgctggcaggtacttccaacaaatttttcaacataaagattcctgcaagaatgctggcacacagcatggaaatcttaatatatctgcggattcttgcctgtctgcggcggcgctgcctcccggctctgacccggcgttgtctgacgcgggtgctgtaagtattgtctttgtaaacattttgctcatatgcattgcccggatgcccctgctcctgccgccaggccttgtttttctgctgtgctgtcgtcgaatactgcggatgtgatttcttccttccgccttcctgcggcattgccgatatgctatgttgtgaccgttctgtgcgtcctccggtatgattgcttcgtgattgatcggcgtatcttccggtctgtctgtcttgcggttgtcctacacgtcttcctacgtgtctgactatattttttccagtccggtaatccaccagatacggatttcttcgcacctgtatcatttccagatccggttgtctgctcgaacgattctcctgtgtcatattgctgccccccagagttaattgctttctttgagtcccagtttaatccggagttgtcacatttttcggcacatattccttaagattttataaatttattgtttaaaaagttccagcaaatacttttctatcacctgtgctgctttgcgatgagctttcactccgggatgcaggcggctgcctacggtgtccggtgtggtgttgggaagttgtaaaaagtggattctggtatcaccagtctgttccgcgtaggtttccaccgcttcacggatgacgggcaggaaattgtctcccagcataccatagccccagatgatctgtgcctcaggattgcagtcacgcacagctttcaggaaatctcggattgctgtagtcaggatctttttgacttcttttatgtcacgggttcctgcccattctcttaccagttccgctgcggactggattgctgtggcatcgttggttcccagattaatgatcacggcatccggctgccatgccttgaaatcatagtcttccagtgctcccagcgaagcatttcgctccccggtaagcaatccgcagacctgtttataatagggaggaatcttattctctacaatgccatcccagccggtgacgattccccagccactctgggacaccacacgatattccgcagaaagcgcatccgataccatacggggatacgtattttccgcagagaagaacgcactgatccagtcttcctcacctaccggccccatagttccctctccactggtaatactgtctcctacaaattccaggcgatattcaggatccggcagaaccaaaaattccccatctccatattgcaatcccaaaatctgtatcatgtgcagcgggtcctggtgcatagcctgtacttccttcagaatccgtacatgcttcggctttcctactgtcattcctcgaaacaggcatacttcatttttccctttattaaccggaaaacggctgatctgggcaccattcagttctaccgccagccatggctccatcgtgtcgtaatcagcatttacttccagccacaattcactgccagtatatagaaattctataccgctgccggtccagaataaattgatcacatcttttcccgtggtccggcccaatacccgcacttgcggcaaatccgctatacttataatctttttctgctgttccattttcccataccttctactctgttttctgttgcttcgacattttctgttatgatctttcgattgcctgctttactctctcctgccgtactcttctgcgatcacattctccgcaggacgtccgcataccgcataagggctcaatccttccaaatttcccggccaatcccagatgccgaagcctttcacccagtctcgttttctgcaggctgtaaacattgcccggtaccagtccgcctgttccgcatcatcctcttcaccctgctgttcccagttattcggaacctgcgcagaaccatgaatattcatgcaacccgcttctgaaaacaaaaagggcttctgaaattttttcacaaccttttcgatccggtctaactggttgtcccagtcgtctatgggataatatccgctggacgcaatcacatccacggcatcccaccatgtaatatgatcttctccatatttgtcgcaattataaccgacaggtccgtcatataccgtccgtacttccgcgataagttttctccactctgtctcccggtgctccgtcatggtcatttcacaccccgccaggaacaattcacagcctgtccgctgcgcaatctgtgcataatgtttctgaaaggcaatgtgactctcgaaccagttgccccatttgggttcgcaaggtacatcatggtcaaaaaagctgattcgtgcccgccagacaccattgtcacaattcaccgtcggtttcaaagcaactttcagtcccaggctctgtgcatatcgaatcatatcatacagttcctcatccgtacagcttttctccccatcataacggatttcctcactgtaaggtgtttcctgcatccccgatggtgtgaatatcacccaattcgtatggatccttcgtaccatttcctccatactttttctggattcttccgaacccaatactcctctgtgcggaaaaaccgcaaaattcacagcgcgaaatgcctccatacaataccttcccttccaagtatcccatttgtgtttcatttcctgtattgtatcatttttaattttatttagctagtaaaattagcttttatttgcctaaatttattttcctgcatttcattgtgttcattcacacgatatgctaccatgaaactatatacagtgctttcagaaaggagctatctgccatgcattttgtacaggcaaaggggattctgtctcagaataacggaatgaatatttaccgcggatgctctcacggctgcatctattgcgacagtcgcagtaagtgctacggctttacacatgcttttgaagatatcgaagtgaaaggaaatgcaccggagctgttggaacaagcgctgcgctccaagcgtcacaggtgtatgattggtaccggtgctatgtgcgatccttatcttccggctgaaaaagagctgcgattgaccagaaaatgtctggagctgatcgatcaatatgaatatggtgtgaccgtgctcacaaaagccagcctggtgcttcgggatctggatcttctgcaatctattaatcagaaagccaaggcagtggttcagatgacgtttactacttatgatgaggatttgtgccggaaaatagagcctaatgtctctaccacgagagaacgttttgaggtgctgatgaaatgtaaggaattgggaattcccacccttgtgtggatgactcccattcttccttttattaatgatacccgggaaaatatcgaggggcttcttgactattgcctgcaggcggatgtgaagggaatcctgctgttcgatgtaggagtcacgttgcgggaaggagatcgggaatttttctatcaggctctggatcgtgattttcccggcattcggcaaaaatatgtccatacttacggaaatgcctatgatattcccagtcctcacgcaaaagagcttatgacactgattcaaaatacctgcacagcgaatggcatgctgtgttccccgaaggaatgctttacttacctgcatgaattccccgagagatacgtgcagcagacattgttttaggttccaatggcgataatttctacaaaaaagtttatatagacaacacagtaaaatcgggagcttttgctcccgacatcttgataacgcaaaaacgaatatttacattcagaatagaactacactcagaaaattggtagctatagcttcagcgcccagaacaaaaacggcattgtgatcacggaaagcaatgtggtcaaagccacgcccctggatgtcaaccgataatcgccattgtactgctgtgccaacattactgtcatgctgcctaccggtgttgccatcattaccagacaaacgcctcggaatatcggatccttgataaaaaagcacagtccccacagaagcaatgccggcaatagtaccagttttactacagagaaaacgagtaggcgcacatctgtaaacaaatctcttaaccgggtctgcgccaaagagtcaccaatgaccaacatgcttaacggacctgtgatggcaccagtgaaagttgctgtatcttcaaggatcaatgggaccggaagattggtgatatacagaactatcgcaataatgcaagagcctacgcctatattcacgagttgtttccaatttatatttttctgacaaccaccaatctgcattttgtggatgccataagtatagatcaagacattatataacaagttgaagattacagcgtgaattattgcattgctgccatacatgacatccagcaagggataacccataaatccaatattggaaaaaagcatcatgacctgataagcgccgtagtcctctctgtctgcatgaagcaatctgggcaatagttccgcgacagcaaacataattgcaaaatagatcagcgcaacacccagagtaaacaacaattttcctttattctccagtctctcaggattcataccagaggcaataatcagcgcaggatttccaatattgattactatacttgaaattgttttgcctgtagtatctttaaacacaccgattttccgacagatatatccgatgagcataatcaagaaaaacattatcattttttggagtaaaagcatacaacaccttcatatagtaaatatataagctcgcaaattatacgttcttacaaatgcatctctaaccgctgccaacattactttgcagagtcgcccattataacacaggaaggagagggaattacaatttcctgtccgctccactttaaaatccctttattttcatcaaagaaaaaggtctgtaccacatctgtatgctgaatacccactatcagcatagagccatctggtacaaaacaaaactcccggcagaaatcacctgccaacattgtatgtcctttcaacatcaacaaaccggtttccttatctacctcatagacaacaattgaattgtgccctctgttcccagccaaaagatatctaccggatggatgcatctgtagtgccgaagtatagttctcccggtcataaccatcctcacgtctcgtcgatattacctggacattccgtaacatatctttgcaatccggctgatactcaaacacaaaaatttgacagctcaattcagataccatatatagatattttccatccggactgaaacggagttgtctgggtccactgtcttccggtgctttccactcgaaaactttttgatacgtttttgcatcataaagatatatataatcaagaccacaatccgcaaccgcaatatattttccatccggtgtaggcatggatgcatgaatatgagacatccttccatttggttcctggtgatgctctactcgtctttcctccccaatgcttccatcctgattaatgccgtacaccaccaacaatccattacgaaaaacagatactaaaagactatctttttcctcatccgctataacatgacatggccagccaccataagcatatctgctatttaaaaatgaaagtttattatcctctatgcgataagcagcaacacctccacccggtacacctttatattccagtgattccataaccgcatacagacattttctcttttccgaaacatataaatatgcagaatcgtcagcctctactgttgaagcttccctcatttccccattttgagtatttatctccaatgtgtaaatacctttcgatcctctcaaggagttcgttcctacgtaacacttcatccatttctccatatctttacctttcagtttcgtcattgtactctccgttgtaaatttgataagctcttggcattcttttttcccataaacgttttccctcacatagatcaaaaagctccagtcttccggttgattccgcaaattcttcatcagcaatcagcaaacaatccagctgtttcagatacagaaagctcctgggccatcccagtgtttgcaaaattctcccttcccggatcattccgttttgctcaacgaccaattcccggatcagattagctccccgtactcctacgaacaatcttccttttgtccaatctggacacaaaattgaagaaagactttttcgtgctccggcagggagcaaactgacacgctgcttttctttcaaacctccgtctgaatttttctccaacacgatcaattcattcgataattctgtaacgaggtatacgatttttcctaatggatgtatctccagaaatcttggacctgatccccggggctgttgctctattctccagttgtcccggtttccccaaagttggctctcactactatgatatactgcatccgcgcccagatcggcaatccagcactcctcctgcatccactttacaaaatgcggatgagacgcttcctgcctgctaactaccggaccatttcctttgaaaatcacccttccagattctttgccgatgcgcccctccgctacgtccactgatacaaccatttgttctccatacacagcaatcaaaagagcctttccctgctcccaaaagctcatatggctgatccctctccaagggaaacagcttttctccaaaaaaaacagttctcctgtaagttgcttcaaataaaacgactgaatataacttccccctgattcttcctgtcctaccgcatacagtattccgttgggcgcaatacacgcccattccagatttttcagtggtgcagccaaagtttccctgctgtcatttctccccaggtcaatacgatatatcccatctgtcgatgtgtttccaaatgtattgcaaaaatagaatgtcatttaagtcagctctctccattatgaaaacaaaaactctacttcctcttgcgttaatctcttttctgatgcacgaaggctctcttccagttccttaaccctgcaaggtcctacgatcggaataacctgaaaaggctgcgcataaagatatgctaatgttatttccaatggagtcgcattcgtgagcttgcatagttcctctaccctctccgctctttttaaagattcctcattgtaaaacatatctctgggaaaagcgaatttatcatccttgagaaatcccttttccttatgtagtacaaaaaatcctgctgcctgagaagtatatgcagttaccggtttaccggttttttggtgatattcatatatgttctctgtcatatgggtctgtacagctgcctccactgcctcgtcattcggttttgccaaattaaacataatttcatgcccaacaaaggatttcaaattatgctctttcgcgtaagcatctgcagcccacattctttctgccgaccagttcgaacaagcaaaatatctcacctttccttctctgacaaagctgttcaaagtttcaataatttcaccaacctcacgcttcggatcatctgcatgtaaatagtataaatctatataatcagtctgtaagcttttcaaactgctctccagatcctctcgtatctcttccggcgccagcctttttatgctcggtgtttcaagtgcatggcaggctcctttggtcgcaactaccagcttgcttctcaatctatgctgtttcatccatcttccaatcaataattcagatagtggaagatttcctggattccaccttccatacacattcgctgtatcaataaatgtacccccatttcctacaaaacaatcgaggatatcgaatgatgcctggtcggaaatacggctcccgagcactccacctcccaacgctatatctgacactcgcaaatttgttcctttataatttacaatattcatccttcgctctccttttaaaacacttctcagcctttcactgctccaactgtcatacctcttgcaaaataggactggaaaaacggaaatataatcataagaggtaaaataccgattactgcaattgccatacgaaccgtgatggtaggcattttacccaaggcattggcagcctctgcgcttcctgccatactttgtgtcataaactgaatatccagcaaaattctattcaaataattttgcagactgaataattttgtattcgtaagataaaggagaccattataccagtcattccaataaccaataccaatcaacaatcctaccgtagccaggatgggtttcgaaatcggcataataatactaaagaaaattcggaactccttagcgccatctaccatagctgattcgatcaattccttaggcgtattgttattaaagtatgttctcaccagcagaacattgaaaccatttaccaaaatattatttggcaaaagtaatgcaaatatagtatttttgacatgtaacgtatttacatataataaataggtgggaaccatacctccgttaaaaagcaatgtaaaaaacacgagaaaattgattatctttcttccgggtaattcattacgcgaaagtgtatatcccagcatggctgtaagcatcaatccggaaatcgtacctataaatgtagttagtattgaaatcccgtatgcacggaatattgtctgcccctgcgttgccatatagcgatatgcttccagactccactctttgggccaaaaggaataaccatttcggaacacactatcattatccgacagagaagacgttaccaacaacaacgtaggaagagtacagaaaagcacgaaacaaattaaaactatatgtgctactaatgctgatttgtttactttcattcgtttcatctcacacctcctaaaacagagaatcttccgggctgatcttccgaagtaacaaatttgtaattaaaacaattaaaaagccgactactgactgatatactcctgctgctgcagacatacccacgtctcctgtctgtatcaatgtgcggtacacataggtatctattgtatttgtagtactgtatattgctcctgagttctgcgtaacctgataaaataaaccaaaatcagaataaaaaatctttcctaccgccaataatatcatcattataataaccggtttcaacaataccagtgtgatataccgtacctgttgaagctttgatgccccatccagttgagccgcttcatagtaagacttatcaatagaaataacattggcataataaatagttgcctgaaatccaaatgacttccatgtatttacgatcggtaatattataggccagtactttgactcattgtaccaggatatcgtgctttttcccaagggctccaggatccctttattaataaagcctacatccgtacttaagaaagcaaataccagataactgataatgacgatagaaaacaaatatggcaaaagaatcactgtctgatatacttttaaagcctttttgcttgtcacttcgctcaaaagaattgctactaaaatacctaaaaatgtattaattataataaatgccacattgtacaatattgtgtttctggtaataataaaagcaactgagtttttaaataaaaacaaaaaatttctaaagcctgcccaatcacttccataaattcctttgctgtagtcgaaatctttaaaagctaccaccatacccgttagtggtaaataattgttaataaacaaataaaccaatgccggcaaagccataatgtatagtggcaaaagcttttttattttttttaatcttttatacataccaggctcctttgaatagaaaggtcagttgtgttatacctctgacctttccgagaaactttacttattttgttgccgcccactcgtctaactgccgctgcttttctgcaataacagtatcaatccctgcatccttcagtgcctgtcggaatttcggtaaattttcatcaggatcgattactccattctccagaggcagacgatactcatccattactgcctgtacagccgccgcttctgccttcacaggagtggtgtcaaacacaaatcccagcgctttagatttgattgcattatcattaaattcctcatatttttcatttaaatcttcgggatccgtattccaaatataactcagataacgatttccaaaagcgtaagttgcactcagagtatagccggatgtttctccagttacaccgtccggataagtaatccacttttcgcttccttttacatgctgatagtgtgtaccttcaataccccataccaacgcattatatacttctgcatcactataaagcagattgacaaactccaacactttttcaggattcttacagctgacagggatcgactgaataacagctccaaccgtttgtgtatttccaaaagccggatttacaattgctgtactgcatggaatacctgtcatattggtgctgtctgtaggcacacccggatgtatcagggacattgtggatgccacttttcctgttttgaaataagctactcctgtatcaggattcgttgaagcatctggaagaatatagcccttctcattccactctctggctttcctcacacactcctcgtaatattctgtatcaaagagattttgcacggtcagatcgccctgtccccaatccatcaggactcccatggtatcacccagcccatcatatgttttaaaaaggctttccagaatgctggttccctggctttgcggctgcgttacatacttgtccggttctccctctttaattctggcaaaaaggtcatctaattgttctactgttaatcctgcatcagcatcaattccatatttctcgataatatcattgcgaagaatcagtccgtatgcacttgccatatcacgtatggtcggaaatccatatatttttccgtcaactgtggtagcttccatatagtcgccgattacttccattgcatccggtgcatatttacgaaccgtttcttcatccaacccaagcagtttattggaagtgacatcactactgaatgtagttctggctgatgcatttaccagatccagcttttcgccactggtaatcatcagattaacctcctgctgatagtttgctcctgtcataggcaaaagcttaaccttggcaccaatcttgtcataaacaatgttgcttagattctcctctaccaaatcccaatctgcctgctgtacccatacatcaaatgcataaacaatggtatatggttcctctccttcctgcacagtgtcattcgtttcacttttgtctgtctgacctacgctctgattaccgctttcatttccacatgcggaaagcactgtacatgctgccaacaataaggcaaatactttacttacaattttctttttcatatcattttctccttccttttatgtatgttttgtatcttttgtaattaaactatatctcttataattatttctttctccctgaatttcgactttcacttatgaattttatacgctttttgttttatcgaaatccagctcatgaaatggatctttgtcctctccatcataatccgtcagcttactcgcgatccttttcagataactatttgtgtttgcaagagatccgctaataatatcctcttctgttattttggcaattaaaatttctctggcggaagccatcacctctttcatattggatagataacttccacgttcccgatcatatgttacatagataaatccatcatctgcttcctttgcatccggataagaaacttctctctcgtctaatagtaatttataagggaacgtttttccttcatcctctgacagcattgccgtaagattatttcttccactaaacttaaaatgattgatcagcaggattctacctgaacgcaatcttgtaatatggaatctcgaacagggaccaccatagccagtgtcaaaatctttactccagcttcttcctccatcataagaattcgatgcgccaatcccatactttgtcctaacaaacattcttaggcttccatccttcatctccaagatcatatgttcatcataatgccggtctttcacgtctgcaaagccaagcttctgaaaggttttcccgcaatcattggtagcataaacaaaggagcctttttccgtaattttagtatcatattcttctgataatactcttataccatcattccatacagcaatcgggaacaaccattcaccagatttcaccactataggtttattcatcattacattatggcctaccagaaattcttctccccaaaccagctcctctgcatcaggatctcggcaaacagatgcatataaaccatcgtccggacactttgcccatgtcagccaaagttctcccaatgaatctatccaaaggcatgggtcatagcatcttccattatcttcttttacaataacaatcggttccgagaaatgattccctccgtcatccgacttaattacgatcacataatttcctatttcttccttgactccacctgaatagaaagtaaggaaaatccttcctcgttttgtcacctcaatgcttgggattccttgccataggcgttttgaagccctgtatttttgtaattcctttgtttccgtatacaacataatcgtttcctccaacagacttatatccatgttttctgcatcttctttaaaaatacaggagctgttatatcaacggaacaacggacaatgcagcccctcttttttcattttctaaatatacagtatatataatatataatttatgatctgcttcataggcgcatgggtaacaccacgcttttccataacctaatctgtcggaaaagccattttgtagtataatgcctgtctcaaaggtactttctttgggtttggagaatgcgagtacaagtttttctcttcccggataccaatttcctattatataatttctaccatcagaaagcgtgcccgcatatatttttgaatctgaaaaaggaatatcataggaaaaggcatccgaccatgtctcgccataatcctgtgataaatatacaagcggaacttttcgctcgtcatctctcgaaaacatggcaattttattatcttctatgattgcggtaatttccggatgtaccagcttagaaccatcaggtaagtctccattttcctgaatatatactaatctccaatcatcatctattttcccggaatccgaaataagtaccgccggagtattcgggaagccatctagttcagcaatacgtcccggcaaaagcaatttcccatttgccatcttatacacattcgtatttagcttaaaaggaatcggtttggaccataaaaattcaaaacagtccttttcctcttgaaatacataaagatcaagagcatgaatatgatctgctgataccatttcattaataagcatatatagtttatcttcgcaaataccgtacactggtgggcagaacaaaattttgccggtttgatcctccgctatcgtttcaatatcactccatgtctttccaccgtcttttgaccttttttgtctgattggagtaggtccgatcagttctttttcctcgcaattataccaggcagcaaatagcgttccatgatattctataatagctgcttcatgcaaaaaagcatatttatcatccgggccggcgacttcatatatctctgtttcactgttatcctttaagcttatttctttttcagccatattcagatgtcctaacatattatatagttgtttatcttcctttgaaaaaaaatcaaacattttgttcctccctttccatatcattcttttcatttaggatcaactatagtataatctgctattatgttctgactctacttgaaactcgaccttcacttatgatttttatacaaaaagacctgatcctcaaagatcaggtctttccatcccaccgttttttcgatattcatttggtgaaattcctacttctcttttaaacattgcagaaaaattagacatattttcatagccgcaccgggatgcaatctcacatacggaaatctttgggtttaacagcaatccttttgccatatttacctgttcccttaaaatatagcgatttaccgaacatcccatttcctttttaaatcgtctatccaggtaatccggatttaaatacagtgctgaagcaacttttatcctattcagttcctcatcgagatgggtctgtatataataaatcgtttgttccctgatcccacttaagttcgatacatcctgcatgatcctggaaacagctcccatagtttcctcaatccatgcatccatttcctccagtgaaccaattgctgttactctgttacatccattttctctatcatataaaaattgatgtgcctgaattccattttcctgaagtgtcgaatagaacaactgttccaaatcatactgaagcatttgaagtgctctcctatttaactttgcctcattgtcttttccccaaagccattttcggattatatcttgaagttccacagtcttgccattatcaatatatgctttccatagcgtcatatcaggcataccaattgcttcactgtttttaggcatatttataatatccaaaatctgtcttctactgcaaacattattccatgcaaactgtcgaagcttatctaccatggactgtacttctctccctgtacacacttctcctatgcatattccaattttttcgtataatctttctgtcttaaattgctgtaatatcgcatcttttaatattatgccatttctttcagtgccagaactcagccactcgtctgaaataaaaaccaggcctgcaaattctttttgagacaataccggaagcagaaagtcaccagccactgttcccaagtcctcttttaccttcttcctggtctgctttatgtcttcttctgctttgtcatttgcatattgataaaataaaattgggatcagccttctatcttgctcctctttccattgcttctcctcatattcttcacactccctgttcggatcatcacgtagtcctctgagcatttcctcccaatatttttctttccatactggttttaactggttccatacaattccttcttcctgtaactgcgcctgatgacgctctctttcaatcttagtgacaagatttttcatcaccttaataatatcatcttccatgaccggtttaagcagataatcataacatccgtatcgcaaggcagttctgacataaataaactccgcatggcttgtcaacatgacgatttctaaatccggaaaattttcctttgccttttttgataattccaatccatctgtctgaggcatttcaatatcgcagatcataatatcaatttttttctcatttaaaattcgaacagcgctaactgcatttgtagcagaataaatctccgtaatacccagcatcccccagtccgttactgtaactacttcttctaccaccagatattcatcatctacaataagtaagttcatagctgatctccattccaacatctttttctagttatcttatagtttcccttttgttcattttggtacatttatgacaacgctaactcctccactgtcccgatttgtaaccttgacactggcagcctctccataatgcatgtgcattctatctactatattttttattccaatatgctccctatcgtttttcacaattttctcattttggtttatttttttaagaatgttctcctcaattccttctccattatcctgaatttcaatttttatattgtctccctctactttggctgaaacgacaatcatcaaatcattcgagaaatccgtggaatatttgattgcattttccacaaaagttaatacacacatagccggcaccatgctgatttctgcttccggctctatttcacactgaagatgcatagcacccgcaaaacgaaacttttgaatcgccatatagtttaacataaaattgatttcctccttcagaggaaccatttctccttgacgagcaaacacacttttaaaataatttatcagatatgttagaagaatatttacctgattgttatcttttcttttattcaacatataaatagtatttaaagcatttaaaaagaaatgagggttaatctgaagcattaaatattgtttatacagctcagactgctttttttctttctcataaacatcaattttcagaattttaattttttccatcatattgttaaagtttttactgacaatatgatactcttcccagttgtcaaactccggcattttaagatctattccttcttcatccaccttttgcattactgatacaatcctttttaccggatttgtaaaccagtgatacatggaaatataaagagcaaaaagcagtatgatcaaaatcacagcaaaaaccatactgaagtttaataacgttctgatttcttcaaatagcttttctgaaggaattacaattcttacacccacatctgtttcttgaattggcagttctatttttagatctttccctgactcgttgtctaaaatcattgtgcctattttatagtaagaaacataataatcacttagttgtacagcttgcattgtttcaatcagtcgattaaggctcactgcacagccaatccccacaccatcctttgatacaactctgattaaatattgataaccttctgcatcaaacagctcccatttttctgtaggttctctactctccaataaccttttcaactgttctctgatattctgactttgtatttttgctttcttttttgcagattccaccatcatgatatctgcatatttgtcttgaaatataaaaaagtaatccgcagaactataaacaagaatatcctcattcaattgattatacagccgctgtcttgacaaattgttcatagattctttatcctcttcgcaattagtcataccataataatccgctgtttcgcttattcgaagaagatagtccgaaatattgctcaaattattttctacatcgcgcgtatagtactccaccatagaatgataagtcttttttgcctgtttccaagtcgtgcgagctgcactgacgcaactacataaaagcattattatcatgcaaaaaataattacagatataagactattcatgcaaattacaacagattttttcattttgcttaacatgatttcgcctttcttaagagcaccaaccgttgtgacaccagcaccgtatatatatttctatctaatatagtatcatattcttgtgtaacttccgcttgaatatcgacttttgatacctaattttcgacttcttttacctgattatcgacttctttacaatattgtcttctttttcatttattatttcgagttcatgataccatgacctaaaagaagccgccagtctctgttttcacataactggcggcttcctcttgatatcttatattctcttacagaaattctttgacagacttgtaaacgcccttggcatccagaccgtacttctctaccagagcagcagcggaaccggactcaccgaagacatcctgcatgccgaccttcttcacaggcacgggatgatttgcacacagacagtcgcagacagcgcttcccagtccaccaatcacggaatgctcttccacggtcactaccttgccggtcttcttggcgctgttaatgatgatctcctcgtccagaggcttgatggtacagatatttacaacctctgcactgatgccttcctcttccagcatctttgctgcacccagagcggaatctacgcagataccagtggctacgatggtgacatccttaccttcacggactacggttcccttaccgatctcgaaatgataaccaggatgatcattgatcacgggtactgcagcacgtccgaaacgaatatatacaggtccttcatattccagagcggcacgaacagcggctcttgcttccacatcatcggaagggcacattactaccatgccgggaatggtacgcatcagagcaatatcctcgttacactggtgggtagcgccgtcctcacctacggtgatacctgcatgggtcgcaccgatcttgacattcagatgagggtaaccgatagagttacgtacctgttcaaaagcacgtcctgctgcgaacattgcaaaagagcttacgaagggaatcttacctaccagtgacagtcctgcagccacacccatcatgttggactctgcgataccgcagtcgatgtggcggtcgggatatgccttacggaagattccggtcttggtagctgctgccaggtcggcatccaatacgaccagattggggaattcttctgccagctccttcagggagttaccatagctttctctggttgcgatttttttcacggtattctctgccattactgctcacctgctttctctaattctttttcgatcttatcaaggtctgccattgccactgcatactcctcatcgttgggagccttgccgtgccagtccacactgttctccatgaaggaaacgcccttacccttcaggctatggaatacgatacaggtgggcatgcccttggtctctcttgcttccttgaatgctgcacggatcgcatcaaaatcatgagcatctgcattgatcacatggaaattgaatgcctcgaacttcttatcgataggataaggagagcatacctggtcgataggtccatcgatctgcagattattgttatctaccataacacagaggttgtccagcttacggaagcctgcgaacatggctgcctcccatacctggccttcctcgatctcaccgtcacccagcagtgtgtatacacggaaatcacgattctccatctttgcacccagtgccatacctactgctgcggaaatgccctgtcccagggatccggaagacatatccacgccggggatatggatgcagggatgaccctgcagataggagcccaggtgacgcagggtaggcagatcctctaccgggaaatatcctctgtaagccagtgcggaatagagtccgggagctgtatgacccttggacagtacgaatctgtcacgctcctccatatcgggattcttcgggtcaatgttcatctcctcaaaatataaaaatgtaaaaatatctgcggctgacagggatccaccgggatgtcccgctttcgcaccatgaactgcggtcacaatgcccttgcggacatcattggcacgcttttgcagttctaaattcttcattgtctcctccattccgccatattggcttgtctgttgcgatttacgttgttatactagcatacttccgaatgctagtctagtaaaagaattgctcttctaccgtaaaatattgcggtggcaaattccagcatacagttcagacctccattcataaatttgttcgttccactcacaaattcatttcatggaggtgcgctccgctaatagaatttgtcatatagtgctctgtgtgcaagcaccctcgcactataagccaaattctatttctgaactgtttggccatagtatgcattctttccatgcttgcgattatagtgcttatcctgcagctcctgcggtgccggctgaattctggggttgatggtctcggcacggtatgccattttggccacttcttccaatactacggcattgtggacagcctctctggcatccttgccccaggcaaaaggcccatggttcttgcacagaacggcaggcactgctttcgggtccttgcccagacgtttgaactcgttgacaatcaagtgtccggtattttcctcgtaagcgtcctcgatttcttcctttgtcaggcagcgcacgcagggaaccggaccgtagatataatctgcatgggtggttccgtagcagggaatgtctcttcccgcttgtgcccaactggtagcataggaagaatgggtatgcacgataccgccgatctccgggaacgccttgtacaactccagatgagttgcagtgtcggaagagggattcagatccccttccaccttattgccgttcagatccatgactaccatcatctccggtgtcagcttgtcataatccacaccacttggtttgatcacgaacagtccactctctctgtcaatggcgctgacatttccccaggtgaaagtcaccagaccataccggggcagatccatatttgcttcatatactttctgttttaattcctctaacatatactaaatctcattcctttccacagcctgccaactttccgacacataggtatcgtgtacttccgtacactatgcaggctcaaattgcatctgaaaaattattttgccgcaacggctgccttttctgcgggaagcagtttcttgtactcttccaggaaagcatcaaatcccttcacatcctcaggatccgggttcagtgtggttccagtctgtcctgcgaagatcttgtcattcagataggaagaaagagtctcgccgtcttttttctccttcatgaaagctgccagaatagcaataccccaggcaccgccttcactggctgtatccataacggtgatcggtgcgttcatgcctgctgccatgacacgctgtcccaccacgggagtcttgaagaagccgccatggcccatcagggaatccacggccacatgctcttcttttaacagaatgtccatgccaatcttcagggtagcaactgcgctgtacagatgggaacgcatgaagtttgccagtgagaaatccgcatcgggagttcttaccaccatgggacgccctgcatccagtccggtgatgggctctcctgagaaataattgtatgctgtcacaccgccgcagtccgcagcaccttccagtgccttgcggtacagcacgccgtacagttcattcttatctacttttacgccaaagctctctgcacattcgcccagaagatttacccaggcattcagatcggaggtacagttgttgcagtgtaccatagctacgggcataccgtcgggagtggtgaccatatcgatctcttcgtgtactttttccatagccttctccagtaccaccatagcgaaaatggaggttccggcagagacattaccggtgcggactgccacactgttggtggctaccatgccggttcccgcatcaccttcgggagggcacatgggtgcgccgggctgtaaggttccggtgggatccagtaattttacaccttccgcggtcagaacaccggcaggctctccggctaccagtaccttcggcagaatgtcacggatcttccagtcaaaattgtgtaagccatcgaactgatccagcatcttctgatcaaaatccataatggtggaatcaatggggaacatacctgctgcctcaccgatgcccagcaccttttctccggacagcttccagtgaatgtatcctgccagggtggtgaagaatgcgatatccttcacatgatcttctccgctcaaaatagcctgatacagatgtgcaatgctccatctctggggaatgttgaaattaaataccgggatcagcttcttgcaggcttcttccgtcatggtatttctccaggtacggaaaggcaccagaagttctccggctgcattgaacggcatatagccgtgcatcattccgctgaatcccagagagcccagggtggtcagcttctcaccgtattttgcctctacatcgtctgtcaggctcttgtagcatccctgcagacctttccagatatcttccaggctgtaggtccagatgttgttctccagacggttctcccagtcgtaggttcccatggcgatgggtgcgtggctctcatctaccagtaccgctttgattctggtggaaccaaactcaataccgagggctgtttttcctgttctgatcgcttcttttactgcttcgttcattgtgttctctccttttcacttctttatttatctcattttttatttccgttttcagtgcattccgcaacagattcccgctctacgacacgggtgtcaaattcgtaagtcaggtcctttttcctgcccgcgatcatctgtaacaatgtctccgctgcttttttccccagattctccttggggtgcggcagggaagtgatgggcacctcgctgtgtctcgccagatccgaatcgtcgatgctgatgactgacacatcttccggtacccggatattgcgttctgtcaacatccgaatcaactgaaaagcaatctgatcattgtatgccagaagggcggtgcattcctccacccgattcaggattctgtcccggcagtaaccaagttgcttcgattcgtccgtgtcgatccacaccatccgggaatccgtcacagtgagcccggcctcttccatggccttcagatatcccagataacgctgtctgccctgaccgtcatccagcttcaggattgccccgatcttctgatgccccttgccaatcagatatcttacggccttgtaggccgcctccgcatcatttaacgatacatgcggtgcctccagttcgggataataggtattgaaaaacagaagcggtatctttctggccatcaggtgccggtacagatccaggttcggattcggcaatccgctctttgtcccctccatgatcactccggccacatcgtcccgtttcaacagatccttcagaatacttttctcccggtccagcgtgttgtttgtgaaatagatctggacagaaaacccgctttcaaataaagtattctgcattccctgtaaaattctggggaaaatgtagctgtccacgtaggtagtcaccacggcgatgctgttgcgctgttccagattcttccggcggtcaaagctcacataagtgccactaccacggatcctctgcaccagcccgtcctcctccagcgtgccgatagctttccgcaccgtctgcctgctgatatggaactgttccgacagctgattctccgagggaactttctctcccggacctagttgtccgtctgagatctgttcctgtatgtaattaatgaggttttgatattttgtctccataatcactttcagtataatcagaccaccgtacaaagtcaatacatcttttacctgttttaggtacatttgtatatagttgtatggtgtacaactttgcagtaagtctatcccgcggagtattcacatatactcttaccaacactctttttcatcaggtaatcatcgtgcgtaaacgtccccctctctccttcccacaactactcgtatgtattagtcttctctgcgccctcaccggtgctctgacccttgtagcttcccatacctccccggatagacgttttgagcaattcacctctcaactttttcaggaggaaatgactggcagtaccctgaatatgcactacaccattgccgatccaaagacctttggcatctccgaatatgaacctgtgcttccgatctaccactccggccagccggaagacagaaaagaacactgttccgacttattgcaccggcttgaccgtatagaccctgacagactttccccggaaaatgcctatacttaccggttattgcattgctctctggaaaatgatctggctctggcagattttccttattacaatgagcctctgtcaccttcctccggaatgcagtcccagcttcccgttctgctggcggaatacaccttccgcacaaaacgggatgtcacggattacctggctctcctggatcagatagatgactattttgcctccctgcttctctacgagcaggaaaaagctgccgcaggcttctttatgcctgcctgctcctcagaaaaagtccggaagcaatgtgacactattgtcacaaccgaagaactggcacagggaactcattttttacagactacttttgaagaccgcctgtcagagctacagaagcagggactttttacaccggaggagactgcctctctgattgagaccaacgaccgcctgcttgccacggtggtgcagcccgcctatgccgccctgtccgaagggctgcactctctggagacttccaccaatgccgatttcactgcatccgaaacaactgccaatgctgcttcgggcaaaaacaacagtgcccacaatgggctcccgaaagggctcgccctgctgccggacggaaagacctactatctccatctgctgttttccgagaccggttcctcccgttccgaaaaagaactggtgcagatgctgcttgtgcaatttcagaaagagcaatccgcaatccgcaatctggcttcccagtccccttccctgattacactgctttctgaagaaaatacggcagttttccctctggcagaaccggaagaaatgctctcggatctacaggctcgtatgaaaaatgactttcctgtcagcagtcccgttcccaccgtcactgtcaaagatgtggtccccagtctggaaccctatagtgcaccggccttttacctaaccacgcctctgggagattccgacaataatgtcatatatataaaccgccggaactcccctcagggactggagctctacaccacactggctcatgaagggttcccgggtcatctctaccagaccgtgtacagcagccgcatcttttccgacatgcacacggatcctgccagaaaactcatctggtacggcggttatctcgaaggctgggcgttgtatgtggaatttctttcctatgattatgcggccactctgttggaacaggccggacagtcggatgccgcacagtcggcccggctggagaaacatacccgcagcctgcagttgtgcatgtacactctgttggatctcctgatccacggagagggtgccggatacgatcaggtggcagaggttcttgggaaattcggtattgattctcccgggacctgcgaagcaatctacacttatatcgcagaagagccctgtaattatccgaaatattacatcggttatctggaaattctgcagctgcaggacaccgccagaagtcactggaaagatgcttactccgaccttagattccacaccttttatctggaacagggaacttctgatttttcctcactggaaaacctgcttttaatgacaaattaacgtttttgtgataggataaagtgtacggatcatcaggttggaggaacccatgacacagtttacaagcaaggctatcgaagaatcctttatccggttgctgaatgaacggccgctggataagatcactataaaagacatcgtggatgactgcggcatcagccgcaacactttttactatcattttcaggatatcaccgctctgttggaacacattctgaatgcagatgtggagcgggtactgtcacagcatctggatatggactcctgggaggacggctttatctccgctgcccggttcgctctggagaataagcgtctggtctaccatatttacaattccgtcagcagagaacgggtggagcgctacctttacagtatcgccggagaggtcatgcggctgtatgtatccaggatcacggaacaggtggaacatgcggctcataaaaaaatatttcccgaagatcagaaaatggtggtagatttttacaaatttgccctggttggcatgattttagactggctgaacaccggaatgaagaaagatccagagggactgatccggcgtgtcggcgagattttccacggaaatatcgaagcagccctgacccgtgtgtcccgttaatttggacatttgtccatgtttgcacatattttggattatttaagagcaatgcgcaatttttgtgcattgcctttttttgtccgttttcaagactggattccttgcatacaataccaattgagaaagaatcgacaacgaaaggagccctgttttatgaaatttggtaaatgggtcgtaaaatgccgtattcctattctgatactggcagttgcactactggtcccttccctgatcggtatgatcatgacgcggatcaattacgatatgctgacttacctgcccggtgatattgacactgtagtgggtcaggatattctgatggatgaatttggaaaaggagccttttccttcgttattatcgagggaatggatcccaaggatgtctcctcccttcgggaagatatttcccatgtagatcatgtggacaccgttctttggtatgacgatttcgcagatgtttccgttcccatggaaatacttccttccaaactatatgacgctttcaattccggtgacagcaccatgctagcgatcttcttcgatacctccacctcctccgacgatactatggaggcgatcacagcgatccgcagcattgccggcaagcagtgttttgtctccggtatgtccgccatggtcaccgacctgaaggatctgtgcgaaaaagaggaaccgatttatgtaggtattgccgttgcactggcctgcgtagccatgatgatcttcatggacaactggatcacaccgtttgttttcctgatgagtatcggtatggcaatcctcttaaatatgggtaccaactatttcctcggagagatctcttacctgaccaaagcactgtccgctgtcctgcagctggctgtaaccatggactactctattttcctctggcacagctacgaagaacagaagagtatgtatgaggataacaaggaagccatggctgtagccatcaacaacactctgacctccgtggtcggaagttccatcaccacggtagccggatttatcgctctgtgctttatgagctataccttaggtctggatcttggtattgtcatggccaagggtgtcatcctgggtgtcatcggttgtgtcacaacgcttccttccatgatcctggtactggataagttattacagaagaccagtcacaaatccctgctgccggatatgggaaaagttgcttcaggtatcaccaaagtattcccggtattcctgatcctgttcctggggctggtacttccttcttatctgtcttataaggcaaccaacaatgaagtgtattacgatctcggtgaaacccttcccgaagatatggcctacgtggtagccaacagcaaattgcaggaagacttcggtgtaggtgccacccatatggtactggtaagcaccgatgtatctgacactgacgtacgtgccatgatccacgagatggaaaacgtcgagggtatcaaatatgctctgggtctggaatccgtagtcggccccctggtaccagaggaaatgcttccggaatccgtaaaagaagtattaaagagtgatgactgggaactccttctggtgaactccgaatataagaccgctaccgatgaggtaaatgcccagatcaatgagctgaatactattttgaaaaaatacgattccaagggcatgctgatcggtgaagctccctgtaccaaggatctgatcgagaccaccgacgaggacttcaaagttgtaaataccgtctctatcgtagcgatcttcgtgatcattgctctggtagaaaaaagtattaccctgccgctgatcctggtagctgttatcgagttgtccatcttcatcaatctgggccttgctcacctgacaggaacgtcacttcctttcattgccccgatctgtatcagtacgattcagctgggtgctactgtggactacgctattctgatgaccacaagatacaagcaggaacgctacgaaggcagggacaaacgtgaagctgtcaccaacgccctgaaggtatccattccttccattatcgtcagcgccatgggactgttctccgccaccttcggtgttgccctgtattccgacgtggacattatcagttccctctgtgatctgatggcaagaggcgctattgtaagtatgtttgctgttatcctgttcctgccggccatgttcatgctgttcgacaagatgatctgtgtcaccagcatcggcttccggaacaagaatgcagaaccctccaatacattgaaagaaaggacggcataagattatgatcaatttgaaaaaacaagtctggagaaccggggctctgtgcctcgccggtgtggtagccttaagtgttaccggtgtctccgtatatgcaaaaacttccgaaaagaaagagaccgaggtcaaggagcagatccgggatgccgtagatgacatctggaaatccgaagatacctccgcagcctccattgatgagaccgtctatgtgatcctgaatgcagacggaacccagcagaagatctacgtcagcgactggctgaagaatcagggagaaaaagattcctacacccagagcaatcccgataaggaggctcccatttccctgaaagttacttatacgttggacggcaaggagatctccccctcagatctgaacggccagagcggtcatgtagtgatccgctatgattacacgaacgaattatatgagacccgtgagattgccggaaaagaggaaaagatttatgttccttttgcggtaatgaccggtatgatcctggataatgacaatttcagcaatattaaggtgtcctcaggtaaggtcatcaacgacggcagccacagcgttgtcaccggtatcgtcttccccggactgggtacgaacctggatatggaagaggatttcgacgattatctggagattgaggccgatgcaacggatttcaccatgaatgaatcctactgcatcgccaccaattccgtcttctcccgtctggatttcagtaatgtggatgatctcgatgacctgacagaggcaatggatgatctgaaggatgctaccaacaaactgttggacgggacttccgatctttatgatggtgtcacagagctttatgacaaatccggtgacttgcaggatggtgtaaaagaactgtccgatggttccaacgacctccgggatggcgcttacaaagtagctgacggtactgtcactttaagaggcggtgtcggttctctgcggagcggcatcggtacactgcaggagggcaccaagaccctgttagcaggcacacaaagcctgcagtccggtactaatgatctgaagaatggtctcggtcagctgactgcacagaatgatactttgaacggcgctgccggccaggtattcgatactttgttgaaaactgcagcttcccagttaacggctgccggtctcacgcttccggaagaattgacaatatctaattatgcgaccatattaaatactctgtatcagcaaatggagcctctctcggatgctgacgttgctctgggatatgttctccggcaggccggactgacgattgaaaaatatcagggtatggttcaggcatcccagagcgtatcctcaggtgatgccgcacttcaggcaaatttgaaaaccattcaggataaagccacaagtctttcacaagctgccggcagcattgctgccttgaaagcttctctggatggctataatcagttctacaccggtctccagacttacaccgccggtgtagcatccgcaagtgccggtgcttccaaactggctgacggttccgcccaggtcgttgccggtgcttcccagttaaaggatggcgctgacaaactggcagacggaagtaaagagctgtatgatggtgctgatactttagtagaaggtgccagagatctggcctccggcagcggcaaactggctaacggcgtaaacgagctttccgatggaagcgataagctgatcgatggtatcagtcagctgaaggatggttccaaggaattaaaggacggcatgatcgaatacaatgacgaagccatcagcaaactgactgatatggataccgatgaacttcaggaagtgatcgatcgtatgaaagctacctcttccgtatccgaaaattacaactccttcaccggagacaataacggtatggacagcagtgtgaaatttatctacaagatcaacgctgtaaaataaaacatcacaagcccgtaacttgacaaagcccctctccttttctatacttgcaaaaggagaggggcttttcacttcctatattccgcttccgataacagaaaggcatacaaattcccatggaacaactattattcagtctcaatgcaacgattcccgtattcctggtcatggtgatcggttatgttttacagcagctgcatgttaccaacgactcttttgtcaaaaccctgaattcattcaattataaaatcaccctgcccgtacttttgttcaaggacatgtccactgcagatttttacagtgtatgggataccggttacgtgctgttctgcttcttcgtgaccctgttctgcatcgtcatcacctgggtcgtggcaggcattttttataagaacaaatcccgcctgggagagcttgtccaggcaagctatcgaagcagtgccgctgtcctgggtatcgcctttatacagaatatctacgggaactccggcatggctcccttgatgatcgtgggtacggttcccctgtacaatatcgctgccgtgctgatcctgtccttcaccggaccggatgcgaagggctt

SEQ ID NO: 5720 - DNA, 3580 bp, Unknown
  gut microbiota DNA sequence
tatcgccgtgttggcaaccccattggccctgatcggcctcggtgccggattcgagggtaaaaaagccttaaagcttttagcccccaccggagtggcaaccgtgttaaagctggtaatatggcccgctctgtttctgccactggccgtgtatttcggcttcaccggagaaaaactggtagcgatcctcattatgctgggctctcccaccactgtaagctgttatatcatggcgaaaaacatgaaccacgaaggaactttgacttccagcgtggtcgttgccaccacgtttttaagttccgttaccctgacggtgttcttgttcattttgcgaagcttgcagttgatttagttatatgatgcccacgaattgttccgtgctgcgcactctcacaattctacccaatattcgcctatcgtgggattatcatcacatttttcccgcaaggaaaatacttgccactgttcccgctaacgttgccagcaatgcccccggcagcgtgtagcgggtttttgttacttttgctgccagaaaatacacgctcatggtgtaaaaaatagtctcggtacagctcatgaggatcgaagtcagcatcccggcataagaatccggcccacaggtcttaaaaatatccagtaccagcccggttgccgcagaggaagagaacattttcacaataaggagcggtatcagctgtgccggaagtcccaccgcctgtgtggcaggtccgatcagatgccccagcaggtcaaaaaagccggaggtcctgagaatccccactgccatcatcaatcctaccagtgtcggaaggatctccacaacgatgcgcaggccctctttagcccctttcaaaaaagtctcatagaccttcacccccgagactatcccataacccacgatccagaaaatcaccatgggaatcataatatctgacatgtgtgtcaatgcgttcatcatgatcctcacctgtccttccatttacagtaaatgatggcaatgattgtactgaacagtgtagccaccagcgccggagcaatgatcaccgcggggttggcactgccgtactgactgcggtaggcgatcatgttgactgggatcagctgtaaggatgaaatattcagaatcaggaaggtgcacatctcgttgctggctgccgtggcctctgctccataccgccgatcctccgatccctgccgtcccttctccgtcccctgccctgccctctgtttctccagctccgccagctgctccatggcctttaatccagccggcgtgcaggcccagccaagccccaggacattagcaatgagattcgtggttatgtattcccctgccgggtgatcctccgggagcctggggaacatgaatttcagaaaggggcgaatcccttttgtcattttcgcgatcattccagactcctgcgcgatctccatcagtcccatccacaatgccatgacccccgccattgtgatgcagaggctcacggcctctctggcactgtctaacgcacctcccgtcagtgcgctcatctgcccggtacagacaccatagatcacgcctaacaggatcattcctgcccagatatagttaagcatctcataaaccgcctgctattccttcgtttcactatatgcgggcagcggtatgtcctatgcggcacaggtcacctttgcacgttgctcccgacgggatgtcacatgcaaaatgagccttgcgggcagtgctccctgccagattcaacgcttcttatcaggtgcactaaaataaacctcccgggaataaattctccgggaggtttactctaaactacatttataagttatatttattaccttcggatctacagagttccctgtgtgaacaggcttctcacatgtgccacttcttctgcggtagctttctccgccggcacataataagacttctctctggcgatctggtacagttcctcctgggactgctcacaggccgtacggaactgcttcagtgtctgttttaactccttattctccgactgggcgatcattcccgcataacgggtcagctcgccgttgattccggccagagtatctgctaccattgtcttttcctgcattctgctgcctccttactgcaaaaacttcataagctgctgtttgttctccatcgcgctgcgggcacccttttcaaaaaactgttttaccttcgggtcctccgcttccttggcgtactcctgcattttgcagtgggtcgtgtcaaaaccgccgatcagatggcgcagattctgcagatctaattctgaaatatcactcatgctgttaacctcctttttcttatttgcgaggttagtatgcgcagaatatttttttctatactagataaagtttgcaaaaatagataccgaaatcacggtcaaaataccgcagaccacgatggacagactgctcatggcgccttcgatctcacccagttccatggcttttgcagttcccagcgcatgagcactggtaccgatggcaagacctttggcaataggatcctcgatcttacacaggcggcagatcgtatctgccagaatattacctaagattccggtgacaatgatgacaactacggtaatggtcacgatcccacccattttttcagaaatccccataccgatagccgtggtaatggacttcggcagaagcgttacatactgctcatgattcagaccgaacatcaggcttaaagcaaaaacgctcaccatggcagtcagcacgccggcgatgattccgccgaaaatggccttgggataagtctttaacagctccagctgacgatacagaggcactgccaggctgaccgttgccggagtcaggaaaatactgatatattgcgcaccgtttgcataggtctcataatctatatggaacaataacaatactgccacgatcaggattacggagatcagtaagggattggcaatggcttttccagtcttctgtttgatccacagaccgatctcgtatgtgaccagtgtaatggcaatgccaaaaaatatggactgactcaatatttcattcatttatctgtcctccttatcatctgcggcagctttggttccgaccatctgcatggctgcggcacctttgtttttctgcccccggataatatgctggcatacccggcctgtcacgatcatgatcagtaccgtggataccaccgtgatcacgcagatgggaagcaacatctcttttaaagcatccacacttgccatgattcccacggtagcgggcacgaacataatggacatggcatccacgaggaaatccgctgcggtctccaccttttccagtgggatcagcttcgtgatcagccccaccagcatgatcaccagaccataaacgctggctgcgatgggaagtgggatcaggatctccagaagctctgccagaaaggagattcccaggataatcgaaaattgtttcacatatttcatgatattgtcaccctacctgttaactttagtatttcatttctttgatgtcggggtcaaaagcccccgactttgatgcctacggattgctccgtgctacgcactcccacgtctccgctccgctt

SEQ ID NO: 5721 - DNA, 4709 bp, Unknown
  gut microbiota DNA sequence
gcgcactatttttcagcacgcaacttcgtattatactactcggtttttactttcacaatcagcattctctaccatttgagtagactttttgaccttgctttcgtgaatttttaccttacatctggtgtcttaccaccgcatattcgtcatccagtcggaagtagggacattcctgctgtgttccggataaaaagcggtacatttcatcttcatccagattcaccatgcagcaatagcattcatagtcttcgtcatattcataattgacacaagcgtcacaattagtcattttccctctctccgcatatgcctttcatggatgtatcctacactatcctcatatgcttttgtctgttttgcttcggtttcattatggtattttcactgtttcatgagttgccatgcaagtactgatagatttcccgttttccgacacccctgtcttttgccacctgcttcatggcggatttattatccatgccctgctcttcgtaataagccatatgttcttcaatgctcatggattcccaggatgcgatctcttcctgtcgtttctctttcggacttttcccttccactaccaggacatattccccgcggggctcctctgtcttgtagtaatccaacgccttttccaaagtggtggggaatacggtctcgaacttcttggtcagttcacggcacaacgtgatccgccgctcccccagtgccgcatacagttcctccagtgtccggatcagatgatggggagcttcatagaggatcatggtacggctctcggtcttcagttcctccaggatcattttcttttcctttttatctgcaggcagaaatccttcaaagcaaaaccttctcgtactgagtcccgacaaagtcagcgccgtaatgcatgctgccggacccggcagagaagtgacgggaacgctctgctcctggcacatccgcaccagtacttcaccgggatcggagatcgccggggtaccggcatcagtgatcaacgcaatgttctgtccgtttaacagctgtcctaccagctggtgcgctttttctactttattgtactcgtggtaactggtcataggtgtgtggatgtcgaaatgattcagcagcttgatactgttacgggtatcctccgccgcgatcacatccaccgtctgcagggtctccaccacccgcggtgtcatatcacccagatttccgataggcgtcgcacacaaatataaagttccgggcatgagctcctgcctcctttccaaatcactttccctttttaatatccatatatatcatatatttccggcatatatactcccggcgcctggtacacgatcagtggcttttccacggtcatgcgtgatctgccgcctcgcaccgcctcgatgagcaccatattgggctccttgtcgatatagggatataccagctgcatccgtttcggctccagcttgtattttaccagcatggtcatgatctccgccagccgaaaagggcgatgtaccatgtaaaaatgtccgccgggctttaacagttttgctgtcctgctgaccacatcctccagcgtgcagagcacttcgtgtctggcgattgcttttggttcctccgggttcgtcaatccatgctgtccgatcatatacggaggattgcaggtaatacagtcaaaggaagcagccgggaaaatctggtctgcttccttgatgtctcctgtcacgatgtcaatgcgattctgcaggtcattcagtgccacgctgcgtctcgccatatctgcgctctcctcctggatttccagtccggtgagatgagaacagtggtattttgcctccatcagaagcgggatgatcccggtgcctgtgccaaggtcaagcatcgtatccctttctctggcatgggcaaatcctgtcagaagcaccgcatccataccgaaacaaaatttctcccgattctgtatgatctgataaccgttccgctgaaggtcatcaattcgttctttatccctcagttcaaccttcattcgtgttctccggttttcttccgttaccgttattaccgttgttgccgtctcttctgccgccgtgtctcggtcgtctgcggaaggaattgtccctctgagttctgcgctcgccttcctgaccgttaccaccttcctgttgtgtctggctggcgggacggaactgatctgctctctgtgcattgtcccttacctggtccggacggttctggggacggttctcgcggcgtctgtcacctcgattattatccctgcggttctcacttttgttgccattgtcaccaccacggttgtcattgcggttctgattctcgccgttacggttattttccccgcggttattatttctgcggttgtcgtccctgcgtccgtcgcgtctgcggttttctccacggttgtcaccacgattctctccgtcagttctctgctctctgcggtcctgacgctgctccgcacgtttttctgcgcgttcttccgcttcttccttctcctcgatctcctctaacttctcgagttccttctgttcttccttagacagttcctgaccgccctttttgccgcggcgtctcttgaattgtaacgtgtctgccgcgtactccttcagttccttctcgtcgccgacttctaccagcaccttgaccagctggcgcagtacgttgacgctctgtacctcgccgtgcagtccgtccgccgtctggacatagtcgcccacaccgggaagcttgcggttcagttcctcgtaagtgtcttcctcatttttcaaacagcacatcagtctgccgcagactccggagatcttcgtcggattcagggacagattctgctccttcgccatcttgatggataccggtacgaaatccgacagatagctgtggcagcacagaggccgtccacagatgccgataccaccacggatctttgtctcatcacggacaccaatctgacgcagctcgatacgggtcttgaacacacttgccagatcctttaccagttcacggaagtcgatacgtccgtctgctgtaaaatagaataataccttattgttatcaaacgtatactccgcatcgatcagcttcatttccagaccgtgctttaaaatcttctccttacagatcttgaaggcttccttttccttctccttgttggcagcctcctgctcgatatctctctctccggcgatccgcatcacaggcttcagcggctggatcaccttgtcatcctccacttcatgcactcccgcaacgaccgtgccgaactcaatacctctggcggtctccacgatcacgtggtcgcctctctttatctcaagctgcagcggatcgaagaaatataccttgcccgctgtacgaaatcttacaccaattacttttgtcatatctatctacctcactgatgccggtggcatcttctaataaattaaaataacgtagctattcagcaccccatcgcaaaatagcagctgcctgcgcgaaatgcgcctgcaactgctattttatcatatcttttcgaaaatgactactctatttcttctatcgcttaccgctttaggatctgagttccacacccagcttattgttcaggttcttgagaatcttcttcacgtagccgtccactgcctctgtggtgaattcttcctccttcggggcaaaggttacggtgaaggccatggacttcttctcgggtcccacctgtaatccctcatagacatcgaagagttctacggactccacgaagctgctggcttccgcgatggccttctctacctcgccacaggtaacggacttgctcattaccagtgccaggtctctggtctccttggcgaacctggagatcggtgcgaaggtaggaaccttgccgtatacgggacgcagggctttcagatcgatctctgcgatgtatgcggattcacgcatatcttcttccttctggatctcgtaggtcagctgacccaggtagccgatctcttcgccgttgtacagaatctttgcagtacgataaggatgcaggaaggtcttcttgtcctctacatattcgaaatcaatgaacagagtctctgctacggtgtctaccagacctttcagagtgaagaaattctcttccttgccccagataccgatgcagatggtctctctctcatcgggatactcggtcagcggcagatccttagggatgaatttattgccgatctcatatactctgccttccagacaaccgttcttctggttacgggcaatggcatggatcatctggggagccagagtggtacgcatcagagacagatcctcgttgatcgggttgatcagacggatggcctttctctccggtgcatcctcaggcaggcctaacagattcagatcggaaggagagaagaaggaataatgtacaccctcaaatgcgccctgtgcacacagtgctctcttgatcttaagctctgtcttctgctttatattcataccgccgctggttacggctgctgccttcaggaaagtaggcgtcacatggtcgtaaccatacatacggatcacttcctctgcaatatcgggataggattccatatcttcacgatatgcgggtacctgaatggtcagttcgtcaccgttaattacgggctggaagttcagggattttaagattctctcaatatcagcggtaggtacttcaatacccagtacaccatttactttcttgatgcttgccttcatct

SEQ ID NO: 5722 - DNA, 35382 bp, Unknown
  gut microbiota DNA sequence
aggggcacaacatttttcataacttgtttgtgccttgagcgaagcgaaaggaatgacaaaaactatgaaaaagatagcaattctggggtctaccggctccatcggaacccagactctggaagtcgttcgcaataatccggaattgcaggtggcagcactggctgccggaaaaagcgtagaacagatggaacagcagatcagagaattccatcctctgatcgcaggcatgtggagtgaggaagcggcagcagacctgcggagccgtgtggcggatttacctgtgaaagtcgtaagtggcatggatggtctgttggagatcgcaacaatgcctcagtcacaggtattagtgacggcgattgtgggaatgattggtatcagaccgacgatcgctgccattgaagcaggaaaagatattgccctggctaacaaggagacgctggtaacggcagggcacatcattatgccgttagcggcgaaaatgggtgtgaagatcctgccggtggacagtgaacacagcgcgattttccagtcactgaacggagaaccggccggaagaattgagaagatcctgcttacggcatccggtggaccgttccgcggcaggaccagagagcagctgcagaatattcaggtggaggatgctttgaagcatcccaactggtccatgggacggaagattaccattgattcttccacactggtgaacaaaggtctggaagtcatggaagtaaagtggctgttcggtgttgatctggatcagatccaggtcattgtgcatccccagagcattatccattccgcagtacagtatgtggacggagcggtgatcgcacagctgggaacaccggatatgaaactgccgatccagtatgcgctgttttatccggatcggcgtccaatgccgggaaaacgtctggacttctatgaactggcacagatcacatttgaaaagccggatatggagacattctttggcctgaagctggcttatgatgcacagcgcatcggtggcagtatgcctacggtgtataatgcagccaacgagaaagcagtaggactgttcttagaccgtaagatcgcttatcttcagatcccggagctgatcagtgaggccatggagcagcataaggtgatcgagaatccgaatgtggaggagatcctggagacagaggcatctgtctatgattttattgaaaaagtgtattctgagaggcaataaatggttactttgatcttgtttgtattgatctttggggtggtggtaatctcacatgaattcggacattttctgctggcgaaggccaatggaattcatgtgatagaattttccgtgggtatgggcccgaatctgttttctttccagaaaggagacacgaaatattccctgaagcttcttcccatcggcggagcctgtatgtttgagggggaagatggtctgaatgagaaggaggacggtgaagatcacagcggatctttcctgaacgccaatgtgtgggcgaggatttccaccgtgttggcaggaccaatatttaactttattctgggctttatcattgcctttattatggtgaatctgattgtgatccgtgatccggtagccacggagatcgtggatggcggcgccgcacaggaagcgggactggaggccggagacaggatactttccttaaatggcagtaaaatacacctgtatgaagaaatacagttatttactctgacttaccgtggcggagaagtggcggtggaatatgaaagggatggtgtaaagggaactacaacgctgacaccgaagtacgatgagagcgaaggccgctatctgatcggcatcagtaatgcggatttcgtagaactgtccggattggacagcttccggtattcctggtatgagatgcgctactgcgtgaacatgacctggaagagtctggcgatgctggtgcaggggcaggtctccaggcaggatgtggcaggccctgtaggcatcgcggtaaatgttgttggcaagacctacgaaagtaccaaggattacggctggcagaatgtactggtgaatatgttgaacatcaccctgatgcttactgttaacctgggaattctgaatcttctgccgatcccagcgctggacggcggccgactggtattcctgatctgggaagccatcacacacaagccggtgcctcccgaaaaagaaggcatggtacactttattggactgatgttcttcatggtactgatggtgttcctgttatttaatgatctggttaatatcttcggataagccggataattcaagacgttcaataagtaagatccgttgacaaagggcataccgcatggtatgctctttttatatttgtgcaaggcacatttctttgaaaaatttcatgccgatcggcaaaaatttcctgatgtagcaatgtaacactgaagtaagaaacagtacggacaaaaaagaataaaaaaggaggaatgcgtatggagcatgtgacagcctgttattggcaaaaggaaacacctgcagagctgtttttatctttgcagcaacgaaaataccgtaggctggggatttccgtggtatgcgcctgtatctcggacaacggggaactggtaagaagtctgcaaaacaaaatggaggaggaactggaagaagagaatgtctggaggccgtttcgggaagaaatattgcaggagaaatggatggacattataaggcagcaaaagcaggatgacagttatgcgggaatcttatgcgtggggagcagagtattgtttttcagtcacgggagaatgcggatctgtggatgttttcagagattcggcaggacacaatggaggacgatgcaggaatcctgcatggcgggagaagtggaaccggggacggccatgttgatggcggacaatgggttcctgaatttctgtgaagaggaactgacagcatgtctgcaaccgcagattgcaggaagaccggatgcacgggaacgcgtggaaggcgctgcaagacggctgaaggaactgggagaaaaggcggagagacacggaggaacacacatgggagcggtgtggatcctgccggttatgggaggaaaaggatggagcagagaataacagaaaatatgggcagatcattaaaggaacatggctatcgggatccggtatttgtgggcaaggggagtttcgcgaaggtttaccgcgtccgggacgaaaaaagggactttcaggcatgtaagatatcgaaagttacagaacagtgggaacaggagtgtcgtaacagcagagagatctgtcatcctctgtttccggcctacagagaacactggacagacggggaatgggggtatctggtcatggaattctgggatggctgtgacttgcggaaaatgctggacaggagggggagactgtcaccgggacaggcggcccggatagctttgcagattacagagggattgcaatatctgcatgaacggccgcatccgtttctctaccgggatctgaagccggaaaatatccgcatccgcgtggatggaagagcggggattctggatctgggatgtctgtggaaccgggagcaggactggtcgggagcgggaaaccgaagcttcagcgctccggagcagttcgtgccgggggagattcccggggaagagagtgatgtctatgcagtgggcagactgctggcagttatgttgggagatgacacagacggcacagtcagacaatctgggggaataaggaggcgtaatgcggaaaaacgttgcggacgaaaagagcaaaaacaggaaaaatggcttcgcaaagtgatcgccatggcaacctgtgaagagcgtaaggatcgtatcccggagatcaaaatgctgcgtactcttttgatggtgacggatgattccgggagggagaggaaacgtgcatgtagggcagctgatttttactatgtccggaagttgtactgcccatagttgtacgttccgtgctcgaacacaatcaagaaattttacaaaaaagtgcttgctgttttggagagaaatgagtatactgtaactaaaggttcaaagaagcgtatgaggaccggaagcaattaaatttacatagcaaaaaggagaagagttatgcgtttttttattgacactgcaaaagtagaagacattaagaaagcaaatgacatgggggttatttgcggagtaactaccaatccctccctgatcgcaaaagagggcagagatttcgtagaagtgatcaaagagattgcatccatcgtggacggacctatcagcggtgaggtaaaggctaccaccgtagatgcagagggtatgatcaaagaaggaagagagattgcagcgatccatccgaatatggtcgttaagatccctatgactgtagaaggtttaaaagcatgtaaggtattaagctctgagggaatcaagaccaatgtgaccctgatcttctctgcgaaccaggctctgttggctgcccgcgcaggtgctacctatgtatctcctttcctgggcagactggatgatatcagcaccagaggtgtagatctgatccgtgatatcgctgatattttcgcagtgaccgatctggatacccagatcatcgcagcaagcgtgcgtaatcccatccatgtaaccgattgtgcactggcaggtgcggatattgctaccgttccttattccgttatcgagcagatggtaaagcatcctctgactgatgccggtatcgccaagttccaggcagattataaggcagtctttggtgaatagtctgtcaatgcataggcaggacgactgcttgcaggcaggaacgcctatgcattagacggacaaacagacatgagcaagtagggcgatagcccggaatgcgaatgtctgtagcggttcgagagtgcgaagcacgaagaagcgcgtgattcaccaaagaagacgcaccgtgagcaagtagggctacagcccggaatgcgaatggctgtagcggttcgagagtgcgaagcacggagaaacgcgtgattcaccaaagatactgacacagtaagaagctgtacagagaatatctctgtacagcttcttttgggttctgtcgattccggcagagcttatttcatctgctcttcctgcttcttgatcatacgacggaccatctcaccgccgatgcttcctgcttccttagaagtaaggtcgccgttgtaaccctctttcaggttaacacccagctcagatgctacctcagtcttgaaacggtccattgcagcctttgcttcgggaacttctactctattggttttacttgccatttcgttcacctccgtttggatttgggttttcttgtttcagataagcgctttttgtgatcacttatcttggtattagtatgagcatcggcctttttttcatgctggtaagtttttcatttttatgttacactcaaacagcaacgaaggatacggagaccggaaagcgtgaccaacgatccactgaccggaatcccacagaagtgactgacctttgaagctacaccgtaactgcggaagctgagaagagaaggtgtttttttgttgtcaaaatgtaactattcagaacctcttcgaataagaaggctgatacttcatgcttgcatgcaagtagcagttttcttattcgcaaggtggcttgaatagagtcactgccccgtacatgagcaaaattagctgccttgcagcgagaaagcacgatttatcgtgcggttttgcgaatgctggggtgggatgataatcccacgatatgcgaatattgggtaggattgtgggagtgcgtagcacggaacaatccgtaggcatcaaagtcgggggcttttgaccccgacatcattttatgacagaaaggcgaaaaaacaatgaaaaagaaaacaaaaatcacaaaaactctggcacttgtactgactcttggactgttgtgcagcggtcttgccggatgcggacaggcacagagtgtggaaacagtgtcggaagatctggtagcggagagcgtacagcccactgaaacggtggagagtacggaaaccgttgcggaaggcacagaagccacagcagaaaatacggagaccgcggatggcacgctggtacgtgtggcatccttaaagggaccgacctcattaggacttttatttttaatgaataaagcagacaagggtgagactgccaatacctatgaattccagatggctactggtgcagatgagatcctgccgctgatggtaaagggagatctggacattgcactggtacccgccaatgtggcaagcgttctctatcataagacacagggcggtgtgaaagtcattgatatcaatactctgggtgtactttatatggtatccggagaagacggtctgacaaactttaccgatctaaagggtaagaccatttatctgactggaaaaggaaccacaccggactatgtattgcggtacctgctgacagcaaatggtatgtctgcggatgacgtgatactggagtataaatccgaagcaacagaggtggcatctgtactggcagaagatcccacagccatcggcctgttgccccagccttttgttaccgcagcctgcatgcagaatgatgcactgaaggtgatcttcgacttaaacgaagagtggaataaggtacagggagaggacggcagcagcatggtcaccggtgtaacggtggtccgcaaggaattcctcgaggagaacgaagaagcagtgaaatcctttatggaagatcataaggcaagtgcggaagacatcaatgcagaccctgccaccggtgctgcactggcagtggaggcccagatcgtagccaaagagcccattgctcagaaagcaattccgaactgcaacattacctatattgacaaagctgaaatgaagcaggcactttccggataccttgacgtactgttccaccaggattccctgtccataggtggcggacttccggaatccgatttctattatgatgcagaataagggtaaaatatacgttaaaaaatttataatactgttgttctggctgggagtatggcagattctggcaatgtgtgtggacaatttcctgctggtggtgacacctttgcaggcattgcgggcactgcttactctggccgggcaggtggagttctggcggagtgcctttgattcgctgtggcggatcgccttcggctttttgctgggggcggtattggcacttcttctggcggccatcagctaccgttatccgctggcggaagaagtcctgcgtcctttcatggtattctgcaaggcagtaccggtagcggtatttgcagtgcttttgctgatctggtggggttcttccatgctggcggtggctatctgttttctggtagtatttccgaatatttacctgaatacgctggaaggactaaagagcgcggacagagggctgttagagatggcggaggtattccgccttccccttggtactcagttcttctacatttaccgtccggcgttaaagccttttttgctcagcgcgtttcagctatctctgggaatgtgctggaagtccggagtggcggcggaagtgattggcactcccagtcattccatcggtggagcactgtatctggcgaagatttatctggatacggcggatctgtttgcctggacagcggtgatcgtagtactcagtgtattttttgaaaaaataatattctacgggattgaagtctttttccggtgggagcctgcctgtaaggatccctccatgccacagaaaatcgctggcagagaacagcgcaccctgtgtgtaaggaatcttggaaaaagttttcacaatcaatggatcttccgacatgtggatcacgaatttcacagtggggaaccgtatgtactggataacccttccggcagtggcaagaccacttttttccggtgtctgtgcggactggagcggccggaggagggagaagtgtcggaaatggatgcttttgccatgcaattccaggaggatcgtttgtgtgaagactgtagtgccgtgaagaatctggaaatgatcctgggagatgcttcacaggcgagaacggcattgacgcagttgttgccggaagaagcgttggatcagccctgccacgaactatcgggaggcatgaaacggagagtgtctctggtacgggccatggaggcgggagcgcagtgtgttctgctggatgagccttttaccggactggatgaagaaaaccgtaaaaaggccgaagactatatccggaggaagacgagaggccggatcgtgatgatagctactcatatcagaaccggagaagaattttcggaaatgacgcagatgcagatatagaaaccacaggaggaagaccgatatggaaaaaggtacggaaaatacaagagtgaccctgatcggcattattgtggaggatccggaggcggcgataaggatcaacggacttttacacgaatatggggaatatatcatcggcagaatggggataccttatcatgaaaagcagatgaacatcatcagtgtggtcatggatgccccccaggaaaaagtcagtgccctgtcggggaagctgggaatgatccccggagtcagcacgaagtgtctgtatgccccggacgcgcaaaaagccccaaaataaaaaggttgtcaattcctccaacttatgctataattgcaaaatgactgcgactggatacagacccgcaagggtataaaggaggaaatgttataatgagtttacaggttgaaaagttagagaaaaacatggccaagctgaccatcgaagtatctgctgaagaactggagaaggcaatcgaaggtgcttaccagaagaataagaacaagatcagcattcccggtttccgtaagggcaaagctccccgtaagatgatcgagcagatgtacggcaagtccgtattctatgaggatgcagcaaacgcactgattcccgatgcttacgataaggctctggaagagtgtgaggagcagatcgtatcttctccgaagatcgatgtgacccagttagaggccggcaagcctttcatctttaccgcagaggttgctctgaagcctgaagttactcttggcaaatacaagggtgtgaaggttgacaagatcgacgttaaggtaagcgatgaggatatcgacgctgagatcaatagagagcgtgagagcaatgccagaaccatcagcgtggaagaccgagctgttaaggacggcgatatgaccgttatcgatttcgaaggttttgtagacggtgttgcatttgagggcggcaagggtgagaactatcccctgaccatcggttccggttcctttattcccggttttgaagaggcactggttggtgctgaactgaacaaggagacagaagtaaatgtaaccttccccgaggattatcatgcaaccgagctggcaggcaagcccgcagtattcaagtgcactgttaaggagatcaaggagaagcagcttcctgatttggatgacgagttcgcaagcgaagtatccgatttcgataccatggctgagtatagagaagatgtacagaaaaagctgacttccaagaaggaagaggaagctaagatcgccaaggaagaggcagttctggatgcagtgatcgaggatgccaagatggagatccccgatgcaatgatcgagacccagcagagacagctgttagagaactttgcacagagaattcaggcacagggcattactctggagcagtacatgcagttcaccggtctgaccgctcagaccatgatggagcagctgaagcccgaggcactgaagagaatccagtcccgtctggttctggaagctgtagcagctgctgagaagatggaagctaccgaggaagacttcgaagctgaagttaagagcatggcagaagcttaccagatggaagctgacaaggtaaaagagcttctgggtgagcagggcgctaagcaggtaagagaagatatctgcgtaagaaaggcagctgatttcatcgtagacaacgctaaggaagcaaaggctgcagccaagaagaccaccaagaaggaaaaggcagcagaagagaagcccgaagaagcataatatatgctttaagatacgatagaaagagaaagcggattcccacatccgcagggaggtggggatacgctttcttttaaatttttattaaatcttcggaatctcgttgaaaaagcctgataagtaggatacgatagtaatattaatcagaagcaatggaggttttagaatatgagtttagtaccttacgtcattgaacagaccagcaaaggtgagcggtcttatgatatttattccagactgttgaaggacagaatcatttttctgggagaggaagtcaatgagacttctgccagcatcattgtagcacagctgctgttcctggaagcagaggatccggataaggatatccatttgtatatcaacagcccgggcggaagcgttactgcaggtatggcaatttatgataccatgaaatatatcaagtgcgatgtgtccaccgtatgtattggtatggcagccagcatgggagctttccttttagcaggcggtgccaagggcaagcgttttgcactgcccaatgcagaaattatgattcatcagccactgggtggaacacagggtcaggctaccgagattgagatcgcagcaaagcatattcttcgtaccaaggagaagttgaaccgtatgctggctgagaacaccggcaaggattatgagaccatctgcgcagacaccgagagagataactggaaaagcgctgaggaagcttgtgagtatggtctgatcgataaggtgatcaccttccacgaggcatagtgtaaaaaatatgcttgatagcatattttttacacagctatttgtgccgcatacggcacaaagtagcttttatcgcagagccaaatctgaaatttggctcgcgtttcctacgacgcaaaagcggcgtcttcggaaggagataaaataacaggagtatagtagtaatggcaggaaaaaattccggaaatgacatcagatgttcattttgtaacaagacccagagtcaggtccgcaagctgatcgcgggacctgcaggggtatatatctgtgatgagtgcgtagacatctgcgcagacatcctggaggaagaactggaagatgaagaagtggaagagactgcgagtcccgacattaaccttctgaaacccaaggagatcaagaacttcctggatgaatacgtcatcggacaggaggaggccaaaaaagtcctctccgttgcggtgtacaatcattacaaaagagtaacggctcccaaggatctgaatgatgtggagctgcaaaagagtaatattatcatggtaggacctaccggttccggtaagacttacctggcccagacactggccaagatcatcaatgtaccgtttgccatagcggatgccaccacactgaccgaagcgggttatgtaggtgaggatgtggagaacatcctgttaaagctgatccaggcggcagattatgatgtagagcgtgcacagtacggtatcgtatatattgacgagatcgataagatcacgaaaaagagcgagaatgtatccattacccgtgatgtatccggagaaggtgtacagcaggctctgttaaaaatcatcgagggtactgtggcaagcgtacctccccagggaggcagaaagcatcctcatcaggagctgattcagatcgataccaccaacattctgtttatctgcggcggtgctttcgatggactggagaagatcgtagagtccagactggatcgtaaggccatcggtttcaatacggagctgggcagaagagaggataaggatatcagcgaactgctgcaggaagtaactcctcatgatctggtgaagttcggtttgatccccgagttcgtaggacgtgtgcctatctgtgtctccttaagaggactggacagagaagcgctgatccgtattcttcaagagccgaagaacgctctggtaaaacagtaccagaagctgttccagatggataacgtagaattgagctttgagcaggatgccatcgaggctattgctgacaaggcactggaacgcaagaccggagccagaggcttacgctccattatggaatccgtaatgatggataccatgtatgagattccttcggatgacaccatcgaagaatgtgttgtcaccaaggcggcagtggatggagagagcgagcccctcaccatacatgatgaatctctgaaaaaggcaaaataatccgggcgctgccttgtggtcacacagggcagcgttttgtgcaaaaaagtacaaacctaagatgcgcaaaagcagcgcagaaatggagtttttatgatcataaagaatgtaagtctggaaacggtctgtggtattaccagcaagcttccggagaatatacatcccgaagtggcattcgccgggaaaagtaatgtcggcaaatcctctctgatcaacggattgatgaaccgtaagtctctggccaggaccagttcccagccgggcaagacacagaccatcaattattacaacattaacgatgaaatctactttgtagatctgcctggctacggctatgcacaggccaatgagcatgtgaaagcccagtggggtaagatgatcgaagattatctgcataaatccaaacagctgaagctggtatttctgctgatcgatatccggcatgctccctcagagaacgaccggatcatgtatgactggatccgtcgcaatggctacgatcccatcatcattgccaccaagctggacaagatcaaccgcagtcagatacagaagcaggtgaagctgatccgcaccaccctgcaggccggagcggatacacagatcgtaccttattccgcacagacgaaacagggaagggaagaaatctacgagatcctggacggtgtcttggctgcagaggatcctgcacaggaatagaccgtaggaatggtgaatgagtgtagagacataatgcgtgagagagtgagagtatatgaagaaatattgtaaagccttagtgaatctgggtatggcatttattatattactattgattgttttcctggtgccgaagctgttagtattctttgcaccgtttgtagcaggctggatcatagcgttgatcgccagtcccctggtgcgtttttttgaggaaaaggtaaagatcaagcgaaaagcgggaagtgcatttgtcattgtggcggtcatcgcactggtgatattgatcctctatctggtaggggcgaagttaaccgatgagatcatgggattgatcggtgcactgccggatatctgggacagtgcggagaatgattttgccgatatcgggcagaacctgagcgttatctataaccgttttcccgtggatgtacagcagagcatcatggatgtcatcaatcagatcggaagctatgtgggagatctgctggggaagatcggcacccctacgatcaatgccgtgggcaattttgccaagcaggttccttcgatcctgatcggactgatcatggcactgctttcttcctatttcttcgtagcagagagagatcagctggcagcctggttccgtaagcacacaccggcggaagtactgtcctggtattatatgttgaagcgcggactggtcaaagcagtaggcggatatcttaaggcacagcttaagatagaagtgtggatgtatctgttattagtcatcggatttgctattctgcaggttgactatgcgttgttgatcgcacttgggatcgcatttctggatttcctgcctttttttggaaccggaactgttatggtcccctgggcaattatcaaaatcttaagttctgattataaaatggccataggactgctgatcatctggggcatcggacagctggcgcgtcagctgatccagccgaagatcgtgggagattccgtgggaatgccgcctctgccgaccctgttcctcctgtacataggatataagctgggcggtgtcgtaggaatgatcgtggcagtgcccattggtctgatcgctctgaccatgtatcaggagggagctttacagacgaccaaggacagtgtgaagatcctgacagccggaatcaatcatttccgcagactgaagccagaggatatggacgaagtgcggcagatgcaggagagagaccggaggctgagcgaggaactggccagacaggcagcagaggaagaggctcaaaaagaagcccaaaaagaagctcgaaaagaagcttttgcgaaaaaacagaaagaaaagaaatcatgagaaatatcagactgcgactgcaatatgaaggaaccagatatcaggggtggcagaaacagacatccacagacaatacgattcagggaaaaatggaagttcttttgacgaaaatgtgcggggagcctgtggagatcgcagccagcggcagaacggatgcaggagtgcatgcgttgggacaggtggcgaatttccatacggaatctgacatgagtacagaagagatcatggcctattgtaaccggtatctgccggaggatattgccgtggttgaggtgtcggaggcggcacccaggttccacagcagactcaatgccaccgggaagcgttaccgttaccgcatcatcaacagccagatcccggatgtattctggagacgctatgcactggaagaaccggaaaacctgaatctggatgccatgcgggaagcagcggaacttttgctgggggaacatgatttcaaggcatttacttctgccaaaaagagtaagaaatccacaatccgcagaatcgatgaaatcaggatcgaacagattgaagaccggatagaatttgtatttacgggtaacggatttttgcatcacatgatccgtattctcatgggaaccctcctcgaggtcggaaagggaatccggacaccggagagtgtgacggatgtactggagtccggagacagagcgaaggcgggagcgctggtaccggccaaaggcctggtactggaagaagttttttacacctgaaaaataaaaatactgcaactttttgccctacaattacgtctagtatattgtagggtattttgttgcctataactaaaatattcagagccacattcgcaaaatcgctcttacagagctttccttttgctcattgtggctacttcgccctataaatttcgtcagatatccttatgcatgcaagcattcaacggatatccgataaaatttacatggctctgaatagtttatagaattttaataattatgttgcagaaaatatgcattgacaggatacgataaacgtagataaggcggaggggtcttttccgatacgaaaggtgtaaggtgtggagcatggaaaaaagggttgcagtatacaataataatacgggtgtgatagagacaatgagttcccttctcgcaggagaaggcttaaaaatggtggcagtgacggggagagcacagttacaagaattactgcgggcacaggagatccagcttctgctgctggatgtggaactggatggcaaaggttggggagaggggattgagatgatccatgatatccggaatatgaccacgatccccattatcatcatttccgcacaggatgcggagactgccaagatcatggcactgaatgccggggcagatgattatgtgacagtgggatataatccgctggagctgttagccagagtgaaatcccagcttcgcagatatacacagctggtcaatctgtgcgaaagtattgatagtatttaccgcgtggatggactggagatcaacgacaggaaccgcacagtgacggtagagggacgggaagtgaagatgactcccatcgagtataagattttaaggctcctagtgcaggagcgcggcaaggtactgtccatcagccagatctacgaatccatctggcatatgcaggctatcggagcggataatactattgcggtgcatatccgccacatccgtgagaagatcgagagcaatcccaaggagcccagatacctgaaggtggtatggggaaccggatataaggtaggatgaaaaaagattgtccataagtgtgtcctctgcgtcagcaggggacatttttgtaggagtctgacaaatgggttgcttgacaaagcagaacaaatacattattgtactaattaaataatacaaaaaccgaggatagaatataaggatgcagacagaagtaatatcggaagggaaaatacaggaaaaacgtggaatcagcagtgcagtgctgaaaaatatcgcggtagtgactatgttgatcgatcacatcggggctgtgatcgtgacaaggctgttgatccggaacgggctgtatgaagctatggcgaatcaggaggcctatactgcctggatggggcagaacggccgaatgtacggcatctacatggcaatgcgtatcatcggcagatttgcgttccccatttactgttttttactggtagagggatttcaaaagacccacaatgtgaaaaagtatctgggcaggatgtttttatttgcactgatttcggaggtgccatttgatctggcattcagcggcaaggcatggtatccggcatatcaaaatgtattttttacattgttattggggctgctggtgatcgcgggacttcatctggtggaacagcattttgtgggtacaacggttggaaaaacgattctgcgcgtgggactgaatgccgttattattctgacaggatgtgtactgggcttggttcttaagacggattatgattttaaggggattttggcaatcactgtactttatctgttccgtaaccgaaagaaagcacagatgtgggccggtgtcatcatttttttattgatggacagcctggagatgtttgcagcactttcctttattctgatctggttctacaacggaacgagagggcggcagaataaatatttcttttacttattctatcctgcgcatctgctgctcttgtggctggtatgtgtggcaatgggaattgcgggaattcctgcaatctgacgaaccgcaggatgctctgtgaatagtaaagtggaagacggggaagacagtgacatggaggatatggcgtatatggaagagaaaaaatgggagacaggggacagcgaagagttgatccgtgtacaggagatcagcaagacatttcatctgtctgcaaaacaacgaaaaatggagcacagtgcatcgaagaccaaaacagcggtggatcaagtgagcttttgcgtaaaaaggggggaagtgttcggacttttgggacctaacggtgccggtaagaccacaacgcttcggatgctggcaacgctgatccggccggacagcggggatgcggtgttatccggcagcagcgtagtgacacagccggaggaggtacggcgtaagatcggcttccttaccagtgaactgaagctggaggatttttttaccccggattatctgtatgactttttctctggattgtacggtattccgacagacagacgggacgccagaaaacgcatgctgtttgcacggttcggcattcaggagtttgcacaggtgcgcgttagggatttgtccacgggaatgaagcagaaggtatccctggtgatctcactggtgcaggatccggagatcataattttcgatgagcccaccaatgggctggatattctcacagcgaaggtggtgacggatttcctgctggatctgaaggagcaggggaagaccatcattgtatccacccatatctttagtctggtggagaagatctgtgaccgtgtggggatcattattaatgggcagatgacggtttgtgaaaatctgcagacactctgtggagagaagagtctggaggatcgtttttttgagatctatgaagcggtaagtggggaggaaacggaccatgacaaataatacgatcacagtaatgaaaaaagagctggccagatttttcggagacagaagactggtgatcaccacactgctgcttcccggaattatgatctatgtggtgtacagctttttgggcagtgtcatgatgaagaccatgcttccggaagatacttatgtggcgaaggcttatgtggtggacatgccggattccgtaagagaagagatgcgggaactgcgggtggactggcagcaggcggacagagagcagctgacggagatacggcaggagatccaggagaaacaggtggatggtctggtggtatttccggcggattttgatacagtggtggaaaactaccaggtcagtagtggggaacctgcgcccaatgtagaaatttattacaattccgcggaaccggaatccgctcatttttacaatgaggtatcggaggtgctggagcagtatgagacttccttagctaataaactggatatcaatgccggagattcggtatactatgactgtgccaccagcaaagatactacggggcagatgttttccatgatgatgccgttgttgcttatgatgtttttgtacagtggatgtatgtctgtggcaccggagtccattgctggggaaaaggagcggggtaccatagcgacattactggtgacacccatgaagagaagttccctggctctgggaaaagtgttttccttaagtatcatagcgcttctggcaggctgttccagttttatcggaacttttgcggcattgccgaaaatgatgggcggagaactgaccggcgtggattcctcggtgtacgtacctatggattatgcgatgctgcttctgatcattctgtcaacggtaatggtgctggtatccatgatcgcactggtctccgcttttgccaaaagtgtgaaagaggcagctacaacagtgtctccgtttaccattgtggtgacatttatcggattgagccccatgctcagtcagggaaaggagatcccgctataccgatatctgatcccggtatacaacagtgtgcagtgtatgaacggtattttttcctttagttatcagccggcagaaattatcgtgacggtgatcgtaaatctgtgcgcggcgggagtgctggtattcggactgacgagggcattccagagcgagaaaattatatattcatgatgacaatgcagcaaatgcgtaatataatgtacgtgtttgctgtttttttgcagataagtacattttatgttcgaaagtccggatattttttggaccatgagaaaaatgaggagcataaccatacgaatgacacgacagaaattaaaacgttttcatgtgaagagaatatactctacattgctgctttcttatggtgcgctgttggctgcaccgtttatagcagtatttttgctactttcattttggaaaaatagtacagagaactattacagtgaaattatgaaaaatgacttaacggaaggccgcatggcatttgaaaagcaactggatattatgtgtgcaggagctttttctgtatcaaacgacagtgatttaaagtgggtctattttctggacggattgaaggatggggacaataatatcgcagcattaatcagatgcaatgacatgcttcgccagacctttgcggattcagagcactatcagaattacagtgtgattatgaaaaatgaattgatatttcgaaaaagcgggatggtagttggggataagtttttttatgacaattattgcacttatcaaaatacggattttgagacctggagaaaacagagtttcgagtcgaatacgtggcagctgtttccgttggaagaaatagatacaggggagagaacatttcaggcaatgacattttcctaccctgtgcggaattatattcaacaggagccggaagcaaatgctgtagtacaatttttgctttcaaaagaaaatctagagcaaatgtttggacaactgttgagccgacaaggaggaattctgatttatggtgcagaggacagactgcttgcaagtctggggaaaatcaatgcggatggtgatgatccggagaacacggatctgtttctaagtgaagcaacaggggaagatatccggcagataaaatggaatggaacagattgtctggtggtaaatcagacatcggaagaaaatggaatgcattttgcggccgttcttccgatggcggtagtaatgcagaattttcaaagaattcgtagagcagcatggttgattcttttcacaggggcagtactggaaattggccttgggtgttgttttgcattaaggtacagcaaaccgattcataacctgattgacaatatgcagggattttttatgctggaagacagagaaattcataaaacggaaaatatttcagagtatgaatatctggagaagggagttcatgccctgttggatgattatcagtctttgaatgcgatgctacaggaaaagaccgtgaaagagagaagaaattttctgacattactaatgaacggagaatttgacacagaacttaatattatagaggaagctgcccatgccggaatccggttagtgcagaaggattactatgtactggtgtttggcagtgaggagggagaaaaactgttgtcagcggcaaaaaaatgtgcagagacggaaacagaacagatatggtatccggtagatccgacccatgtagcattgctgcaatattgtacagaggaaaatcctatggaacctctgcttgtaggagagcagacagcagagaaactgaaacagcttggagcggaggaggtttatgtcggaatcggcagctgttatacagaaaagcgagaaattgtattttcttatcaacaggcgttatattgctctgataagggaaaaatagaaaaacagaatgtagtggaatacagcagagagctgtggaaaaggaatatgccttggtatccgctggaaatggaagaaaaattacaggctgctacaaaaaacggtaattcagagcaggtaaaagaaatttttataaaaataagagaagaaaatctgggaaaaatacatctgtcggccaatggagggaaagtcgttatatcgggaatcacctctactttgataagaatgtgtaataatatggcagaaagtatggaaacggagcagctgctggaaaaagtacagacggaacagtcgtttcccaaagcattggaagtattggaaacacagttcctgcgtctatgcgaagaaaattatcacagcaggagcagaaagagcgagatatactatcagaaactggaagaatatctggagaaaaattatggcaatccatctctgggcgtccccatggtggcagaagagtttggactatcagaaaactatttttctatctttttcaaggagacgatgggaaaatcttttagtagctatttggaaaaattaagactggaaaaggcaaaaaaattaattgccgaaggaaaatgggatatggagaccattgctcagatggtgggttacggaagcagcgcaaccttccgacgggcctttaaacgtgcctacgggatagcaccttcggcatggaaagaataaaaatctaagaaaatgcgcagtacctaagaaagtgtacggcgcattttcttagattttgtacgttgcatcaggaatttcaagttgttgtttcagtgcccggcctgtattgtgaaatgcgtaaggcagccacagtacaaatacaaaaaatcaaatcggtaagctgtgggctgagcaaaaaaagaaggcgagggcacaaaatgaagaagaaaaaaattgtagcacttttaacagcatgcatgcttatgacaggaatgtttaccgggtgcggatcatcccaacaggcagcaggatcatcaggagcagaagcaggtcagacacaaacaggggacaattcattgtttaatgaaccgggacaacttcccattgtaaatgagcccgtgactctgacggtgtttgcgcctgcaaatccggacggcagctgggaagataatgaaatggtaaaagaacttgaagagacaacgggaatccatttggagtggcagacctgtgcggcttcagataatgtacaggaaaagctgagcaccatgttcgcttcgggagatcttccggatattattttaactggtgtaggcagtagtaaccgctatgacaaagcaacagaacaggcgctgggagagcagggactgatcttacctttaaacgattatctggacactgtttcagtaggttataagcaggcactggatgaaatagaggggatgagagactatataacaactcccaacggtaatatttattctttaccgaatgtagatggatccctgcatgtacaatacaatatgaaattgtggatcaatacgcagtggctggataatctgggattagagatgccgacaactacggaagagttttatcaggtcatgaaagcttttaaggagcaggatgccaatggcaatggagatctcaatgacgaaattcctttgtcaacagtgacttccggagcgggtacacagattgatggatttctaatgaatccgttccaactgacttctgagacaaataaattgtacgtggacaacggaaaagtgacatttgcacctgttcaggagggatataaagaaggactgaaatatttaaagcaattgtatagtgaaggttttttaaaccctgaatcttttacacaagataaaaataatcaggtaaacataaatgaagcaggggatgaatgcgttatcggagcatttctggctcaaagaccaggatatgcatgtgatttgacaacagaaccctattccgataaatggaagcagtaccagtcacttgcacctttgacaggaccggacggtcaatgtgtggcatcctggaatccttatgttatgttccagacaggtatgacatttatttcgagcagctgcagtaatcccgaagcagcattccgtctgctggattatattgagacgcagacatacagagctattcttggaaaagaaggtgtgaattatgtcatgctggatgatgatacgacagaagtaggcatggatggtgtgacaaaagcactctataagaaactggatgcttccacagccaatgtaactttgaatcaggttacggcattggtgcgtacaccggatttcctgcttgcagatgctacgaacccggatccgtatgcggaggatgttaagccggtcaatggtcgaaatgtggttatttacagagcgtctcttgaacatgaaaaggtgcgacagtccagagagtcggtaatgccggatttatatatgagccaggaagactccagcgaaatgtctttgcttaagaccaatgttatggatgttcagaaagaatatatggtgcagtttattaccggagcaaaggatattgatgcagaatgggatggctatatcagtgccctgaataatgtaggactggagagatatttggagttattacagaaggcatatgatgaatcttcttttgcaaaataggagatcgggaaagccttttgaaacatttgcaagggggactgcattaaggcagccctccttttatagaaagaaggaagaaaatgaatcctaagaaaacaattcgtccggaacataaaaaacagcatgcaaaaaatacaatacgcagcataaaaaggcattggcagttatatctgatcgtagcactgcctctggtttatctgatcgtttttaaatatatgcctattattggatcgcagatcgcattccgggattacaatttcaaaggaggtatctggcacagcccgtttgtaggacttaagtatttcaagatgtttttccagtcaccacagttctggagactgatgggtaatacattgggcttgtctgtgtatggtattgtattgggagtttttccaccgatcattcttgcgattgcattgaactatgtcagagtgcgatggttcggaaagacggtacagatggtaacgtatatgccttattttatttctaccgttttgatcgtaggtattctgtcacagatgttatctctgacgggtccggtgaatcacctgatcgagaatctgggaggacaggccattcattttatgggagagcctaaattgttcaaaacattatatgttttctctgatgtatggcagaaaacgggttacaatgccgtaatttatatctctgcgcttgctgcggtagaccaggaattacatgaggcagcaaccgtggacggtgcgaatatctggcaaagaatcagatatattgacattcccagtatcatgccgacagcagtaattctgttgatcatgtcctgtgggcatattttgacaataggatatgaaaaagtactgctcttgcaaaatgatttaaacatggcaacttcagacattatctcaacgtatgtttatcgtatcggtctgagcggaatgcagtatagctattcgacagcgattggtatattccagtcagtggtatctctgatattattgctggttgtaaacaaaatagcggataaggttgccgataccagtctgatatagggaggaacataagatgaaaagaaaagttatgagcaaaagtaatcgtatattttatatagtaaatactgtgctcctgatgatatgtcttctgttggtagcgatgccaattctcaatgtggtagcttcgtctttgtcttcgccaagcgctgtaataagaggacaggtatctttctggccgaagggatggaatattgatgcatatgaggagatattttccaacaggtctcttctgaccggttataaaaattccattatatatactatagtgggaacatgcgtaaatattgtattgacaattatggcggcatatccattgtccgtaaaggattttattggaagaaaggtgatcagcgctctgtttattttcgttatgatcttcacagcaccgttgattcctacttatctgaatgtcaaaaacctcggactgctggatagtatgtgggcattgatcttaccgggagcaatttcggtatataacatgatcattgcaagaacctatttccagaacagcattccgggagaaatgttggaatctgcaagactggatggatgcgatgatatccgggttctggttaatatggtattaccgttgtcaaaatctattttggcagtattggtactttattatgccattgctcattggaattcctattttgatgcatttatttatttgtcttcagagaataaatttacactgcaggtagtcctgcgtaatatcatgaattcggtagcagctttggaggaaatggcaactacggcagaacaaagtatgcgtgcagcgaacattgaagtattaaaatatgctattattgtatttggtagtattccactgattattttatatccttttgtacagaaacattttgtaaagggtgttatgatcggttcagtaaaaggataaggagcatttgtatggtcgcagaacataaaatagacaggcagaaactgatatcgggacataatccggtgctgacggagatagcaacggactccccgcttacggtaggaaacggagaacttgcttttacggcggatatcaccggaatgcagacgctatacgaggaatatcaggaactcccgttgtgtacaatgtcacaatggggatggcacacgaaaccggtaagcagggaaaagtacaattatacactggatgatctggtgatgacggaatatgtaaacagagaaggacgtctgttaaaatatccgcaggataaaaaggtgggcaatgaagatgtctataactggctgcgggaaaatccccacagactgaatctggtaagggtccgcctgcagtgggaagaggagagcatttctgcagaagatatcaccggggtgcggcaggaactggttctgtatgaagggattctgtacagtgaattccagatacggaacaatgcctgcagagtgcggaccgcctgtcacaatgaagggagagacatcctggccttttctctggagagcgaggcactgaaggagaaaaaaattagtatagtgctggatttcccctatggagcttcggatattaccgcatcggattggacacagaacgacagacaccgtaccacgatactgcagacgagtgatgaaaaaatgcttctgtggagacaactggacagggatgagtattatgcaggtatctatgcgcagggaggaaagatccgaaaggaaggcagccatacccttcgtattttcgccaatggagaaaaactggacatctccatagcgttaggaaaacaaaaagagcaggcagaatgtttatctgcacaggaagtaatgaacgcatccaaaagagggggtaggcgtttctgggagcggggcggtatcattcagctgaataaaagcgctgaccccagagcaagggaactggaacggcggattattttgtcacagtatcttatggcaatcaattccagtggttcgacacctccgcaggagacaggactgacatgtaacagctggtacggtaaaatgcatctggagatgtatctgtggcattgtgcatggcttccgctgtggcatcaggaggagctgctggacagaagcctggcatggtatagggaacatctgcagcaggcaagagaaaatgcggcaagaaacggctacaaaggagcaagatggccgaaaatgatcgccacggaaggagtggattgcccttccaatattgcgcccttgctggtgtggcagcagccgcacattatctatatgctggaaatggcatatcgcagaaaaagaaatcgcagattcttagaggagaactgggaactggtgaaggaaaccgctgatttcatggtagattttgtgggatgggatccggtgaaaaaagtctacagtatctgtgctccggtaataccggtacaggaatgtcataaggcaatggatgtgtgcaatccggcttttgaagtggagtatttccgggataccttgcggatcgccggatggtgggcagaacgactcggcagggaaaaggaagaactctgggaacaggtagcggagcatatggcagaattaacggaaaaagacggcgtgtacctggcacatgaaaattgtccgacgacatttacggagtataacagagatcacccctctatgctgggagcttttggtctgatcgacagtgaccggatagacaggacggttatggacaacacattgcagttggtagaggaatgctggaaatatcctaccctgtggggatgggattttgccatgatggcgatgacagcggtaagattaggaaagccggagaaagcaatagagttactattgaaggaatctccaaagaactgttatgtcacaagcggcaataaccggcagacaggacgaaaggacctgccgttgtatctgccgggaaatggatcactgttattggcagcagcaattatggcggcaggatatgatggttgtgacaggcagacaccggggttcccggatgacggacaatggatcgtggaatttgaaaatattgatccattgccgggtacgagccctgtcagccccattgactaggcagaaaataaagtgtaaaataaagctatatgccgtaaaatagaaatttggaggaaaataatacatgcaactgcctatttttgagaaatacattgatgaactgatcgagaagagtactttggatgttcccgcatggaacatagagaaggcgagagaggggaaagctgccggctggaattacattgacggttgcatgatcctggcacttttagagatctacaacgctaccggagagaagaagtattacgaattcgcagatgcatttattgaccacagagtacaggaagacggtacgattacgaagtattccgtggaagaatataatattgacaatgtcaatgcgggcaagactctgttcgcattgtatgccctgaatggtaaggaaaaataccgcaaggccatcgacctgatctacagccaggtggagacccagccccgcaccgaggaaggcaacttctggcacaagaagatctatcccaaccaggtatggctggacggcatgtacatgggacagcctttctacatggagtatgagaccaaattcgatgacaagaagcactatgatgacatttttcatcagtttgccaatgttgtaaaatatatgagagatcccaagaccggattgtactatcacggttatgatgcctccaaaaaggcattctggtgtaacaaggagaccggtctgtcccaaaatttctggctgagagcactgggctggtattccatggcattgttggacactctgagcaaatgtgagccgggggaagagtacaaggcagagtatgacaatctgaagaaggtattcgtggatctgatcgattccatgttaaaattccaggacgagagcggtatgtggtatcagcttccagcactggggggtcaggagccgaattatttagagaccagcggaagtgcgatcatggcttactccctgctgaagggcgtgagactcggatttttaccggagtcctacagagcctatggattaaaggcatttcagggaatctgtgaccgttatctgaaggagaaggatggacatttaagcctcggcggtatctgcctcgtggcaggactgggacctgaggataaccgtcggcgtgacggcagcttcgagtattatatgtccgagcccatcgtggaagacgatgccaagggtgtgggaccgctgcttttggcttacacagaaatgagaagactggatgactaaatgaagtcaggcggaatgatgaagaacgataacagaaatgacagaagaacatccggacctgcgaaagggacggaaaagaccaaagcaacgggaaaagccaatgcggcgggaaaaactaaagtgacggcaggcaaggaaaaccgggtgcccgtaggacagggccgggaaaagacggctgttaaaaagaggagtggtctctgcccggtggctgataaatgcggcgggtgcagctggatcaacaagccctatgtggaacagttgaagaataaggaaaagcaattaaaggagcttctggctcctttttgcaaggtcgagggtgtcattcccatggagcacccggagcattaccggaacaaggtacatgcggtattcggcgagaaccggtatcacgatgccatctccggcatttatgaacagaagagccaccggatcgttcccgtggacagctgcctgatcgagaatgccaatgcggatgagatcattgtctctataagagggctgctgaaatcttttcatatccgcccttacaatgaggacaccgggtatgggctgctgcgccatgtgctgatccggaccggccatgttaccggccagatcatggtggtgctggtactggcgtccccaatcctgccctctaagaataattttgtgaaggcactgctgaaactgcacccggagatcaccaccgtggtcatcaatgtcaacaaccgcaataccagcatggtattgggggacaaggagcatgtgatctacggcaaaggttatattgaggatgagctgtgcggaaagcgtttccgaatctctcccagatctttctaccaggtgaatccggtacagaccgagatcctctacgggaaagcactggagtacgccggacttaccggcaaagagaccgtggtggatgcctattgtggcaccggaaccatcggcatgattgccagtgacaaggccgccaaggtcatcggtgtggagttaaacgccgatgctgtccgggatgcccgcaacaatgccaaggcgaaccagatccgcaacatccagttctaccagaacgacgccgggaaattcctcgtggaaatggccggacagggcgcaaaggtcgatgtggtcctgatggatccccccagaagcggcagcaccgaagaattcatgaattccgtagcccagatcggcccggagcggatcgtctacgtctcctgcaatcccgagacactggtacgggatttaaagtattttaagaagaaaggttaccgtgtggcgaagggcgtgggcgtggacatgttcccgtttaccgattcgttggaggcagtcaccctgctggtccggcagaagaagtaactgggaagttattttggtataaatagtataaaaacaatggattccgtacaaaaaagttccgaaatcaggaatttttgtacggaatttcttttatttgcgtacttggcgaaaataaagcatttttataagacaaaatcacctgcttttgtatttttttcaccgatattagcgttttaaatacaagaaaattcgtagggattgcaatgatgtatgtcctatattctgaaagttaaaatatacattcagaatacaggacaaaaatgctactttttcaattgcctgcttgtgactgatatgaccgctgctgtagcaatcaatgtttctctctacagtacgagagccttccgtttgaactgttgcatattgtgcaagagggatgaattgctacatatgatatgtaggattaataaccacggattttacggagctccgtgcggatcttcttcatctgatcagcgaaggtacgctgcttgcggccaagcttctcggcgattgcacgatctgagatcttgtaatcatcaagccagcactgaatgatggtatcagcatccggatcaagttctctcaacctattaaaaagctggtcgagaaggagcctgtctgcaattacattttccattgatggtgatgaattaggaatgcagtcgtacatattggcttcgccgtcttcggtaggaatgtcgagtgaaagtgtatctccgactgcatgatatttgcatccgatgcagtctccatcgcattcccagagatgttttttgctacacatacaacgatgatggagctgctctttatgacggatgcggtcggcctccttatagaaagcatcacgctgttcctttgggacagagatcttctctcctgtagaacgaagatagatgaattgtgtactaagattttcatgatttgccataaattttcctcctgtgattggctttgttgagcaatcgtagaggcacttggctatcacgaaattctcatcttcctatcatcacaaaacgttgcgtgcaattgaaaagaagtgtggattgtgatatactttattaaggtttattggggtttggtctgatttgtataccagagaaaattctgcatcaaaataaaaaagtccctgtgatttgctcacaaggacatccaatagttgatgtcttcatagctatttacaaaatccagcacgaacgtctttttatcataaggtgcacaaatacggtttaaccgggacaatgtctgtaccgcattaacacctttcagctttttcagaacatacatggcacagagtttcggctggtcaaatccggtctgatatttatttgctaccaggagaacctgatatttatccgtatcaaattcctttgtaagtcgatcctccggaaatccattcaaagagctttctgtatactcctgctcatcatccggaagctttacttttccagagaaagccaccaatgcatgaatgccctcgtatcctttcttcgcaatgtaatcttcaaatgcctgacgatactttactgcactctgacgagaagcggtaatcaccattgccttagtggatatgttgagggcgagttagataacaataaaagccatggggaagaacatttagtatattgtatagacaatggtatgacaaaaatatatgttttaaaatggagtgaaatatttgatgagttttcaaagcgacatgaatacttgctggataaattaaagcttgaagaagaattgtggctgcgtaaacataatagtgcggatgaagtagtagctgatgcacaaaacaattctgcaataatggaaatgccgttaatacctaaaaaagcaattgaataaaatatctgaagggtagaaaaatatgaagttagaaaatttgaaattgttaaaagaagatatgattaagaatggttggaccatctgtagcttcatttttacatataagcgaattgagtatattgtgcttgtgaaaagatttgtaggaacagaaaaacgggtaaataaatatgctttggttaaattgcatttcatcaaatctaaaaaccttgatgatgatttacaagttgaagccaatagttctggtatattaatagatgcaaggcaattaagagaatattttgaaatagagtataatgaaaatttaggagatatccttcaagaatttatagaaaggctaggaacttttattcctacaagtattcccagcaatgtatctgaaatagaaaaaaatgcaatgatacaatccttgagtaagagtgattcggaggatccaagtaaaatatattgtaataaagttcgaagaaatcctaataatgggcatagaagcgaatttaatgctgataaaaccaaactgttaagaccatccttatatacctattttagtaacgatgagagtatcagtttttgttattattccgatgaaagaatggaaaatgatgatgaaacaatattaaaaaatttttcatcacgatagtaattgatagtctaattcggattgtaggagaccagcttaaaatgaaaagtattaataaaacaaaaaatgattcaataagtgaacaagcatctgctacgaaagaagaaatgatagaatttgcatccaaatataaaaatatcgaagcgtttaaggattctgatgatgaaacaacgtattgggttattatgctgtttatcctattgatgtatattgattacaatacacaaaagttatgggaaagttttgcagaagaagtaaagacaaaaaacagattttttccagaaagtgaattgctaaaaaagatatctgatatcgcagaaaaagcaacgtgtactatatcaaaaggtgatattttgtatcgtgcacgagattataccgaataagatttccttaaaaatgatatggtaataactctttctgagataatgaaggatgagttttctaatttagaatttgatgctactgacatttttaatgaatcagcaatgaatattgcgtccatttacctatgtggtgatgaggaaaagaggagaagaattacagaaaaaatagataatctgttgaataataaaaaggacttctatggttttgataaaagtaattctgatgctccgccgaatgcctatgcaaaagaggggagagctaatccaaaaggaataagctatttatatactgcaaaagatattaaaacggcaatattggaaatgcggccacagatgcagaaaatgtataacatagccactatagaaatcatcagagatgctaagatatttgattttacatattcgcccgaaaaaataaaggaggatgagtattctatagttgcggacttacatagaatttctgaagagttttctaagcctaattttggagatcaaatagagtatgcaccgacacaatttctctgtgaatatattaaaagacttggttttgatggaattaagtttaaaagtgcagtatcagcaactggtacaaatgtgttgctttttgatgttaatgcgaaaacaagagtttatgatattacaggttcaaaagtgtatactgttaatacactagatatagatattagccaagttatgccaatggaaaatgaagataaggagcaaccacaaatgttatttatatgttaccccaaatgttcaacctgtcaaaaggctaaaaaatggctggatgagcataatataaaatatactgagcgccatattgtagaggtgaatcctacttatgacgaattaaaggaatggtacgggaagagtggactgacccttaagaagttctttaatactagcgggcttctttataaagaaatgcagcttaaggacaagctgcctacaatgagtgaagaggaacagattcagttacttgctacaaatggaatgttggtaaagcgtccacttgttgtaaatggagatactgtgcttgttggcttcaaggaagcagaatgggctgaaaaattgaattgataatttttgagaattcgtttatgtatatggaggaaaggagctgagaatctcatatgtcagatttgtttgatttatcgaactttgataaatataaagaagataactgccgagaagtgaaaaaggcagaaggtggattgcctatagcattatgggagtcgtattcctcatttttatgtaccaagagctaaacgtgatcagaagtctgtttatattaataacgatttatttggtggctgctatcgtagagattgggaaggcgactatcattgctcaaaggcagaaattaaaggtatgctccgtgatgctgcggatgagacagaggatatgaagattgtagaacagtttgatatttctgcaattgatacagagtccttgaagggattcagaaatcatcataagagctatcgtccagagcacgtatttaataatttaccagatgatgagtatttagagagaatagatgcagcaggatttggtgaggatggtaaattacatcctactacagctgggttgcttatgttcggtgaagaatatcatatcgtaagagaatttccagagtatttcctagattatagagagatgctggaccaaacaatacgttggacagatcgcttgcagtctagctccggtgattggagcggtaatgtatttgatttcttctttagagtaaatagcaaaatttcaaaggatattaagaagccttttaagcttgaaggtattacgagggtggatgatactccagttcataaggcagttcgagaggctttagttaattgtttggttaatacagattatttcttgccttgcggtgtagtgattaagaaggaagatgacaagttggttatcgagaatcctggtagcattcgcactggtaaaaagcagatgcttcgtggtggtatttcagatcctagaaataaaacactaatgaagatgtttaatatgattggtattggtgaaagagctggcagtggtattccagatatttatcaagtttgggagaatgaaggttggccaatgcctgtggtggaagaaagttataatcctgacaggactcgtttatcgcttgaatttaagaaacaagcgaacaaaacaagcgaacaaaacaagcgaaccaaataaacatagaaaaacagaagagaattatcagttgattagaaagtatttgaaggaaaatggattgtctaagacaacggatatcgcacaagctattggattaagccctgcccgtacaagagctatactgaaagaaatgtcagggcttgaatatgaaggcacaacaaataatagaagatatcgcttagctgatgataattagtataaatcgtgagagttgttcataaaacaaagaaggtgaccgttggggtgactgatagggtgaccgatacagaaagaataatttacggaggcactttatgggagtgattgatattgccagtagtaagtctgtatggcgtggtatggaatattataaacagaataaagttctttcg

SEQ ID NO: 5723 - DNA, 41602 bp, Unknown
  gut microbiota DNA sequence
catgttgatatggagcatccgcgaaagtccacctgcgattgtcctttggcaaatggaaagaaaatcatatgcaaacatattgtagctgtttcactttgtcttgatgagtctgaggcagatcgctttaaaaatgaaaagacaatatatgcatcagaggaagaggaacgcagagcaaagaaatatgaaaagtatatgggatttgccagaactatgtctccgagagaactgagagaagcatatgtggaactgatgactgaactggatgaatataggttgaaagaaaagtacgggaatccccatatcacctcggctttaccaacgagccactgcgaagcagttacgctcctgacacgacagaagaagtaactgataagtcagtttggtgtaaatagtataaaaacattggattccgtacaaaaaagttccgaaatcaggaatttttgtacgaaatttcttttatttgcgtatttggcgaaaataaagcatttttataatacaaaattacctgcttttgtatttttttcgccgatattggcgttttaaatacaagaaaattcgtaggaatctgcaaggcacttttacattagctttttacagtcgttgacagtcacagccttttaccataaaatgaacagtaagaatgtatgaaaaaggaagagaaaaatgggaaaatctgagaaacagatggataaagagcaagggcgcaaccagcggatcatcgatacggcgttccggctttttgtggaaaagaaaatcgaagcggtcagcatggatgaggtcgcaaaagaagccggtgtgggacgtgccacattgttccgctgttacaacaataagacggagctggctattgcggtctgcgcatcgaaatggaaggcttatctggacaagctggatgaggcaagaccaatctcttcgatacacgatattccggccatcggaagatttatttttacgctggacagttatatcggcatgtatcagaaccataaggatctgctgcagtataatgacaacttcaacaattatataacacaccagacggtgcggcaggaggaactggcgaatttccacgcatccctgaattccgtcaacacaagacttcatatgatgtatgcgaaggcaaaagaggacaagaccttccgcacggatattccggaggaacagttcatgcgtgtgacggtgcataccatgatggcagcgtgtacccattacgcaggtggttttatctggggagcaacggacaacaaggattatacaggtgatctgctgcttttaaaggaaatgatcttgaattatgcccggaatgacgccaatctctaattttcaggtatactgatcccgacagccggtggaacagatgactgattgacattgcaatttcagaaaatctgtgatatagtagccacaattgaatatggagtattcaggtgccggagcagtcacgtaagtagctggctccggtgaaaagggaagcaggtgtaagtcctgcacgaactcgtcaccgtaattagggagctgaagccgatagatcactgggagaccgggaagatggcggatgcaatgatcttcaagccgggagacctgcctgaatgctgtacagaaacatttgtttcaaagccacgagtaactggttgtacgtgtggaatgcagaagggacagaatcttttttgcattcgtttcttatgtgtacaaaccctttacctgatacaggaaagggtttttgtttttgttgcgaaaaacatgtttctgacttacatatttaagaacaccggggcaaaccccaaaatcaaaagagacagaaaaactgtcagaggaggaaacatgaaaaaaagaatcgtagcagtagtactggcaaccgtactgggcgctgtatgcatcaccggatgtggcagcacgcaggaagtagcagagagcactgtacaggcaggcactgaggcgcagaccacccaggcagcggaaacagcagctaccgaaagcaccgaagatgcagatcaagcagcagccgatgaagtggcagcattgatcgatgccatctatgtgcaggagagaactgagaataccgataagcagtgtgcagatgccaaggcagcatgggatgcactgaccgacgcacagaaggaactggtagagggagaaaatgcagatcccgattatttcggcagagataccggagatgcttccaaggatgatccccgcaatcaggatgagatcggtgagaacgagattctggtagtaagcttcggcacttcctttaacgacagccgtgtggcagatatcaagggtatcgaggatgcgattgcagcagccaatcccgactggtctgtaagaagagcatttaccgcacagatcatcatcaatcatatacaggcaagagatgacgagcatatcgacaatatggatcaggcactggaccgcgctgtggcaaacggtgttaagaacctggtagtacagcccacgcatctgatgcatggcgcagagtatgacgagctgatggaagctgtagaagcgtataaggatcagtttgcatctgtaaaagttgctgagcccctgttaggtgaggtaggctctgatgctgccgtagtaaatgatgacaagaaggctgttgcagaagaactgaccgcagaagcagtaaagactgcaggctatgacagtctggacgctgcaaaggaagatggcgtggcattcgtattcatgggtcatggaacctcccacactgcaaaggtatcttacagccagatgcagacacagatggatgaactgggatatgaaaatgtatttatcggaaccgtagaaggtgagccggaagagaccgcctgtgaagaagtcatcaaggctgttgcagaagcaggttacaccaaagtggttcttcgtcctttgatggtagtagcaggtgatcatgccaacaatgatatggcaggcgaggatgaggattcctggttaagccagttcaacgcttccggaaagttcgacagtgtggatacccagatctcaggcctcggcgggatcaaggctatccaggatctgtatgtagcacataccgcagcagcaatggctgagaaataagaattaaaataggaattaaaatcaggaataaaataaggattaaaataagtaatgaaagcaaagacattaatgaataaaatcataatcgtgggcggactgagtgcctgtctgctgcttggcggctgtggagcaggtcaggcagcggatgcgacatctgcagaaagcacggttgccgcacaggaaagcaccgtaacaccgacagagagcacggaaacggcggaaactgtcagcacagagactgcacagaacgaagcacagcttcctgatggtgtctacaccgctgaattttccacggacagctccatgttccatgtcagtgaagcctgtgacggcaagggaacactgacggtaaaggatggcgttatgaccattcacatttccttaggctccaagaagatcctgaatctctatccgggtctggcggaagatgcagccaaagatggcgcagtgctgcttgagcccaccacggataccgtgacttacagtgacggaatgacggaagaagtctacggcttcgatgtccctgtacccgtgatcggagaggaattcgatctggcactgatcggtaccaagggaaaatggtatgaccataaagtaaaggtatctgatccggtggcagagggtgccgcagacacttttgatctgagcgctgtagaagacggtagctacaccatcgaactgaccatggagggcggaagcggcagagcaagtatccagtcccccgcacagcttgcgatagctgacggagcggcaacggcgactttggaatggagcagcccgaactatgattatatgctggtaaacggtgaaaaatatctgccggtaaatacggaaggcaattccgtatttgaagtgccggtggaagcactggatgcaccccttaccatgatcggtgataccgtggcaatgagtacacctcatgaggtggaatacaccgtaactttccactctgagacacttgagagtgcagagagcggcaagtaatacacattggtgcctgcggctcaaacattgcaggctatgaaaggcatgaaaattttgaggtcaggaagaaatagaagaaaatggatctatgttctgcttcttatgggactgctggggctaagtggctgcggcagtccttcttctgcttctgtggagatgtcttcgcagacagaattagtaaaaacaggcagcatggagctgcaatatgcggaaaattttgcggtggattactacgaagatggttataagatgctgacaacgcttcccgatagtaaacggtatctgttagtgccggagggacagccggtaccacagggactggatgaggacgtcagtatcttgcaggaaccacttcaaaatatatatctggtagcctccggggtgatggacatgtttgcctccgtggatgcggtggagcagatccgtttttccgggcagaagcaggagaactggtacattcagacagcaaaggatgccatggcggcaggggacatgatctatgccggaaaatacagtaaaccggattatgaattactggtgtctgaaggctgtgatctggcgatcgagaaccggatgatcacgcattcgccggaggtggtggaaatgcttcaaagctttgacattccggtgatgatcgaatattccagctatgaacagcatcctttgggaaaagtggaatgggtcaaatttttcggagccctgaccggcagagaagctgaggcagaagaagcctttgcggaacagacagagattctggaagaggtagaaagcggggaaaaaacagggaagaccatagcgtttttctatgtgacttccaacggactgatccaggtgagacagagcacggattatattccgaagctgatcgaactggcagggggaagatatatttttgagaatctggaagacagcggaagcggacgctccacgctgaatatgcaggtcgaagatttttatgccggagcgaaagacgcagacatcctgatctacaacagttccattgacggaggcgtgaccacggtggatgagctgatcggcaaatgcaatattttgaaagatttcaaagcggtacaggaggggcaggtctattgcaccaccaatgatatgtaccagcagtccatggcaatcgggtatttattgcaggatatgcatacggtgttgacggatgatgataccgctaagctgcgttatctgtttctcttacagtaagatggaggacttagaaacacagcgtaagtataagagcgttagaatgagattaggatacgattggaatacgaataggaaaaaaggagaaaaagatgcagcagcgcagaaaaataagatataccatagcgttttttatactgatagcaggcatttttgtgctgttgttttgcaatataggaatcggaacggtgaaaattccactggcagaaattttaaccacagggagagcacaggaaggcatgaacgcaaagatcctgtgggagatccgctttccccggacactggcggcagcaattctgggtggagcactggcactggcagggtatctgcttcagacatttttccacaatcccatagccggcccttttgtactgggaatttcttccggggcgaagatggtagtggcactggtgatggtatttttgctggggaatacgatccgggtcagctcaggactgctgatcctggcggcatttctgggtgctatgctgtccatgggcttcgtgctgctcatggcgcgaaaggtggacagtatgtccatgctggtggtcagcggtgtgatgatcggctacatctgttctgccatcacggaactggtggtgacgtttgcggaggacgcggatatcgtgaacctccacaactggtccagaggaagcttttccggaatgacctgggataatgtgaaagtgatgagcgtcgtggtggcggctgcttttttgttggtgattcttttggccaagccgctggaagcctaccagctgggagaaacctatgcgcagaatcttggagtgaatatccggaccctgcggatccttctggtggtgttgtccagcgtgctttcggcatgtatcgtggcatttgccggaccgatctcttttgtggggatcgctgtgccgcagctgatccgtaaactgttcggcactacaaagccgttactcatgataccggcatgttttctgggaggcagtgtattctgcctgttctgtgatctgctggcgaggaaatggatggcacccacggaacttagcatcagcacagtgacggccatcttcggagcaccggtagtattgtggatcatgatatcacgaaacagacaggagcgtggataaccatggaaacgcagaagtcttattatattacaacggaaaaaatgagcgtgggctacgacggtaagcctctgatcgaagaggtggagattatgcttcgaaaaggggaaatcttgacgttactgggtccaaacggtgcaggcaaatccacgatcttaaaaagtattgcaaggcagctgtccctgatcgcaggaacggtgcggctggacggagaagatatgcggacactcatcggggcagaactgtcgaaaaaaatggcagtggtaatgacaaaacgcctgcgggccgagctgatgacctgtgaggatgtggtggccaccggaaggtatccttataccggacgttttggtgtgctgtcgaaagatgatcacaaagcggtggaaaacgccatggaactggtgaaggtgacagaactcagggatcttatgtttgaccggatcagtgacggacagagacagcgggtaatgctggccagagccatctgccaggagccggaaattctgatcctggacgagcctacttcgtatctggatgtacgtcacaaactggaatttttatccatcctgcaaaagctgtgcagagaaaggcagctgacggtgatcctgtccttacatgaactggaactggcggagaaaatctccgacaggatcctgtgtgtgaacggtagggcggtggaccggatcggaatgccggaggaggtcatgaccgacgggtatattacacagttatatggcatccggatgggaaactatgatgagggcagcagtgatatggagctggcggcgccggaaggaacaccgcaggtcttcgtgatcgccggagccggaagcggacgtaaaatttaccggcgtctgcagagagcggggatcccctttgtcaccgggatcctgtatgaaaatgacctggattatcccgtggcgaaggcactggcggcggaggtgatcgcagagcatccttttgagccggtggcacaggaaaaaatacaggcagcaaagaaaacgatagataagtgcaaacgtgttatctgttgccgggagaatttcggcagtctggagacttttcagagagaacttctggagtatgcagaacagctggggaagcagatagaaagttccgggcaacagaacagacagtaagaagagagaaatgtaaattcccgggatgtcggtggcatctgtgggatggagaaaacgatggcaaaagttattatgatacagggcaccatgtccggtgccgggaaaagtctcctggtggcggggctatgccggatcttccggcaggacggttaccgggtggccccttttaaatcacagaatatggcgctcaattcctatatcaccaaggaaggactggaaatgggcagggcacaggtcatgcaggcagaggccgcagggatcgaaccgctggtgtgcatgaatcccattttgttaaagccaaccagccataccggatcccaggtcattgtgaacggggaagtacggggcaatctgtccgccagagactattttgcccacaagacggaactgatcccggagatcaaggccgcattccgcaagctggagacctatgcggatattattgtcatcgagggcgcaggaagcccggcggagatcaatctgaagcagaatgacattgtcaatatgggaatggcggccatggtggatgcaccggtacttctggtaggagacattgacagaggcggcgtgttcgcacagcttttgggaaccctgatgctgctgaccgaagaagagcggaagcgggtaaagggattgatcatcaacaaattccgtggagacagtacaattttagatcccggcattcagatgttaacagaacggggacaggtgccggtgctggggactgtaccttatatggaacttacgctggaagatgaggatagcctgacggaccgttttgatgcaaaacatgtggggaagatcgatctggcggtgatccactatcccagaatttcaaactttacggattttgatgtgtttgaacagatgccggaggtcagtgtccggtatgtgacaaatgtgagagagctgggaacgccggatctgatatttctccccggcagtaaaaataccatgggagatctgaaatggatgcggcagaacggactggaggcagcggtaaaacgtgctgcgggaaaagttcccattttcgggatctgcggaggctatcagatgttaggctgtgagatcgcggatccggacagtgtagaggaaggcggacagatccgcggcatggaactgcttccggtacggacagtgttgcagaaggagaaacatcgctgccagacagatggaaagctggatgctgtggagggtattttctccggacttacgggatgtaagtttgccgggtatgagatccatatgggacagacggtgtattgtgacggggatggcagcgatgcgaagggtaccgtggacaaggcagccagaccggcaaacagtgcagaaagcaatcggagcgctttctgtgcagacgatgcgacgagaaacacggaaatcacacaagctgttatcgctgactccaccggcagaatctacggctcctatatccacggtctgttcgacatgggagagatcgctgggcgtatgatacagaccctggcccgggaaaaaggcatctctctggagaacggcgtctgggaggattaccgcaccattaaggaaagacaatacgataaactggcagataccctgcgggaatatctgcgtatggaggagatctatggaatgctcagagaagcccgtattttataattataccggacaggaactggcacagatccggatcatgccgccggacgaagcagtgagaaagcttgtgaaaaagcattgggacactctggcaaagccactggatggcatgggcagttttgaaagcatcacggcacagatcggagccatcttagggacggaagtgatcgatatccataaaaagggtgtgctgatcttctgtgccgataacggcattgtagaagagggtgtaacccagtccgggcaggaagttacgctggcggtggcaaagtccatggccaggaagggatcctccgtctgcaggatggcacagagcattggcgccgagacgattccagtggacatcgggataaatagtgaggaatccattcccggagtatggaatcgcaaagtgtgccccgggacaagaaatttcttaaaagaaccggctatgacggaagaagagaccgtccgtgccattgccacaggaatcggactggtacgggagtgtaaggaaaagggctatggtatccttgccaccggggaaatgggaatcggcaacactaccaccagcagtgcagtgacggccgcccttttgcagtgcgaggcaggggaagtcaccggcagaggtgcgggactgacggatcagggactggcacggaagcaacaggtggtgcgcaccgcattggaaacctatgacttgtggcatgcggatgccttcacggtattgcagacagtcggaggactggacattgcaggacttaccggtatgtgcatcggcggcgcgttgtggcatatacccattgtgttggatggtgtgatcagcatggcggcagcattggtggcggagcgtctgttccccggtgtgcgggagtatctgctcccttcccatctgggaaaggagccggcagcggtgaaactggcggatgcgcttcggctgttccctgtgatccatgcggaaatggctctgggagaaggaaccggagccgttatgatgttcacactgctggatatggcaatgagcatttatggacagagcgctaccttctcagaaatcgaagtagaacaatatagacgttaacagttcagccatgaacatatccgggcgcaaaaatcatgctcgcatgattttttgagcgaatatgttcatgagatgagcgccggtctatgggcaagggtagtcacgaagtgacgcaaaagcgtgatagcgcgaccttgcgattggcgcggctgaaagacggaacggatggagaagcaacatgatgatattgatcctggggggcagcggcagcgggaaatccgcttatgcggaagattatctgctgcggactgccggtgataagaaaaaatattatatcgctactatgcagatctgggatgaggaaatgcaggccaaagtggacaggcatcacagactgcggcagggaaaaggtttcactaccatcgaacagcctactgcactggagcaggctgcctcccaaatggagccggaggcggcagtattgctggaatgtatgtcgaatcttgcggccaacgaaatgttttccagggagcagcctgtggatcgtgagacagtgatcgcaaaaattctgcaaggcattgaagtcttaagaaaacaggcggatccgctagttatcgtgaccaataatgtattcgaggacggcattgcctatgacagtgctactatagaatatattgaggcgctgggaagggtaaacgagaggctggccgcagaggcagacgaggtcgtggaagtcgtggcggggatcccgcagcggatcaaacccggctcaccaggagcaaaagcacagaaccggcaggacagccggggatagaaaggaaacagacatgcgaattatcaaatcttttttcatagcgttttccatgtattccaagattccgatgccgcagtttgagtggaaggatgaggatatgcggtacgcactctgctttttcccctgggtgggagcggtgatcggtgtcctgtggtatctgtggaaatggatctgtgcccggttcggagtgggaaccttgtgctatacggtggtgggaacggcgataccgattctgatcaccgggggctttcatgtggacggatttttagatacctgtgatgccctgcattcctaccagccgagagagcggaaactggagattctgaaggattctcatatcggggcctttgcggtgatcatgctgactctgtatggactgatttttctgggaggcttttcggagattacggaatgccggacgctggtcgtggcgggagccggaagcttcctgtccagagtgctgagcggtgttgcagtggtgagtttcccttccgcaaagcaggaggggacgctgtatctgttcgcggataaggcgcataaaagagtggtaaaaactgctttgtacgcacagggaatcctgtgcatcggctttatgatgtggacatctttcgtgacgggaggaatcgcggtggcagcggccctgcttacttttgcgtattattactatcgcagcaaaaaagagttcggcggcatcaccggagatacggcggggtattttgtgacgttttgcgaaggatgcgtggtggttgcggcagcaatcgcagaacatatgatgctgacagtgtaaaatgtattgccggatagagtggcgcagaagcacatttgaaatgggagagggaaatgatattaattattggcggctttgctcagggaaaattacattatgtagagcagcattacgttcagcgtgaagacaggcaggaagtgccggttctggatggaacgctgaggctggcatcggatagtaaaataacatgggcaacggagagtgcggttgaaacaatgcctggaaagcagacagagcagcctacagggcggcagacggctggcccgcaggtgatcgtcaatcatctgcaccgatatatccgggagcagttgcgacagggaacagatccggaggcaatgatagcgaatttctataaggaatatccggactgcattctgatctgtgacgagatcggcaacggcatcgtccccatggaagcggaggagagaacttacagagaatgcaccggcagaattctggaagggttggcggcgcaggcagatgaggtggtgagagtcgtatgcggaatcggccagaaaatcaaatagagatccgcctgaccctgatccggcacggagcgactctttccaataaagaaggacgttatcttggaaaaacggatgaagcattgagcccggaaggaataggaatgctgaaaaaagctgtgacgggaggaaactatccgactgctgaccttctgttttccggtcccatgaagcggtgtctcgagacagcacagatcctgtatccagggcagactcccatttttgtcccggagtggacggagatggatttcggtgcattcgaaggacacaattatcaggaactttccggggatccggcatatcagagatggatcgacagcggcggtacactgccgtttccggaaggcgagagcagagaggaattcattcgcagaaacgttgccggatatgaaaaaatgttatactacatgaaaatgatcttggagagaagtgctgcatctgagcagggtgattacaatacaggatcggagaaaacggagttggaaagaagcgatgaaattggagcacaggatgccgggatacaaagcgtatccgcagtcgcccacggtggaaccatcatggcactgctcagtcattttctgggagagcaatattttaattatcaggtaaaatgcggacagggttatagcggcaggctggtattcccggcaggcggaggaaccccggagtggaaagaatttcgcccactgtcggaatttacaaaaggagaaacatattgatgaaatatcatattctggcattcggagcgggatttttactggatcagctctttggagatccctattttctgccccatcccatccggggaatcggctggctgatagcgaagacagaaaagacactgcgagcaggcaatccacagggcaatccgaccgagagagagggggcggagcgcagacagggaaaacttctggtggtgatcgttttactgtttacgggaatgctgtcggcactgattttattcggtgcttatgcgatgcatccgggactgggagtggtcatagaagcggtcatgacctaccagattctggcggcgaggtgtcttcaggtggagagcagcaaggtgtggaaacaattgaacgccgggagcctggaggaagccagaaaagcggtatccatgatcgtaggcagggacacggaacatctgacagaggaaggcgtggcaaaggcggccattgagaccgtggcggaaaatacgtccgacggtgtgattgcccccatgctgtatactgcactgggaggcccggtgttgggatttttatataaggcagtcaataccatggattctatggtaggatataagaatgagaagtatcttcacttcggcagagccgcggcgaagctggatgatgtgatgaattttctcccggcgaggatcagcgcgctgttgatggtcgggacggcttttatcagcgggaaaagctataacggaaagcaggcatggcgtatctggcgcagagacaacagaaagcatgccagccccaattccgcccagacggaatccgtgtgcgcaggagcgctgggaatccagctggcgggagatgccagttattttggcaaggtcgtgaaaaagccctatatcggggatccaacaagggcagtggaaccggaggatatccgcagaacgaaccgattgatgaaccggacggcgtggatctgtgagattctgtgtctggggatcctgattgcggtggcagtgtgaaaagcagagtttggccgggcgtgaaagcttttgatgatttgcagacgatagaggacatgaaaagtcctatggtaacaggaaccggaaaggaaggaaaatgcagcagaacatacatggcggtgatatttacagcagacagatacggctggatttttcggtaaatggcaatcctttagggatgccggatgcggcggtgcaggcgattcatgaagcagtgcagcatgtgggagaatatccggatattactgcggcggccctgacggaagccgtgagccggatgttatccggagaatgtggcagagaaatcccaaaggagtatctgctgtttggcaacggggcatcagaactttttctggcggttgtgcatgcacttaagccccggaatattgtgattcccgtgccatccttttacggatacgagtatgtggcggaagcagcaggcagccatataaaatatgtatatctgccggaagagaccggattccgtccggggcgggagctgttacaggagctgacagcggatacagacatgctgtttgtagcgaatcccaacaatcccacggggcagctgatgggcagagaatatctgcaggaactgttggagcattgcaggcagcagggaatcaccgtagtagtggatgaatgttttatagagttctgcgagtccggccgggaacagccaaagtttctgcttggggagatcggacagtatgaaaatctgctgctggtacgggcctttacgaaaagctttgctatgccaggggtgcgtctgggctatctggtatgcagcaacgcagagcttcgggagaaaatacgcaggcagctaccggaatggaacctgtcggtgtttgcccagagagcgggcatcgcctgcgcggagcagtcagagcaatatctgcaagacacagtggaatatgtgaaaaacgagagagaatatttgcgggaaggactggaaaagcttggcatccgggtggtgtccggagaagtggatttcctgttgctgtataccacacagcccatctatgacagcctgcttgcaaaaggtatcctgattcggaactgtgagaatttccggggactgggtgagggctattatcggatcgcggtgaagaaacatgaagagaatgaagtgctgttacaggaacttgcgcagattactgctgaatgagttcgttttctttgcaaagcagtaaataggagcagccggaagacggaaaatgaattttgggggaaggtaacttatggaaaaaaagagcattgaatatgtattgccggaagaaatcgagaagcgaagctttgaaattattgccgcagaactggcagagcggggcatcactttgcctgcggagcaggatcctgtcacccgcagggtgatccataccagcgcagattttgattatgcggagacgatgacctattccgaaaacgcggtggagatcgctaaaaacctgataaaaaaaggtgcggatattgtgacggataccaatatggcactggcggggatcaataagaaggtgttggcttcttttggcggggaagcccactgctatatggcggatgcggatgtggcggctatggcgaaggaacggaagaccacccgggcggctattagcatggagttggcttcgaagctggaaaaaccagtgatcttcgctgttggaaatgcgcctacagcgttgatacagatctatgagctgatgcaggaaagggactggcgcccggcattcgttatcggggtccctgtgggtttcgtgaatgtggaagctgccaaggagctgattatagagacggatgtgccctatatcatcaatcgtggaagaaaaggtggcagcaacgtggcagcggccatctgcaatgctttgttgtatgaattgcgaaaagaacaggaaaacgttacgcccggcgattgacacgacggatcatgatatagtaacagtgaggtagaaagtatgcggtacggatttaccacaggaagctgcgcagcggcagcggccaaggcggccgcctatatgctgctgaccggaagggagaaaacagaaatcaccatagagacacccaaaggtatcctttacacagcccagatccgcaacatctgccgcaaggagcaggaggtcagctgcgccgtggaaaaggatggcggggatgaccccgatattaccacaggggcactgatctgtgcgaaggtttcttttgcggaaataacggataggaaagccagagaagaacccggtaggaagaatggaaccggacatgcacctgaacaggcacaggtcgtgatcgacggcggcatcggtgtcggccgggtgacgaagccgggactggatcagcccgtgggaaatgcagctatcaatcacgtccccagagaaatgatcgaacgggaagtattacaggtgtgccaggtgctggattatcgtggaatcctgtcggtggagatctctgtgccggaaggtgaaaagttggcagagaagacatttaatccaaggcttggcatcgtgggcggtatttctattctgggcaccagcggtgtcgtggagcctatgagcacacaggctattctggatacgatccgcgtggaactgcggcaacagcgggcactggggagagaagatgtggtaatctctccgggcaattacggactggattttctgaaaaatacctatcactatgatctggataaaagtgtaaaatgcagtaattttatcggtctgacgatcgatatggcggtggaagagggatttaggcgtctgcttcttgcgggacatatcgggaagctcatcaaagtggcgggaggtattatgaatacccattcccgggagggcgactgcaggatggagctgttgaccgcttttgctgtaaaatgcggtgtagcggcagtggatgctgccagactcctgtcctgtgtcaccacagaggaagcggtgcggattctggacgagtgcggcaggagacaggaagtcatggattatgccatggagcgtattttattgtatctggagaagcgggcgcagggaaagcttgcgatcgaatgtatcatgtatgccaatgatttcggagcattggcgaaaagtaaggaggcggaggaatggtttactttgttggcgcaggaagcggggcagcagatctgatcacagtgcgtggcatgcacatgctgcaacaggcggatgtcatcatctatgcgggatcactggtgaacccggagctgttacaatatgccaaaacagactgtgaaatccataacagcgcaaaactgaccctggaggaagtgctgcagattatgcaggaggcacaggaacaggggaggatgctggtgcgtctgcacaccggagaaccaagcatctatggtgcggtgcgggagcagatggatgcactggatgcattacatatcccttatgagagctgtccgggagtcagtgcctgcttcggcgcagcggcatcgttaaatctggaatataccctgcccggtgtctcccagaccctgatcatcacccgtatggaaggacggaccggagtgccgcagaaggagagcatcgaaagtctggcagcccatcaggcttccatggcgatctatttaagcacgggaatgctgagggaactgagccgcagactgatggcgggcggttatgcggagaacacccccgcagccctgatctacaaggcaacctggccggaggaagaggcttatatctgtacggtggagacactggcacaggtagcggaagaacacggcatcattaagacagcgctggtactggtgggggatgttatcacccatggaaattatcagaagtcgaggctgtatgcggcggatttttccacagaattccgtcaggcaaaaagcagtgtccggcagacagaggaaaaccgggaggagcagcgtgaagattagtgtgatcagctttacgaaaacaggacagaagatggcggaacggattctgaagagcatgtgcggtggagacgagacgattattctatatagcaaatgctcccgaaaaaagacagtgcagacagcggaaaacagtggggacgttacaacgcagacattcggggtgattccgaacaaagacagtaacgtaccgacagataataccgggaatacaatagcggtacaggagagtgtgtcagtctgggccggtgagcagatggctgcccatcatgcgctggtgttcgtcggtgcctgcggtattgcggttcgggctattgccccctggatcacggacaagctgcatgacagcccggtactggtcatggatgaacaggggcagtatgtgatcccgctgttgtccgggcatgtgggcggagccaatgaactggcgatccgtctggccggagaactgggagccgtccctgtgatcacgacagccacagacctgcatggcagctttgcggtggatttgtttgccaaaagaaatgatctgtggattcacaaccgggaggggattgcccgggtgtcggcaaaaatactggcaggcgagaaaattaccatgtccgtacagacagggcatctggcagtggacgagactattccgtcagagatcaggctgtgtgcatatcctccggtggaaaaggtggatgtcctaatagcggacaacacggaagaaatatttcgaaaagaggcagcagaactgttgttgaagccgaagaaatatattctgggtgcgggttgtaaaaaaggaacggacagtgtgaagctggaagcctttttaagaaaaatactggaagaacaggacattgccatagaacaggtcgcagcactggcttccattgatgtaaagaaagaggaacggtgtctgctggaattcagcgaaaagtacagaatcccgtttcagacctatccggcacagaaattacagacggtgtacggaacatttcatggctccgattttgtaaagtcacaggtgggtgtggacaatgtgtgtgaacgtgccgccatgaaggcggcgggggcagatggaagaatctgcagagctaagcaggcacaggatggcatgaccgtggcaattgccgagaaagcatggaaagtatcgatgtaatcgtaaagaccaatcgtaaggacagtcagaaaaaacaaagattttttcatgtagctaggcatccctgggacaatacctacaagtgatggaagcatgagaggatccggagggcttgcaaatgatggaaagaggaaaatcagatgagtaacagaatctatatcataggaatgggtcccggcagggaagaaatgatgaccggagaagccatcgctgcgctggagcaggtagatgtgattgtgggttataccgtatatgtcaaattattgggagaacgttttgcagggaaaaagctgctgaccacttccatgcggcaggagacggagcgctgtgagctatgcttccgggaggcggaagcaggaaatcaggtggcactgatctgtagcggcgatgcaggcatctacggtctggcatccctgatgtacgagctgggggcaaagcacccggagacggaactgcttgtgattcccggcatcacggcggccagcagcggtgcggcggtactgggagcacctttaaatcatgatttctgcgttatcagcctgagcgatctgatgactccatgggagaagattgaaaagagactgcgggcggcagcagtgggagattttgccatggccatctacaatccttccagccatagacgaaaagattatctgcagagagcctgtgatattttactggaaatcatagaagggaagcgtccctgtggctatgtggaaaatattggaagagaaggtacccgggcggtgacctgtacgctgcgggaattaagggaccgggaagtcaatatgttcaccactgtatttattggtaattcggagacggagatcctgggggacaagctgatcaccagaagaggctaccaggcagaaaagggagaaaaggcagagtgaaaaagcttgtaatatttgcgggaaccacagaaggacggagattgtcggagattctggcggatgccggaatcgcacatacggtatgcgtggcaacggaatacggtgaaatcgtaatgcgggaacagacggaaagcacaaaagcgatgcagacagccgggcagcccattgtaaaccttcactgcggcagaatggaccgggagcagatgcagaagtttctgcatgacgaaggctatgagattgtagtggatgccacccacccttacgccagggtcgttacggagaatctgcggggagctgtggatacactgaaatctttggaaaaagatgcacattttcccatttacttgcgtctggaacggaaaatcgacgggattacagaagcagatgacattgttacaaatgtccaatattttgaaaacaatgcagattgtgcgaaagctttggagaatacagagggcaatattctgctgaccacgggaagcaaggaactggcggtgtattgcgcttccggcagattgaaagaccgcctgcatgtgcggatccttccgggaagagagagtctggaactgtgcatggagcagggaatcaaaggccggcagatcctggcattgcaggggcctttttccacagagatgaacgctgccatcttaaggcagtacgacatccgccatatggtcacgaaaaacagcggccgggccggaggctgccaggagaagctggaagcagcgaaaatgctgggaatcccggtgtatgtgattgagtctgcgcagaagacatcggatgctgccgggaatattccggggacagactcgtattcgtttgcaggaatctgtggaaaactgggacaactctgtgattgtaagatttcgcagcagggaagtctggaaatctgccttgccgggatcggtatgggcagcagagactgcatgacaaaagaagtgcagcagacaatcgaaactgcggatatcctgctgggggcggagcgcatgattgcagactattctgccagaatagaaaaaaagccctactatatggctgcccagatcctgccctatctggaaaaattacaggaaagcgaggaactggcacagcaggagacacttcgggtagcggttctgttttccggagataccggattctacagcggatgcagaaaattgtatgtggaattacaggaagcgattgcagcaggacaactgagaggcagtgtgaggatcctgccgggaatttcatcggtggtttctctggcggcccgggtgggagaaagctatgaggatgccgccattttaagcatgcacggcaagaaactgaaccatcttccaacaactgtggtgagtcatgagaagactttcctgttgacctcgggaagtgaggatatccgtaagatcggacggatgcttacggagacgggactgacagattgtgaagtgatcgtgggatatcaattgtcctatccggaagaaaatatacggatcctgatgccggagcagtgtgtggaggtcaccgaagagggtctgtatacctgcctgatccgcaatcctcatccacagccggaactcctgacccacggcagagcggacacctgtttcctacgggatgcttccgggacggagggaaaacttcgcagaactcctatgaccaaggaagaagtccgggaagtcagtatttgcaagctgcacctgacagatggagccgtagtctatgatatcggcagcggcaccggatccgtggcggtggaaatcgccggattgtcggaaacggtgcatgtctatgccattgagagaaaaccggaggcggtggaactgcttcggaagaaccgagagcatttccatatggacaatatggagatcatcgaagcactggcaccggagggactggaagaactgcctgtgcccacccatgcttttatcggcggcagtggaggcagattaatggatattttacagaccttgtatcggaaaaatcctcatatgcgcattgtgatcaatgccatcagcatggagacgattgcggagcttcaggaagtattggaagcgtttcctgtggaggacggggaaatcctgcagatgcaggtcaaccgggtgaagaagctgggaagctatcatctgccgcaggcggagaatccggtgtggatctgctcatttacgttcagggagggagaaaaaggttctatggacaaagtgaagaaagcgttgctgaccgaagaagaaaatggaaacagggaaaatggagaagtgcagagatgatcggagcacaggaaaaaaagatacgacgcatcatgatcgctgccccgaaaagcggcagcggcaagactatgatcacgtgtggattattgcagatttttaaggaaaacggagaggatatctcttcctgtaaatgcggcccggattatatcgatcccatgttccacagacaggtgctggggattcctgccagaaatctggacacttttttcaccggagaggacggcacgagaagcctgtttctgagagatcgcagggaagacgagcttgtggtcatggaaggcgttatgggactctatgacgggctgggcggaataagagaggaaggctcctcctatcatctggcaaaggtgacgcagactcccatcatactggtggtggatgcaaaaggcatgggaaaatcggtgcttcctctgatcaccggatttctggcttatgataaagaacatctgatccggggagtgatcttcaaccgtatgtcagcagtttactatgagattctgaagccactggtggaagaggaacttggtattgcggtgctgggatatttcccggaaaataaggacttacagatcgccagcagacatcttggcctgtgcctgccgggagaactggaagatctgcagggaaagatccgggtcacggcggcaaaactaagggagagcgtagacatttcgaagctgttgcagattgcagaagaggcggaaccgctgggagctgagagaatagagagaacctcccaaaccaaaaagaaggaacgcagtgaagaaacggcagaagagcaagatccggattctgtggaaaacgatagggtaaagtgtccgaggatcgctgtagcccgggatgaagccttttgcttttattatgaagagaatctgcgcctgctggaacagaccggagcggaactggtgtatttttctccattgcatgacaaggcgttgccggaaaatatccatgggatgctgttgggcggcggttatccggaattatatgccggacagctgagtgagaacaatgccatgcgcaaggccatccgggcagcagtcataggtggcctccccaccgtagcggagtgcggaggctttttatacctgcatacgtctctgacagacagagaaggacattccttccttatggcaggagtgctgcctgaaaaatgcttcgataccggaagcctggtgcgcttcggatatatcgaactggaagagaacagtgaatattttctgccccggggcagccgcatccgggcacatgaatttcactactatgacagtgaagataacggcgtagactgtaccgcaactaaaccaaccatcggaagaaactatccctgcatccatgtcggtgagaaccactggtatggtttcccccacctttattatccttcctgccccgagttcgcagagcaatttgtggaaaaggctgcgcagtacaaaaatcgttttaaatagcaggatatttggcggtatctgcaaaaattgtgcaagaaaaataaaaaaacacttgcatcgtacatcgatgtacggtgtacaaagaaatggggaagtatttcggatgaaatacgttgaaaggacgaaaccggctggcgagagttgggttcgtccttttttgcagaaaaattctcaaaaacaaaaaaatgtgttataatcgtaatatctttttaggtacggaggataaagttatggaaaaatcaaaggtatattttacagatttcagaacccgtctgggagagggacttcccagtaagttaaagcgcctgatgaaggcggcggggattcaggatatggatatggatcacaagtttgttgccatcaagatgcacttcggtgagctgggcaatctgggatatttacgtcccaattatgccaaggcggtagcagatgtggtgaaggaactgggaggaattcctttcctgacggactgtaataccctgtatcccggcagccgtaagaatgccatcgagcatatgtactgtgcctgggagaatggtttcacaccgttgacggttgggtgtcctgtgatcattggtgatggtctgaagggaacggatgacattgaggtgccggtagagggcggcgaatatgtgaaaaatgctaagatcggccgggccattatggatgcggatgtgtttatttccctgaatcatttcaaggggcatgaaacggcgggcttcggcggtgctatcaaaaatatcggtatgggctgcggatccagagccggcaaaatggaacagcacgctcagggcaaaccggagatcaatgagaatttgtgccgtggctgcaaacgatgcatgagagaatgtgccaatgatggactggtatacgacgagactacccataagatgcatattgatcataacaaatgcctgggctgtggacgctgtatcggtgcctgtaacttcgatgcaatccatagcggttacgatgcggcaacaaaggatttcaactgccgtatggcagagtatgcgaaggcggtcgtggacggcagaccgaacttccatatttctctggtggtggatgtgtctccgaactgtgactgccaccgggagaatgatgtacccatcctgcccaatatcggtatgttcgcctccttcgatcctctggcgctggatcaggcctgtgtggatgcctgcctgaagcagacaccgctgccgaacagccagctgacggatgccatggcaaaagagggcttttgtgatcaccatgatcattttgaaaataccactcccaatgcggagtacaagacctgtctggagcatgcggagaagattggcatcggcaacagggcgtacgaacttattgttatgaagtaatttcagaaaggatgggctcatgcgtcccatggtaagcatcattgttccggtatacaatgcggagcaatatttacgacgctgtgttgacagcattttgaatcaggaatacacggattttgaattgtttctggtaaacgacggcagtacggattcctctggcgacatctgtgaggaatatggtgacaaagatcacagagtcattgtgatccagaaggaaaacaccggagtctccgacagcagaaatctggcattggatcgtgcacggggaaaatatctgcaattcttagacagcgacgactggatcacaccggatgccacaagactgttcgtgcgggcagcagaagagtatggctgcgatatggtcatttcagacttttaccgcgtggtgggagagcgtctgtcccccaagggagacattgaagaggagggtgtgctcacccaggaggagttcgcggcacatatgatggagaatccggcagacttttactatggtgtgttgtggaacaaactgtaccgcagggatctggtggaggagcacagtctgcggatggatacgaatatcaactggtgtgaggattttctgttcaatctggaatatatccgttacgcgaaagtattctatgccctgcatgccccaatctattattatgtgaagcgcaaaggctcacttgccagtcagggaatcagcatctccaagacggtaaagatgaagttgaatgtctttgagtattacaataacttttacaagcatgtgctggaagaagaggactacgagaagaaccgtttgcaggtatatcgtttcttcattgatgcggcaggagacggaaccgtgccgccttccatcctgcccggatccaagaagctgggagacgagagagtctttgtcaacaccgagatcctgcaggccgagggaccggcgggggatgcttaccgtaagcggaagcttctggaacattatctggagccggtggcattaaaaggagatctgaaggtagcggatgtgcggctgcttctgtgcctgtgtgaaaagcacgagtgggacagcagacgggaactggcggatttcgccggaatctcccgcacgaacctgaccagcggcttgcaacgcctgaccatgaagggcttcttgaaaatagaggaagtgaaggaacccaagccttccagaaaaagcaaggcagccggagaagtacagggaaaagcggaaaagccggagacaaggcgcaaagaccgtaaaaccaaggtcacagtgacgatccttcccactgcggaagcggtcatgaaggaactggcactggcacagcgggattatgatgaggcgagatttgcgggatttaccgaggaagaactgataaaatacgcagatctgtcggagaaaataaaagaaaatacaaagaggattctgggataatattccttcgccctataaatatcactcaatattcttacgaatgcgagcattcgacgtatattgggtgatatttacatggatcggaatattttatattttgttaattgacatcgccccttccaaaaagttatgataaataagtatataaaaatgtgagggaaaggaaggtatttggatgaagaaaaacgaagagtatatgttggaacatgccggattgtgcagagcggcagatagattggaaccccagatgttcgacgaatacggcgtacagaggggactgcgtgacaagaacggtaacggcgtagtcgcaggccttaccaatatttcacggatcgaatccttcaaaatggaagacggcaaaaaagttccctgtgaaggtaagctgtggtatcgcggctatgactgcatcgagctggtcaacggcttccggggtgatcatttcggattcgaggaagtggcttatttacttctgttcggtaagctgccgaaccgtgaggaactgaaacattttaacgatattcttgcgtccagcagaactctgccgaccaacttcaccagagacgtcattatgaaagcccccagcagtgatattatgaattcactgaccaggagcgttctgacactggcttcctatgataaaaactgcagcgacacttccattgaaaatgtattaagacagtgcctgggactgattgctgtgttccccatgctggcagtctacggctaccatgcatataatcactattccaacgatgagagtatgtacatacaccgtccccagaagaagctttccaccgcagagaatctgctgatgatgcttcgcccggacaaacaatacaccgaactggaggcgagggtactggacaccgcactggtgctgcatatggagcatggcggtggtaacaactccacctttaccaccagagtcgtgacttcttccggatccgatacttattctgtcattgcggcagcactttcctccctgaagggacccaaacatggtggtgccaatatcaaagtcgtagagatgatgcgggatatcgaagcacatgtgtccgactggacagatgaggatgcggtaagagcatatctgaacaagattctgagcaaagaagccttcgacagcaagggactgatctatggtatggggcatgcagtctactccctgtctgaccccagagcccaggtattcaagagcttcgtggaaaaactggcggtagccaagggcagagacaaggatttcgccctgtattccatgatcgagcggatcgcaccggaggtcatttcccagaaatcccggatctacaagggtgtcagcgccaacgtggatttctacagcggtttcgtatacagcatgttggagattcctctggaactgtataccccgatcttcgccattgccagaatcgtaggatggagtgcacatcgtatcgaagagctgatcaatatggataagatcattcgtcccgcttacaagagcgtaatgcaggaactggaatatgttcctttggatcagagataaattatcaaataataaaggactgcgtattttgcgcagtcctttgctgaattactatggagaacagatcggggaacctatgaatagatcttgcggataatggatacgatctcttcagcggattctttggaatcctccagaatccaggtgacataaatattgtagagggaaccggagaaggctcggagcgtgtaataaaaatcctgccccttgtcttcggtataataggtatccagaatgtagccgtccagtgcctgtaacagcaggtgccccagaccggtctgcaccagacaggcaatgaattctttgtaatgattgaaatattcataacaatgcagcatattgcgggagtcattgtaattgcccttgtccggccatgtcgcaacatcctgacggtaggattctaccagatccttcagataactgctgaagatatcatccagagaatggtaattgcgataataggtcatgcgtgagacaccggcacgctcggtcagctcggtaattgtaatattggacagggatttggtcttcagcagctggatcagagcctgtaccatacaatctctggaaaaaaagttggaattctttgtggacatgacggatcaccttctttatgatttctacctaataatgtaacgattcagacctacattcgcaaaatcgcctctatgaggcttccttggagaacaggccggcctgttctctgctcattgtggttacttcgctatataaatcatatcaaatgttcttacgaatgcaagcattcgacgtacatgttgacatgatttgcatggctctgaatagttaccatataattatatgatgtcggggtcaaaagcccccgactttgatgcctacggattgttccgtgctacgcactcccacaatcctacccaatattcgcatatcgtgggattatcatcccacttttatgctcatatcggggcgggtcctaaggtctttcacccacctatgagcaagctcatgtgggcttagaccttttgaccctggcatcattatatagaacgtaacacaatccggcgaaatacgcaaggaaagttccttacggaaaggagcggcatatggcaggaacggtaatagaatatttgcaaaaatacggagacatttcttttcgggaaaaacctctgaatgatgtggacagtctggcattgtgccagctctcttatctgaaattcgacgggatggtcagcgatgtgcggcacaatggcccttccgtgaccctgcgggagattgcagagcgtccggacgtggacaaactgttcggggatgtccgttttgagaaggagaaccgggcgctgttcgaaggaatgttaagcggcagacgtttccgggatatgaagctgaactgctatatcaatctggtggaaaaggaatgggagacccagttctccgccatcacttttattctggatgacggaaccctgtttctggcattccggggaacggatgagactatcgtaggctggaaggaagatttcaacatggcatttctgtcaccggtgccggggcaggagtacagtgtaaaatatgtaaatatggtcaccggatggctgcaccagcccttttatatcggagggcattccaagggcggcaatctggcagtctacagtgccatgaaatgcgccccttttgtgcagaaacggatccagaagatctacagtctggatgggcctggattccggccggaaatgctgaaggagtgtcactataatgccatcgaaggcaaggtggtgaagctgttgccacattcttccatgatcggtatgattttcgagcgggatattcattaccgcgtggtggagagcaacagccatgggcttttgcagcacgatcctttttcctggctggtggaggaggaccatttcgtggatgtgggtgacatttatgagagccagaagatcatgaatgaagcactgaacgaatggatactgtccttaaatgaagaacaggtccgcaccttcgtggaaacactctatcaggtcatctccgcatcccaggcggatgatctgatcacgtttaccgctgactggaaaaagagtatgaatgcggtggttactgcactgaaggaagtggacgaccagaccgcggagatgctgcggggaatcatccgctccctgttcgaaatcgccaaagtcaaggtcagagaggagctggccccggcgaaaaagcccgggcgcagattcagaaataagaagaaagaagagaaagcagaggctcaccggcctgttccggaagacgctccggatgccactgcagcccaaggatcggcagctcgtcatgctccaaggcttcggggcagccgtcatcggggcagcgctgaatgatcttcagatgctgacctaagcggtcgatcctctgatggtgggcgctgttgacgtgcatttcgacaggaaaatacttgaaaagacgggaatcttccgtcataatggacgtatggaatgcatcaccggaagggatactgtgcagggaatctcccgacatatcctgcaaaatagtgccaccgaaggcaacattgatgacctgcatgcccttgcagatcccgatcacggggatcctggcggcaatggctgtgtcaagggcctgaaattgcaggatgtccagttcggtgtcaacagtacgggaacctttgtttttttctccgaagaaagccggagtgatatctccgccgcccggcagaatcagggcatcacaggaggtgacttccccggggaccagtgtggttacggttctggcgggaagtttcgaaaaaaacgtctcataattgcccgtctgggatttgcgtcctaaaatgactaattttgtcatatgattttctgatacctcattttttatagttaatatatgccataacttttcatttttgcatggaacaaattagcaaaaatgtatcttacgtttttcaataaataggagtaaaatagcaacgaccatgagggagtgaaagctctttcaaggatgtttacggaaaggaagtggtattatggaggaattggcatcagaactgctcaaggaactgaattgtgacacggctttttccattaagcttccggcaggtctacccctgatcggtggagtacagctggacattgcggaatcggtcgttatcacctgggtggtcatggcagtcattctgatcttgtcgattatccttacaagcaacctcaaagtacacaatgtcagcagacgacagctggtggcagagacaatcgtgacaaagctggaaggcattgttacgggaatgatcggagaagaaggcaaacggtatgtaccgtatctggttagcgtactgttgtatctgggtatatccaatatcattggattgttcggtatgaagccccctaccaaggatctgaacgtaacggcggcactggccctgatgagtatcgttctggtggaagccgcaggtatccgcaaaaaaggtgtgggcggatggatcaagagctttaccgaacccatcgcaatcgtaacacctatcaatatcctggaggtgttcatcaagcccctgtccctgtgtatgcgattgtttggtaacgttttgggagcattcgttatcatggagctgttgaagcttctggttccggtagcattgccggtacccttcagcttttactttgatatttttgatggattgattcaggcatatgtatttgtattcctgacatccatgtacattaaggaagccattgagtaactggataactattcagagctattttgcgaatgcgattatgaatagttatgaaacactaattcacacaaaaacggaggaaaagaattatgatagctattggagcaggtattgcagcactggcatgtatcggagcaggtatcggtatcggtatcgcaacaagtaaagcagcagaggcagtcgcaagacagccggaagcagagagcaagatcaccaagatcttactgttaggtggtgcgctggcagaggcaaccgctatttacggattcgttatcggtatcctgatcattctgttcatggcataactatccgaagccggaaacgtcacagacaagcgtcaaatgcctgcatttgtaagctgttttgtgacgatttacgacgactaaaactccatgagcaaaaagaaagctctgaaagagcgttttgcaaatggaagtttcggatagttataaggaaattagaaagcgaaacgtaagaaaggatgaaagcacatgctgagattagatattaatattgtatggaccatcctgaatctgttgatcatctttgccattgtgaagatcttcctgatcaagcccatccacaagatcctggatgcaagacaggcagagatcgataagcaatatgcagatgcaaaagctgcacaggacagtgccaatgaactgaaaggccagtacgaggcatccttaagcggtgttcaggcagaaaaagaaagcattctgaacgaggcaagaggcaaggccagcaacgaatatgaccgcatcgtggcagatgcccagacagaagcgaaaaagatcatggacaatgccagtaagaatgccacactggaagagcagaagcgcatcgagcaggcacaggaacagatcgccggcctggtagtggaagctactgcaaaactggtagctgccaagcagaacgcagattcagacagagaactttacaaccaatttatagcaaagacaggtgaaaagattgattagtacagctttagaatacgcaaaaagattgcgtgaactgaatatccccggagacattgtaggtcagacaggcgatatcttcaaagccgtaccgcaggtgaagctggatttcgaatcccctgctgtatcactgtctgccaagcataatgtaatagaaaaagtattccccttacagatcagagattttctgaaagtcctgtgtgacaacggagacgtctatctgtgggatgatatctgcaccgcatacagagaagtctctcccgagaaaaaggaagagttcgttgtaaccctgtcctatgtgacagcgcccaccgatgagcagctgcagaatatccgtaattttatccagaagaaatacaacagagaggatatggtctttgagaccaaagaagatccttctcttggcggcggtttcatcatccgagccggtaacgaggtctatgactggagtaccaatggacgtatgaagcagttcgcagacaaactttcccaggtgggaaagaccgccagtgagcagggcatcatttccattctgaaaggtgagatcgaggatttcaacttacaggcacaggaaaatgagatcggttctgtcagctgggtaggtgacggtatcgccaacgtcaatggtatcgaccatgcagagtacggcgagatcgttatctttgattccggtgtcaaaggtatggtacaggatgtccgcagagatgagatcggatgtatcctgttcggtcatgataccgagatccgcgaaggcaccagagtcgttcgtaccggtaagagagccggtattcctgtaggtgacggattcaaaggcagaatcgtggatgctctgggagcacccattgacggtgcaggtcctattaaggaagaaggctatcgtcccatcgagcagccggcaccttccatcgtggacagacagtccgtaggcgtgcctatggagactggtattctggctatcgattccatgttccccatcggtcgtggacagcgtgagctgatcatcggtgaccgtcagaccggtaagacttccattgccatcgatgcaattttgaaccagaagggcaaggatgtggtatgtatctatgtggctatcggccagaaggcatccaccattgcaaaactggtaggaaccctgaaaaagaacgatgccatggattacaccattatcgtatctgcaaccgccagcgatcctgcacctctgcagtacatcgcaccttattccggtaccgcactggctgagtactttatgtatcagggcaaggatgtcctcatcgtatacgatgatctgtccaagcatgcggtagcttatcgtgcactgtccctgctgctggaacgttctcccggacgtgaggcatatcccggagatgtattctatctgcattccagactgctggagcgttccgcaagactgagtgcagataagggtggcggctccatcaccgcactgccgatcattgagacccaggcaggcgatgtatccgcatacattccgaccaacgttatctccattaccgatggtcagatcttcctggagagtgatctgtttttctccggcatgagacctgcagtcaatgtcggtctgtccgtatcccgtgtcggcggtgctgcacagaccaaggcaatgaagaaagcagccggaagtatccgtatcgacttggcacagttccgtgagatggaagtgttcacccagttcgcatctgatctggataacgccacaaaggaacagttacagcacggacatgtactgatggaactgttgaagcagcctctgtgcaggcctttgagcatggcagagcaggttatgaccctgtgtgcagccaacggcagagtgatgctggatgtgcctgtaaatcaggtaaaggatttccagatgaagtacttagactacatgaaggaacagcacagcgacatcgttcgtcagttagagaccaccaaggctctggatgacgagctgaacaagcagatctgtgatgctgcaacagaatttaaaaaggaatttttacagaaataatgtaactattcagaaacccattcgcaaaaccgctctttcagggctttacttttgcttatgtggttacttcgcccattggctctgaatagttacaaataacaggaggttaacatggcaaatacgagagaaatacaaagtcgtatgaaaagcattcaggataccatgaagatcaccaatgccatgtatatgatctcttccacaaagcttcggaaagctaagaagaatctggaagagacagagccttacttctatactctgcagacgatggtcagcagaatcgtccgtcacttaccggagatcgataataaatatttcgatgaacgtaaggacaaaccggctgaggagaagaccacgggactggtagtagtcaccgcggataaaggcctggccggagcctacaaccataacgtactgaaaatggcagaagagcagatgcggaaagccgggaagaccggaaagtacaaactgttcgttgtcggtgaactgggacgtcagtatttcggacaccgcggaatcgaggtggcggagcagttccattacaccgcgcagaatccgacgctgcatcgtgcccgtatcattacggagacgattctggagcagttcgaagaagaacagctggatgaggtatatattatttataccaatatggtaaacagcgtgacaacggaaccacatatgatgcgtctgttacctatcataaaagaacgttttattaccaaagacggacaggatctgagtatgtatcaggaaccgttagtcatgacaccgtctcccaaggcagtgctaaacaacattgtcccggatttcgtcatgggatatgtctacggtgcactggtagaatcgttctgcagtgagcagaatgccagaatgatggccatggaggcagcaaataagaatgcttccgccatgatccatgatctgtccattcagtacaaccgggtacgtcaggccatgatcacacaggagatcactgaggtcattgctggtgccaaggctcagaaaaagaagaaaaaggcaagaaaggaggtcctgaacaattgaataacgtaaaggaaaaaaatcatggtaagatcgtccaggtcatgggacctgttgtagacgtagagttcgagaacaatgatcttccttttatcaaggatgccctggaagtatacagtgaaggcaagcggctggtcatggaagtggcacagcatattggcaacaataccgttcgctgcatcatgctgggtgccagtgaaggactttgcaaggatatggatgtcattgctaccggaaaaggaattcaggtgccggtaggtaataagacactgggtagattgttcaacgtattgggagagaccatcgacggtggagaatccctggaaggagaggaacattgggttatccacagagatccaccttccttcgaagagcagagtcctgtagtagagatgctggagaccggtatcaaggttatcgatctgctggctccctatgcaaaaggtggtaagatcggtctgttcggcggtgccggtgtaggtaagaccgtgctgattcaggagctgattcgtaatattgctaccgagcacggtggatattctattttcactggtgtcggagagcgttcccgtgagggtaacgatctgtggagtgagatgaaggagtctggagttctggagaagactgcgctagtcttcggtcagatgaacgagccccccggagcacgtatgcgtgtagccgagaccggactgaccatggcagagtacttccgtgatgaagagcaccagaacgtgctgttgttcattgataacattttccgttttgtacaggcaggtagtgaggtatccgcattgttaggccgtatgccttccgcagtaggatatcagcccactctggctaccgaagtcggtgaattgcaggagcgtattgcttctacgaataagggtagtgttacttccgtacaggctgtctatgtgcctgcggatgacctgacagaccctgcacccgcaactacattcgcccatctggatgccaccaccgttctgtcccgtaagatcgtggagcagggtatttacccagctgtggatcctttggaatccacctcccgtattttggaagaggatgtggtaggtaaggagcattacgagaccgcccgccaggtacaggcaatgctgcagaagtacaaggaactgcaggacatcatcgccatcctgggtatggaagagctgtccgatgaggataaggtcaccgtatatcgtgcccgtaagattcagcgtttcctgtcccagcccttccatgtggcagagaacttcaccggtgtacccggtaagtatgtgcctgtgaaggagaccatccgcggattccgtgcgatcatcgacggagagatggatgagtatcccgaggctgcattcttcaatgtaggaaccattgacgaggcagtggagaaggccaagaagctcatggcacagtaaggaaaggcggtgtgcgtatgaacaccttcagcttgaaggtcattgccagtgataaagtatttttcgacggaaaatgcggcatcattatcgtaccggctctggacggcgagcaggccatcatgtcccatcatgaggatatggtcattgccacgaaggaaggcgaggtacggtttaaggaaaaagaggatgacgactggaccaaggccgtagtcggtgtgggctgtgtctacatttctcataaccgtgtgatcatgctggtggatacggcggagcgcccggaggatatcgacaaagtccgtgcggaagccgctctggagcgtgccaaagagcagctgcgtcagaagcagagcattcaggagtaccatgtatcccaggcatccatggcgagagctatgctgcgcctgaaggaagccggaaaatacgagatcaactagaaatcaagtaaaatatttgtaaaaagtaacaaaattaagcctgtaatgttagcaaatgtgtgcaattcggaaattgttatttttctgtcattgcgataaaatctcttaagtataagaggagagttaagcaatggattatttacagaaaaaatcaatacgaagtgtcgcagctgccattacaggctttttgcgtcattccgttcgaaaaataggaattaccagggagaagcttccttcctgtatcgcgctggcagtatgtccgctggtgacattttatctgtttgaaatgtatacccataatccttttacgacaatgcatttcaaaacccagctgttgaacatggcgttctatgtactgaccgcacttctgttattcggaatcgtgaaatatgtccgggcggctctgatgttgcagacggcctttttcatggtggcgggactggcgaattattatgtgctgaatttccgttccgcacccatcatgccatgggatatttattccatcagtacagcagctagtgtggcgggcaatttcaactatgaattgtccaccagtacgatactggtcattgtgggattcctgattttgttgttgatcgagagccgttttcatatgaaggcaccgggaagagtggcaaagagagcggcgctgatcctgttaagcattgtcatgatctatggttataccggcatgatacagagcgagagctttgtgcagagctttggattatacgacaagctgtttacccctaccgtcatgaataagagagatggcaatatcgtggcatttctgatggaaatggaatatctggatgtggagaaacccgcagattattctgcagatggcaccggcagcaattatgagcaggccgggaaggattccgctgggcttgcagcagctgtggaagacccggagagcgtgaagcgtccgaatatcattgtgatcatggatgaggcattttcggatctggcagtccggggagagtttaccaccaacgaagactatatgccctttattcacagcttacaacagggggcagagaataccagaaccggttacctgaatgtttccgtgctgggcgggaatactgccaatacggagtttgaattccttaccggcagcactataggatttttaccgcagggcagcgtggcttaccagcagtatgtgcagaaggagatgccttctctggcttcctacctgaaggaactggattatcatactgtggcgatccatccttattatgccagcggctgggacagagacagagtctatccactgcttggatttgatgagttcctgtcacaggacgatttcaggaatccgaaacggatccgtaactatatctccgatgagagcagctttgccaaaatcatcgaactgtatgagaataaaaaagagggagagcctctgtttgtctttaacgtaactatgcagaatcacagcggttacgaagaggaattccataactttaccccggatattaccgtggatggtattgactccaaagcattgtccatgtatctgtcactggtaaaacagacggattccgccctgcagggtctgatcgattacttctctcaggcggatgaggataccatgatcgtattcttcggggatcatcagcctacgacctatgtgagcaatccgatcttaagaaataataaagtggatccggagactttaacagatgaggaaaatctgttaaaatataaagtaccttatgtgatctggagcaactttgacattgaggagcagacggacggagagaccagtgccaattatctggcaatggatgtgctgaagaactgtgatctgccgctgcctgccttgcagagcagtctgaccggggtgcgggaaaaatatccggtgatcagcgcggccggtgtgagagaagcggacggcacactcacgacggtgaaggaatgtggggaagcattgaacgattaccggagtctggagtattatctgctgtttgattacggaaggtaagaaaaaagatcgtgggagaaaaataatatgaacggcaataaaacgacagcaacaagtaatgcggagcgcaggatgcagagagggatctctgtgcttgcgttctttgtgcctgcatttattatgctggttctttttatcatacggggcatatatccttttggtgaccggagttttctgttctccgacatgtaccatcagtatatgccttttttaagtgaatttgtacacaagatcaaagcgggagagggactgttctattcctacaatgtagggatcggatcgaatttcctggcactgtatgtctattatctggcaagtccttttaactggctggtatttttgctgccggaaggcctgatcatggaattcatgagttatctggtgatcctgcggatcggccttatggggcttaccttcagcgtctatctgcggaaagtgttcggcaaggaggatccggcggctcttttgttttccactgcgtatgctctgtccggctatctggcggcctacaactggaatgtgatgtggctggactgcctgatcctgctacccttgatcctgttaggagcagagcggctggtcagagaaggcaaatgggtcatgtataccgtgactctggggctttgcatcctgaccaattactatatttccattatgatctgcatcttcctggtgctgtattttggaatgttgttgatcacggaataccataccatgacggaagggcagagccaaaaagtaaaaacggtattctgcaggatcggaagatttgcatttgcatcgctgctggcaggagggctggctgcagtactgctgattccggaggtctgtgctattctacggacggattttggcaattcggatttccccggtacgctggagtcctatttttccgtgtttgatatgctggcgagacattgcctgtgcgtgaccacggagaggggactggaacactggccgaacatttactgtggtgtggcagtatttttactggtgcccatgtatgcactgaatgaaaaaatatcagtgagaaaacggttctgcaatctggcactggcgggatttttgctgctcagcttcggaaccaatgtcctggactttttatggcacggtctgaattatccggattccctgccggcgagacagtcttttctatatatttttctgatccttgtcatgtgctatgatgctttccggaatgtggagggcacttctcccaggcagatcatctatgggtatctggcggcggtgatatttttacttgcctgtgagaaattcgtggagagcgaggatttcgacacgggtattgaagtgctgacgctggtgttcgttacgatctatggtgtgcttctgtatctgtatcggacgagaaaagacgaactgacgagacaggtgctggggattctggtgctggcgtgcatagtggcggagctgagcatcaatacatttaatacgagtctgggcactaccggacgaagcgcttatctgggagaccaggaggattataaagcgttgtacaccctggcgcgggaacaggagggggatgacttcttccgtatcgagaagtttacccgcaagacgaaaaatgacggaaccctgaccgggtaccctacggcttcggtattttcctccaccatgaattcccaggtcatggatctgtataagaagcttggcatgcgtcacagtaaggtttattacggcttcgacggagcgacagctttcgtttcggcactcctgaatgtggattacatgttcggcggatcggataaatacgaaaacggtctgtatgagatcgtgaataacagtggagatgtttatttatatcattgtaaatatacgctgccctttggctatgtggcaccgacgggctggaatgttacggacgagatcggcaccggtgtgagagcgcagaatcagctgaccgaggatctgggaatcgcagagcccttactggaccgggcgaccagtgagactagcggagataatgtatgtattacggcggaccgggcaggctgctattacgcgaggatcaatgccacagggacgaaaaaggtgcaggtgcttgggggaacgctggagacgcaggattacagtgatctgaaggacggatccattctgtatctgggatatctgttggagggagagcgcgtgacgctgacc

SEQ ID NO: 5724 - DNA, 265 bp, Unknown
  gut microbiota DNA sequence
atgatcacacataatgatgccattgcccagcttgcagaccgtatcgtgcggattgaggatggcaaaatcgttggataaaggaggtggcagacatgacattgccttttgaaaatgatacagggccggtcattaaaaaattggcgtcacgaagcattcagacagataagcggcgcaacctgtttgtgatcgtaacgatcgctctggcagccgctttgatggcagcgattttttgtgcaggagcgggaagtgacagaaaactggaggc

SEQ ID NO: 5725 - DNA, 65307 bp, Unknown
  gut microbiota DNA sequence
ggggagactgaggaagagtttgcgcagacaaaggaatttttagaccggattcaattcttcgagatgcatattttcaagtattccaaacgggcaggcaccagagcggccgtgatgtctcatcaggtgccagatcccgtgaagaccaccagaagtgcggaacttctggctatggagaaggaacagtcgaagcagttccggacccactatgtgggacgggaggcggaggtgcttctggaggagaccaaggagatcggcggaacggaatacctgctgggacatacaagagattatgtcaaactggctgtctctgtgaaggaaaataaaaaaaatgttgcaaataccgtgatatgcggcagggtacaggggtttttgacggatgaaatcctattactatcaccccttgaattttcaaagtaaatgcggtaatataaggcataacggaaagatttgccctatggcagaaaaagaggatcatatgcaggacttaggaaatacacaatacttcaaggtagagacagaacctgagaccggcgtgaagctggtgctttctaccgtatatgaggcactgacggaaaaaggatataaccctgtgaaccagatcgtaggttatatcatgagcggggaccctacttatattaccagtcataaaaatgcccgcagcctcatcatgaaggtggaacgggacgaactggtggaagaactgctcacggagtatatcaggacaaaacactggaaataattacagttatcaggaggacccacatgcgtattatggggttggatttcggctcacgtaccgtgggcgtggcgattagtgacagtctgctgttgacagcgcagggtgtggagatcattcgccgcaaagaagagaataaattacgacagacgctggcccggatcgaagaactgatcgtggagaatgaagtggaagagatcgtactgggacttcccaagaacatgaacgataccgagggtgtccgcgtggaactgaccaaggagttcaaggagaagctggagcgcaggaccggtctcccggtatatttctgggatgagagactgacgactgtggcagcggacaaagctatgatggaagcgggaatccgccgtgagaaccgtaaggattacgtggatatgatcgcagctactctgatcctgcagggctatctggatcgcaggaacaatgagaagaaaaaggaaacagaatgagtaaattggaaaagattacatttcgccccgaaggcgaagaacctgtagaattttatgtactggaacagaccaggatcggtggacacaattacatcctggtaaccgatgtggaagagggagacggagatgccctgatcctgaaggatatgtctcaggatggtgaagaagagagcatttatgatgtagtctccgatgatgaagaactggaagcggtatccggagtatttgcggatatgttagaggacgttgatttaatttagatcatatcctatggattgttccgtgccatgcactcacacaatccgttccaatatcatcatattgcgaagcattcgctccgcttttatgctcatattggggaaggtcattaagccataaaatcactcccgtgcaagcacgtcgtgttttcaggcttatgaccttgatatatgataaatacaggcagttctgcgagaaggacggtcttatatttatatatgatttgtatgattggcagagagggatattggaggctttgccggtttcagcatataatggttttgtgctaaaagtgacagggaatacacgaagggcatgagagatgccgttattttgatggaatcgtaagatctgggatgtctgatctccacgggagtctttgagaagagagccggaaggagcaggcgtgaaatcacagatctttgtttgcagagcatactatctcattctaacgccggaatacatacacgaagcaagatgtatagacgtatagaatttggaggtaatttcgttgaaaaagaaaaaagagaatagtaacgtttcaggtctgaagatcattcctttgggaggcctggagcagatcggtatgaacattactgccttccagtatgaggacagtattattgtggtggactgtggtctgtctttcccagcagatgatatgctgggaatcgatctggtcatcccggatgtgacttatctgaaggacaatatcgacaaggtaaagggttttgtcatcacccacggacatgaggatcatatcggagcactgccttatgtgctgcgggatattaatgttcccatctacgctacccgcctgaccatgggtattatcgagaacaagctgaccgagcacaatctcatgaagaagaccaagcgtaaagtagtgaagttcggtcagtccatcaatctgggcgatttccgtgtggaattcatcaagacgaatcacagtatcgtagatgccgcagcactggccatttattcccctgccggtattgtggtgcacaccggagactttaaggtagactacacaccggtatatggagatgctattgatttacagcgttttgcagaaatcggcaaaaagggtgtactggcactgatgtgcgactccaccaatgcagagcgtcccggctttaccccttctgagaaaacagtgggtaagacctttgatactttatttgaagaacataagaacaccagaattttcgtggcaactttcgcatccaatgtggatcgtgtacagcagatcatcaatacggcatacaaatttggccgtaaagtggctgtggaaggccgcagtatggtaaatatcctggataccgccatcaagctggagtgcatcaatattcccgagaatacactggtggatctggatcagatgaagaattatcccgatgagcagcaggtgattatcaccaccggaagccagggcgaaagtatggcagccctgtcccgtatggccaacaatatgcaccgtaagatcacgatcggtgcgggggataccgtaatcttctcctccaaccccatcccgggcaatgaaaagtccgtcaccaagatcatcaacgagctgctccgcaaaggcgcagatgttattttccaggatgctcatgtatccggacatgcctgccaggaagagatcaagctgatctataccctgatccatccgaagtacgcagtacccgtgcatggtgaatacaagcatctgaaggcacaggccaagattgcagagagtctgggcatcagtaaggacaatatcttcatcctgtcctccggagatgtattggaagtcagcgaggaacaggccaaggtcaacggcagagtacccgtaggagctattctggtggacggtctgggtgtcggtgatgtcggaaatgtagtattgagagatagacagcatctggcagaagatggtattatgatcgtggtcatgagtctggacaaggccagtggagaactggtagcaggtcccgacattgtatccagaggttttgtatatgtgaaggaatccgatgaacttatcgaggaagccagacgcaccgtggatgatgcgctgcaggcatgtctggataagggaattacggactggggtaaactgaagaccaccaccaaggatgtcctcggcgattatgtatggaagaagaccaagagacgtcccatgatccttccgatcattatggaagtgtaatagcagcgattgctggaaaggtcgtaagcagatgaagattacatcggacgaaaatgtaaatcaggctgtagagcagatggtacaggcgattcgtaataccgacgcttatctggaatatcagaagcagctggcccgcgtgaaggagcaaccggaacttaagagacagatcgatgaattccggaccagaaattttgaattgcagaccagcaaggacaccaactttgataagctggatcagtttaccagagaaaacgaagctttccgggagaatccactggtgtcggattttctggcggcggagctggcattttgccgtatgatgcaggggatcggactttacgttaccgatcagatgcactttgagtgagcaaaaggaaagtcttgaagagacgattttgcgaatgtatggatcgaaatgcggattacttggataagaaaggacagaacacatgaaggcagcaaatttggcaggtgccgtattgggcgctatcttaaaagtggcatttgcagtgatcgtggtatatctggtgtacaccggagcgtctacatgctacgactatggttatcgtattttcacagaaccggcggtctctgccggagagggacgtaagatcacagtaaccctgacctcggacatgtccgcaacggagattggcacaattatgcaggaaaagggcctgacacgtgacagcagactgttcgcattacagtatctgctatccgagtataaaaaggactggaagcccggaacctacgaattgagtactgccatgaccgcagaggaaatgatggaagtcatggccggacagacggaaagcgcaacggaagagacagtggagactatagacaacggcagtgcgattaccggtgagacacaggataccactgcagttgcacagtaaagtgtgaaatgagggacagtatgatcatagacgagagaatgtccgcgtttatcgattccctggacagcgggaatccggcgtggctgaatgagattgaaaaattcgctctggagacacaggttcccatcatacgcagatccatgcaaagtctgctgaaatttttgctgaaatttacaaagccgaagagcatcctggaagtcgggactgctatcggcttttctgcgttactgatgagtgaatatgcaccggaggattgtcatatcacgacgatcgaaaaatatgagaaaagaattcctattgcaaaagagaacttccgtaaggcaggcagggaagaccggatcactctgctggagggtgatgctacggagatcctgcgggaactggaaggcacctatgatgtgatctttatggatgcggcgaagggacagtacattcatttcctgccggatatcttacgcctgttgccccccggcggactgttgatctccgacaacgtattacaggacggtgatatcatagaatcccgttttgccgtaaccagaaggaaccggaccattcatgcaaggatgcgggaatatctgtatgaattgaaacatcatccggaactggagacggtgatcctgccggtaggtgatggagtgacactgagtacgaagaaagaggaaagcacggttactcaaaataaataacataataatacgggtattcccaggtctggtaagccagtccggactctgacagattctgcaggaattcattgttctttttgtataccacatagacggaagaaggactgatcttcgtggaatagtcggtgagaaaatgataagtgtgtataccgtcggtaaaggtttcttcatcctgagtatcataaggagatgcgggataataaaagaagaaaaactccttcatgttgaccagatccacatagagatccgcataatccaggttgagattcacatcatccacacactcccggaaggagatggaatacagataattcgggcagacgtcggtcatggtatagacccggaaataaaagctgcagaaagagatgcaccataagagataaccggcggacaaaaggagcataaaggctgtgtgataagaggacaggaaacggcagcaaaggaaaagtccttttatcaggaagaagagataacagataaagaaactgttagcccggtagacatagccggatccggacagaccaatggtgatgagaccgctgagaaagaacagcagatagatactgtcggcctgaaaagtccgcttgtacagagagacaagaaaactgtaaactgcaccgataaatcccagaacaataaaaggaatggataagggataaagcgtgtaaaatttaggtacggcatctaaacggtaggaaccacatgtcaaggtaatctttatgatatcttttatattttcccagaaagaagtgactcccacatcggacatgcgctcggaggcgatgggagatatggtaagccccagaaaatgaatggtttcccagtggaataacagggagcatacaaataatattacgggcagagctgtaatacatacacatgcagcccagagcagaacccggcggaaggatatttctttcgtgtatagcagatacagggaaatgcagatcagaaaaatagggatcaggaagtaactcagtgcatacgaatacatcgtgataccaaaaaagactccggataatataaggttccgaagggtcttagtctgtgtgaaacggatgagaaacagcaatgctacagctgagcagcacaacataagattacagtccagggcaaaacgggcggacatgatataataggggcagattgtcaacaggaaagcagcagcaatactccatttttgatcatcgaacaccagacggatactcttggtcccgacaaaaaacagcaacaggcttgcaaggacggcgggaattttgagaagcgtaagagacaggttgccctgtccgactgtccggatcagcagagccagtaagtaggtataaagaggactctgaccaccataaaaattctgagggtaaaaagggcgtacattgagataccggtcggttccgtaatgagccagacaccaggcattataacccagtcctgcttcatcgatatgaagaacgtcaggcaggctttccagacgataaacgcgcaggaagaccgcaatgagaaacaacagcaggagggctgcggaataccagtattttttcaccagagatttcagatccttcatttgtggatacctcgcaatcaatcaaaataaaataagtaatacggtgaaaattctaccgtatggcaggaaagtccggaatcgttcagataagaaataaattcctgattttctttgcggacaatgtaggctgcggaaggagagagcggagtggaagcattcagtatataatgcttggggatttcatcgtcttcttcccgggcggacaggggaacacgctcataaggagaaataggataataaaaatacaaaaactcctctacatcaacgcagtccgcatagatttctttatccccgagattttcgtcaatataggtgacaatgtcggaaatatcggcaaaatagaaggaatttgcataggtatgcagatccagcacggaatatatagtgtaatagtaacgcataaacgaagcaatccacagcacatagccataagccagaatgctcagaaatgctttccggtaaacggtaagaaaatcgcaacatgcccggataccacggagaaaaaagaacagataacagatatagatgctgttggcacgatatagatgatctgtaggtgtcagagcaaccacaaaggagcagctgatgaaatagaacagatatactgtgccggaatgaaaacagcgtgtccggaaggaatttccgaagtcataaacggaacataacattcccaacaggataaaagggatggaaaccgggtataaggtatagaatttatccacggaatccataggataaatactgtatgtcagagtgatcttaaggttgttccacagatttgcacccaatgaggaaaaagaaatttcatccatgcggttgccggaaataggagaaattgtaaagccgagaaaatgaattggctctgcatggaagagaagtgtgtaggcaaaaaggatcacgggcaatgccgtaatgcagacactgaccgcccacaacagtattctgggaaacgtgatttttttatggtaaagcatgtaaagagagatcagaaccagaaaaataggtatgatcagataactcaatgcataagagtacaagctgataccgaagcagactccggacagaagtaaagtatgcagttttcctgttttcagatacaaaagcagtacaagaacagaacaggaaatgcagcacaacatcagattgcagtccagggcataacgtccggacatcacaaaatacgggcagaaacacagaaaaagagcagcagcgagggtgatttttttattatcaaagataagggacatgctcctggtgccggtgatccacagaagaagactggcaaaggcagcaggaaatcttaccagaaaaacggacagattccccttcccgaaaaacttgatcagcaatacgacaaggtaagtatagagagggctttggccaccgtaaaaattctgcggatagaaaggcagcacattgagataacgatcggtaccgtaattggccagacaccaggagttatatccaagagcggcttcgtctatatgtaaaacatccggtaaaacggtcagtttatagaatcttaaaaatactgtgacacaaaacagaaaaagtaatgtgatctgataccagttttgtttgcataaattcttcatctcgtgtatccttatatattatgatgtcggggtcaaaagcccccgactttgatgcctacggattgttccgtgctacgcactcccacaatcctacccaatattcgcatatcgtgggattatcatcccacttttcccgctgatctccctgttgtataatgcgggatttcacggatacctgctgctgggatatgtggtgtatctgctgggatcgaaaaagggaaagcggattttgctgatagtacccacactgctggtgtttgcggtatgcattctttccccggtcaacggagaactgcgctatatgctgccggtgatgataatgcttccgctaaatctgacatggtgtgcttatcaggaaagagaatctgttgcagaaaaagaggagaaataaaatgacatataaaaaaccggaacttttaatcccggccagcagcctggaagtattaaaaacggctgttatttttggcgcggatgctgtttatatcggcggagaagcttttggactgcgggccaaggcaaaaaatttcagcagtgaagaaatggcggaaggagttgcattcgcccatgcacatggagtgaaggtttatgtgacggccaatattctggcgcacaattatgatctcgagggagccagaaaatattttgccgagctgcgggatatgaagccggagcagccggatgcgctgatcatttccgatccgggaatgttcatgatcgccaaagaagtctggccccaggtggaggtgcatatttccacgcaggccaacaataccaattatgagacatatctgttctggtggaagctgggagccaaaagagtggtgtctgccagagaactgtcactggtagagatcaagggaatccgggagaagattcctgcggaaatggagattgagagttttgtccacggggcaatgtgtatctcttattccggcagatgtctgctgagcaatttctttacaggaagagacgccaacagaggtgcctgcacacatccctgccgctggaaatatgcggtggtggaggagacccgtcccggagaatatctgccggtctacgagaatgagcgggggacatatattttcaactccaaggatctgtgcatgatcgaacatattccggagctggtggaggcaggaatcgacagtctcaagatcgaggggcgtatgaagaccgcattgtatgtggcaacggtagccagaacctaccggaaggccattgatgattattttgccgatccggagctgtacgagaaaaatatggactggtacaaggcagagatctccaagtgcacctatcgtcagtttacgacggggttctatttcggcaagccggatgaaaatacgcagatctatgataataacacttacgtgaacgaatatatttatctgggaattgtggaggcagtaaaggattctctgtgccggatcgagcagcggaacaaattctgcgtgggcgattccatagaaatcatgaagcctgacggcaccaatgtaccggtcacggtggaagctatgtacaccgaggagggagaaagtgtggacagtgcaccccatcccaagcaggtgctgtggataaagttatccatgccgccgcaggaatttgatttgctgcgtcagaaaaatgctgattgagaaagagtgaccggaggtaacgccttatgaaaagggaaggcagaattcataaaggagtgtccataggtgcctatagtattctcatcgcttttatgctgttgctgttgtggacagtactcaggtatccggggaatcatctgatcccatggcagatggctctgggggtggcggctgctacagtgttgctgctggcggccggtgcggcatggaacaaaatatatacggtgacaggccggagaaattcgctgtatgccgtagcgctggtattgtttggggtgctgctttatgtggtttcattgagccggcaggggaatgagaatactctgctggattacacctatgtctatcgggatgccctgaatctggcgaacgggagagaactggaagacaccaattattttttgacctattcgaataatctgaagccgatgcttttgctttccgttctgtttcggatggcattgctgatggatgtgtccccgttttattttgttttgctgcggaatgtaattctggtgatgctggtggcatgtgcctgtggttatcttgcggaacggaatggggatacttgctggagatttccgatcctgcttgcctttgtatttctgcttccgatgtgggagatgactgccgtgttttatacggattccatgagtttcggtatgggaatcctgggactggctttcctgaaattggcggcaacatccagggggaagcgccggcagatcctgtgggcgctgcttgcggccggtgtggcagtactggcaggcacatggaagatcacagtgatcataccgctgatcgcatgcgctgtgatcctcttgtggcagagagtgtcggtggaccgtcgagtgacattgctgtttggaggttttgtcgtgattctgggagtggctctgcagctctgggccaattcctacgagatcacaaaggaagcatctgaaacagccaatcctgtgatcagctgggtggcactgggaatgaaggaagacggttcctggaccaacaacacagagtttgtggatcatatgtatgagttttccaccagacaggaaaaacagcaatacagtatggaatatattcgtgaaaacagatcggaattctggaatcccgtacatttgcgcaaaaaggcaagctataattttgccaacggaaatctgggggccagtgcatttttaaacgtggagtacagcgatggaaccttgctctgggaaatgttttcgccctggggaaaatattactggcgcacctgtcagtattgtttctgctatctggtgtccatgtatgtgctgttactgatcggaatgatcctcagccttcgcaatattatcagagatcaggaaccacctgtaatgttgatgatctgtcagttgggatttatcggtatcgttgtttttttaatgttctgggaagccagtggaagacagatgtacaatcagatgcccggaatcctgctgggaagtgttctgagtatagagtatttttggaaaaacttatcactaaaacctcgaaaataataattgaccattataacgcacatgttgtacactgtattcgatattattctattgtataccgaagggaagtagggacatgcgcgaagaattgaatgtagaggagctttttgccagcaaggtgtttaccctgggcaagatgaaagagaggctcccaaagagtacttacaaagaagtgaagaagatcatggatcagggaggagaactttccctggcaactgcggatgtagtggcaagtgccatgaaggattgggccatcgagaacggtgccactcattatacccactggttccagccgttgaccggcattaccgcagagaaacatgatgcttttgtgacacatcctgatgaggatggccggatgatcatggaattttccggcaaagaactgatcaagggagagcccgatgcatcttctttcccttccggaggcttacgtgctacctttgaggcaagaggttacactacatgggacatcacctcccccgcatttatcaaagagaccgctaccggtccgaccctttgtatccctacagcattctgttcttataaaggcgaagcactggataagaagacaccgttacttcgttccatggaggctctgagcaagcaggcgatccgtatcgtccgcctgttcggcaatacagaagctaccaaagtactgccttccgttggcgcggagcaggaatatttcctggtagattctgccaaggctttgcagcgtgaagatattattttcgccggacgaaccctgttcggtgctcccgcccccaagggacaggagatggatgaccactatttcggtgttatccgtgagcgtatcggtggtttcatgcatgatgtcaatatcgagctgtggaagctgggtgtaacatccaagacccagcataatgaggcggctcccgcacagcatgaagtggcgcccatctacgagtctgccaatgtggcagtggatcacaaccagctggtaatggagactctgaagcgtgtggcaggcaagcacggtctgcgctgcatgctgcatgagaagccttttgccggagtaaacggttccggtaagcataacaactggtccatcactacggacaatggtgtaaaccttctggagcccggccagacccccaatgaaaatattcagttcctgctggtactggcatgtatcatgaaagctgtagatacccatgcggatctgctgcgtcagagtgcgtccaatgtaggtaacgatcacagactgggcggttacgaggcaccccctgccattatttcgatcttcctgggcgaacagctggaggatgtggtggcacagctggtggagaccggtaaagcagacaatctgaaagaaggcggtgtacttcgcaccggtgtatccacattgccggattttgtaaaggatgctaccgacagaaaccgtacttcaccgtttgcctttacaggaaataaattcgaattccgtatggtgggaagcgaggattccatcggaagccccaacaccaccctgaatgccattgtggcagaggcgttctgcgaagctgcagaccgtctggaaggtgcggaagatttcgatatggcagtccatgatctgatcaaggaatatatgacggagcaccagcgtattattttcaatggcaacggttatgccagggaatgggaagaggaagcagccagaagaggactgcccaatattccttccatggtagcagcagtagatactctgactactcccaaggctatccatctgtttgaaaagttcggtattttcaccgaggcagagctgcgttcccgcgcggaggtactgtacgagacctatgcaaagaccatcaatatcgaggcactgactatggtggatatggcaaacaagcagatcattcctgcagtaatgaaatacagcaagtcgctggcagatgctgttattgctattacggaagctggcggagacacctacgtgcctacccgtatgttgcagcagatcacacagaagctgacagagatggaaaaggcatccgaggcacttctcgaggtggagaaaaaggcttccgccatggagagaggcaaggagcaggcattctgttatcatgatgaagtcatggtggcaatgaacgcactgagaaaacctgcggatgaactggaaaagctggtagacaagaagtactggccgttcccgacctatgcggatctgttgtttgaggtatagagcacttcagagatcgcttcggatgcaaaagtaaagcctcgtagaggcgattttgcgaatggagttctgaatagttacaattttttcaaaaaaggtattgcattcaaaaaaaatctgttgtatagtaatgagccatagaggagcgatcctcacaagttaatatttttcaatgcgaaacgaaggcgtttacactaggaagtgtagcgcctttttttgtgactattcagagccgtaaatatgtgtcaatatttattcggcgaagtaacctcaaatgagcaaacaacaagtaaacttgttgttcaggaaagtctcgtagagacgattttgcgaatggaggttctgaatagtcagcacggaatagtcgcaggaagcatggaaaatagcaagaataaggaggaaacgaagatgagtgaagtattaaacgtggaagaaatctttggcagtaaggtattcactctgggtaagatgagggaaagattacccaagagcgtatacaaagaagtgaagaagatcattgatcacggcggagagctgtctctggctaccgctgatgttgtagcaaaggcaatgaaggattgggccatcgagaacggtgccacccattatacccactggttccagcctctgaccggtatcaccgcagagaagcacgatgcattcgtaacccatcccgatgagtacggcaagatgatcatggagttctccggtaaggagctgatcaagggcgagcccgatgcatcttccttcccctccggaggcttacgagctaccttcgaggcaagaggctatactgcatgggatatcacctctcccgcattcctgaaagaggatgcaaccggcgtgatcctctgcattcccactgcattctgttcttacaagggtgaggcactggataagaagacaccgcttcttcgttccatggaagcagtcagcacacaggcactgcgtatcgtaagactgttcggcaataccgaagctaccaaggtcgtagctagcgtgggaccggagcaggaatatttcctggtagacagagacaaatacttaaagcgtgaagacctgatcttcgcaggacgtaccctgttcggtgcacccgcacccaagggacaggagctggaggatcattacttcggtactatccgcgagagaatcggttccttcatgaaggatctgaacattgaactgtggaagctgggcgtaaccgccaagacacagcataacgaagtggctcccgcacagcacgagctggctcctatttatgagaccgccaacattgcggtagatcataaccagctggttatggagaccatgaagaaagtagcaggacgtcacggtatgacctgcctgttgcatgagaagcctttcgccggagtgaacggttccggtaagcataacaactggtccctgggaaccgataacggtgtcaacctgttggatcccggcgatactcctaacgagaacatccagttcctgttagtactggcatgtatcctgaaagccgtagatacccatgcagatctgcttcgtcagagtgcatccgatgtcggcaacgatcacaggctgggagctaacgaggcaccccctgccatcatttccgtattcctgggcgagcagctggaggatgtggtaaagcagctggttgagaccggtgatgctactcattccatccagggcggtaaactgttgaccggcgtatccactctgccggatctggataaggatgccaccgaccgtaacagaacttcaccgtttgctttcaccggcaacaagtttgagttccgtatggtaggtagtgcagactccatcgccagccccaacaccactctgaacgctatcgttgcagaagctttctgcgaggcagcagacattctggagaaagcagacgatttcgatattgccgtacacgatctgatcaagaagtacctgaccgagcatcagagaatcatcttcaacggcaacggctattctgaggagtgggtagaagaggcagccagaagaggacttcccaacatcaagtccatggtagaagcttccgagactctgaccaccgaaaagtctatcaaactgttcgagaagttcggtatcttcaccaaggctgagctggaatcccgcgaggaggttctgtatgagacctactccaagaccatcaacatcgaagctctgaccatggtagatatggcgaagaagcagtacattcccgcagttatggagtataccaggactctggcggataccgtactggctgttaagagtgcaggtgcggatgcaaccgtacagaccactgtactgaagagcatttccgagaagctggctgaggcacaggctgcagagactgctctggaggataagctggctgaggcagcaggtatcgaggatcccaagaagcttgctttcttctataaagatgtggtacataccgcaatggatgacctgagaactcccgtggatgaactggaaatgatggtcgacaagaaggtatggccggtacccacctacggcgatctgatctttgaagtataaatagcgttgcaaaataccataatacgtttctctcattgtgttgaatgaaaacggggcttgccatatgatggtgagcctcgttttgcagttatgtatgtttcttggcattgctatggggaaaatcctgtgttatgataactgcatgatgaaaaatatactgaaaaataagaaattttggaaaattatctgtattcttgcaatcattgcatatacggcaaaaaatttatttattggtgcagatacggacgaaggctatggcatcatggcggggtatcgtcttgccatgggagaccggctgctgttggaaatgtgggaaccacaccagacttctgccatttttacggcggtttttatcaggctgtttgtgaagctgaccggtggagtgaattatctgaacctgtttttgcggctcgtatttttcccaatccaggcgtgcgtcagcgtctttctgtataagacgatccgcaggacggtgccgcagatggatgagaatgtggcagcactgatggggcttctctactatgtgacaacacccaagtccatttttattccggagtattccaatcttcataactggttctttgcacttatggtgctgtgccttctgagatacttcggagcgaaggactccgagggcagacagacagcaggagagctgcggtggctggtgctggcaggtatattcatgacctgtgatgtgctggcttatcccagtatggtactggtatttttgtgctgcctggtatttctgctggtgcgcagatcagagaaaaaatggaaagaactctgtgcttatgtactgccctgtgtggcaagtgcggcagtaatgtttacatatcttctgagttatatgacaccgcagaaaatgttggagatggcaggcgagatcttgggagaggggtcccatcagactactgtgggagaaaaattgttgggatgggggtcaagcctgggagagatggccatgatccttctgtgtgccctgctgctgtctctggggatccgatggtttatagagaaggtatggaagaaaaaacttcccggactgctgcagcttccgggcatgctgtttttcgtaattgtatttctgatccagatctggttctggctgttcagttcctttaatgcaatttacccgcagcttttgctgatggcagtatccctgacgggatgttatacctatctgcgcagagacaagacggaaaagctgttctatgaactgatcctgctggcatttgtcaattatttttcggtacttctgttgtctaactggggaccgatgctgctggtcacctatctcattatgggagcagtggccggactggtatgtctgggagactactggcagaaggaaaacaccgcaggaaagaaggcgattcagatcctgtgcctgatccttgtgcttgggaatgcattttcctatacctggctgattctgggatcccaggaatatcatgcctatgtgattcaaaatgtgcgtggcatcaacagagagggattacgcgccggaatcctcacggattatatgactgcataccgttacaacaataatctggctgtatggccggaggccgtgccggacggcagtaccgtgctttatgtgggaccgtcccagttctattgtatgctcggagaacataagcaggcatcccctgatacgatctgctctatgatctatgatgagcgtctgttggactactggaagatcaatccggacagatatccggatgtggtggtgtttgaaagctgttatggagatattgcccaggaaggagagaacagctttatctggaactggttgatggaggatttccagccggcagaaaggaaggactatccctatatcacggtgtttacgcgatgattttacggaaattgttccaatttcatatatttttttaaaattttttcaaattaggtattgcaaaatgaaaacagatagtgtatacttcatcaagtaaacgacatagggctatcgccaaacggtaaggcaacggactctgactccgtcatttcaaggttcgaatccttgtagccctgcgaagcaggggttgacctgctaatgcaaacctcagtagagaaatctgctgaggtttttttgtgtcaaattctaaaaaaaaccatagcaatcactaaaattctcatattttcaaaaaaaacacaaatgttaaaatgaaatcattccaaaaagaaagaagaaggagtgagtttatgggaaaaacaaaaatgaaaagaacggaggctggatccggtaatttaaaggagcattttaaaagaaactggccttattatgtgatgatgctgcctggaattatatatcttgttatgtttaagtatattcctatgcttggtagcgtaatcgcatttaaagattattctgcatataaaggaatttgggatagtgcatggtgtggattgactaattttaaaaagctgtttacatatccggatttttacaaaatcctcagaaatacggttgttctgggattgctgaagactgttttgacatttccggttcccgtcattttggcattgatgttaaatgaactacgaaatgctaaggtgaaaaagggaatacagacgattatttgtatcccatattttgtatcctgggtagtggtaggaggactggtattcgatatttttggcattggtggactgtttaataacgtaagagaatttctgggaatgtctcccttactggtaatgcagaaagaaagctggtttcgtcctatttatgttctttctacgatatggaaagaatctggctggggtacggtagtatatctggcggcaattagcggaatggatccgagtttgtatgaatcagcttctattgatggtgcgtcgcgattccagaaaatgaaattcattacatttcctcttttagtgcctacggtgcttacacttttacttttgaacatcggaagctttttaacactgggatttgatcaagtatataatttatacacaccaatgacttattcagtggcagatatttttgatacgtatgttttccgtgtcggaattcaacaggcacaatacagtttcgcaacagcggtaggattgttccagtcggtagtaggtctgtttatggtagttactttcaataaaattgcaaataaagtttcagaagacggaggattgtggtaatgaaggcttatacgaaaaaatcacatgtacgggaatctgcaaacgataaaatctttgggtttgtaattagcttgattctaatattgtttgccgttattacggccatcccgcttatttctgaggttgcagtatccttgagctccaaaacggcatcacagatgaatcagattaatttattaccggtaggatttacgtttgattcctggaaatatctttttatgaaaggaaaaatatggatgcctttcttgatttcggttttttccacagtgttgggtgtggcgatagcattattactaaatgttttaatggcatatccgttgtcgaaaacagaattccgaccgtccaaatatattatgttatttgtggtatttactatggtgtttgctgctcctaaagttccttattttttgacgttacgttcttatggattatacaataattactgggtgttaattcttcctcatattatgacagcgtataacctgattatagtcagaacatttttcaaacagtttccccgggagttggaagaagctgcaatgattgatggatgtggaaaatttcgtattttgcttcaaattgtgcttccggcttcgaaagcagtgctggctacggtaggattattttacggagtgacaatgtggaaccaatatgagcatccgatgatgtttatacaaaatatgaacctgtttcctttacaaatgaagattcgaacaattgttgacggaggtggagaattacaggcagttaccatggcacagacagcaaattatacatccgcaacgctcagcgcagcagcggttgtatttgcgattcttccagttttggtcgcatatccctggatacagaaatattttgcgaaaggtgcaatgctagggtctgtaaagggataaataaaaactaaaaaaacacagagtaagaactaaaaagcccatatttcaaaagaaataggagctgataaaatagaattaccaaaagaaagaacgaggtggaaaggtatgaaaaaaaggtatgcaaagaaactaatgagtgcaacgctggcatcggtgatggtgatgtcaatgttgtcggggtgtggaagtgctgattctaagagcacagaggcaacagaacagacggcagaggcttctacagatgaggatattgaaatctggagcaccaacaatggataccttccggtggaagcaggaagtgaactgtataatttttataaagatatcataggtgtcgggattgtacagccttatgtagagtggaatggtggagaaacctatttggagcagttgaatctcagaattgctgccggagatatgccggatatgtttactccctggaatggtgtagagacagaattaattgagaatggagcattactggatctgacagatctgttgcctgaaaaagcacctcatttgtgggagagcattccgggggatgtctgggacgcagtaaaagcgaatgatccgaccgggcaaaaccgcatctatgtgattccgcaggttatgagttacggaagaaatggcgctatgattcgtaaggactggctggataatctcggtctggacatgcccacaacccaggaagagtttgtagaagtactcagagcatttaaaaacgatgatcccaatggcaatggggtggcagatgaaatccctacaggtggtcgtgcagaagcaagatggatgggacagttgtttggacagtacggaattgcaatgtgggaaggatatcctcagtgggatatttatgatggagaacttacttactctgcagtaaccaagaatatgcgagattgtctggagtggatgtccgggttatatgcagaaggattgctcgacccagagacttttctgaatgataaggctgcgtgggacggtaaaatcaattcaggtgtggttggtatttgggaacatttgcctcaggaatgctataattatgcggaaaatatttataatggtaccggagtaaaaccggaaatcgctgtattacctgccatttcagcacccggatatgaaggatattatacaatgcatcagatgaacggcggaggatttgttgtagcaaatacggatgatgaagcgaagattgacagaatcatgaaagtattagatgcttatggaaaccaggatctgtggatgaaattttataatggtgtggaaggtatgcacagtgaagtggtaaatggggaatccgttcgtctgccggatgatccatccacgcagcagaatttggtattagtacctttcaaccaaattgcaaccattgatttccaagtgaatgtactgtcttcccagttaacagatgacagagcatgggcagtatctcaggcaattgagaatgttcaggaaaaccagaaatatgtaaagagttttgctggggacggtatgccggaatcgattacttctgattatccggatattgctaaccggactttatatattgaatatgctaccaagattatcaccggagaatactccattgataagtttgatgaatttgtagaaaaatggtatgccaccggtggaacggaagtaactgagaaagcaagagagtggtacgcaaaaaaagcacagtaatattctgcaagaagatgaggagtcctgagagtttatttctccgggactcctttgtagaaacaggagtacaaaagaatgcagagctataatccatatctgcctttgtgggaatatattccggacggagaaccacatgtatttggtgacagggtttatctatacggaagccatgacgggtttggcggaaataagtattgcatgaacgattatgtctgttggtctgccaatgttcatgacctaaaggaatggagatacgaaggcattatctaccggagcagccaggatccaagaatgccggatggtaacagacaaatctgggcaccggatgtcgcaagaggcaaggatggaagatactatttatattattgcccggacggtgacggagaggcaatcggtgtagctgtatgcaatgaacctgcaggacaatatcaattctatggaattgtgcaggataaaaaaggacaatggatcggaaaacgggaaggggatatctggcagtttgatcccggtgtttttatagatgaagacagtaaaatttacctgtattcaggaaatggtccaaagacagagaaggatatagggaaaacacctaaaaattcctgtgtcatggaattaagtgacgatatgcttacagtcatagaagaaccaagaattctgcttccaatattgggaaaagcaaaggataccggatttgagggacatgagttttttgaagcaagttctgtcaggaagataaacggaaagtactatttgatttattcttctgttcggtcgagagaattatgctatgccataagtgaaaaaccggatcgtgagtatcgttatgcaggagtactgtccgataactccggcgtaatagaagaacaggataagaaccggatacagatcatgtggggaaacaatcatggaagtattgagcagatcaatggtaaatggtacgtcttttatcatagacctactaataagacacagttttcaagacaagcctgcgttgaagagttagttatgttgccggatggcaggtttcaacaggcagagatgacatcacagggattcaacggagctccgctggaaaaaggtacatatcctgcgtccatagcatgcatactgcatggaaaattagaacctgagatatccaggccggacagcaatgcgcaaccctatgtgacacaggatgctccggataaaaatccggatgagatacaagatgaaaatgcagcgcccaagcaatacattacctgcatagaagacggaggatgcgcagggtataaatattttcaattcgatgacctgaaaaagataacgataacgaccagaggatgcgcaaaaggagaaatctgtgttagaatacaggaaaatgataaggagatagggcgtatttttgtgatgccgtcagaagactgggaaaagaaccaaactgatataaaagaatggagaggtattggtactttgatgttggaatattacggacggggaatgttggatatgcttgaaatctctttagaatagaacagcgaataatctatgggcggtgtgatgacaatgaagaaaatgtggaacaacctgaatatagcgataaaattgattcttgtattctcgatggtcagtgtgatgccattgttggttatgagctttgtactatatcatatttccgctaatagtctggaatccaccatggaggaaactgcatctattttcagttcacaaatagcctctgacatgaatgggtttatcagcgattatgatgcgcttacaaaatctctgctggtgaatgaaggtctgatggatcgtctggacacagagattccgatatcacagagaatagagaataaactgttttatcgtgaactggtaatgagactgatgacgatggaaagcgaaattcagtctgtgacgatcatgaatgaggaaggcggatattttcagtatgatcgtaccggaagatctttgagttatgaagaattgttgcggcaggactggtttttaaaagaacaggagaattcgggagttctgtttttgacaccgttgcatgactgttcttattatgatagaaacagagatcagatattggttacatttggacgtcgtgtatacggtgtaaacggaaaatatgccgggatgatactgatagaccttgctccgtccagtattatcaaattgagtgatatgtttcttctggaacgcaatcaatataatatcaaaattaatattacagatgcacaggggggactgatatatgattctgatttgtccagcggcagagctcattatagcgagattgacaaagaaagcctgctgttttatgaaaagaaccctgacgattatatcgtaatagaagatacgacgaaacagttgggaattaaggtgaatactgtgatcccgaggagcaagatgtatctgcgtgtcagctttatccagaaggtgacatggatactggtggcggttctgattgcaatcattatttccgcttccgttttattcagcaaacaaatggtatatttaatccggaagttgcagagtagtatgaaaagactggaaaatggaaactatgagttgattgaggaaacggttggaaatgatgaactcggaagcctggtaaaaagctataatcatatggtcggtaagatggaagcactgcttgaggagatatatcaggcaggtgtacgccagaaaaatgcacagtttctggcacttcgtacccagattaatccccattttctgtttaataccctggaatccattcgcattaaggctatcctgaacggagatgatgatgtggccgatatggttaagattctggcaaaaatgtttcgtaatgtcctggacagtgataaaaagaattacacagtaaacgatgaacttgacaatattcggtcttatatctgtcttcagaatatccgttttgacaatgtgattactttgcatgaggatgtggatcggaagctctgtcaggcacgtatcatgccgattctgtttcagccggtcattgaaaattcattcaaatacggaagcagagagagtggtataccgattaaaatatctatatccggaagactggttgatgaacatattatggtgtttaccattcaggatgatggtgccggtatgtccggtgagagactggaagaagttcgacacagcctggaggcattgtcggaaacatcacagagcgaggaaacacaaaactctcatcgaatcggtcttcgcaatatagcagagcggatcagattgcgttatggaaatgaaggaaagctgagtatcttatcaagtgatgagtacggaacagtggtggaaattcgaattccttatatggagcaggaaagaggctgatcaatatggcatataagttattgattgttgaggatgaaaaggaaaaggcaaccggaattgcctatttgactggaaagtataatccggagtgcagaccggttctgctggcacatgacggaagagaaggatatgagaaagccgtcgcagagcagccggatattattgttacggatatcagaatgcctgaaatggacggattggaaatgatccgggaactgaaaaaagcaggatgctcagctgagtttattgtattaagcggatatgcagaattcagctacgcaaaaaaggcaatcgaactgggagtcagagattttatcacaaaaccggttgatgagaaagaactgagtgagacaataaccagggtgtgcggagaaattgcaaccaggagaaagacacaggattccttgggaaaattgaatgatgatatgcgtaactatgcattgagggatttcttgacaggtggtacggacagccgctataaagtgggagaattcctgaagaaaatgagagttttagaaaattacagtcagtatacctgtctggtacttgctgcagaaaatcaagaggagaatatactgcctgtagaaggcttgattctacagggggaacagttcctttacagtatccacatcgggaatgcacaaacagcggtaatcatcggagcaaacaattttacgacggaagataagaagacgcttgtcggaaagtatatgatccaaaacacggaggacgcagggcggttcagcataggaatcggaagtacttataaagagtatgaagatctccctaaagcatatgaggaagcttgtgtagctatcaattaccgtattttgaaaggctgcggaaccgctattttatttgaagaactttgcaatatggaaaaccggccggaactgcttacggaagaagagacagagcaattaaaggatagaattgatcgttttgaccagaatggcttccggattaccgtgaaaggaatttttcacagaattctttcagagaatacattgacacttccagaattgcagaaactgagcttgaatattgtgcttctgggattacacaacataccgacggcacaacttcagatgaatgaatactttggaaagaatttatttactttgaagagtattgaaaaattcaagacaatggaacagttggaaaactggatcatgaatatggtcagcagtgtcaacgaagttatgttgaaagataatatgccaaaaaagaaagacgttattgcagaagcaaaggagtacatcaggcaaaactataatcagaatatttcattgaatgacatatctgggaaattttatattaatccttactatttcagtcaattgtttaagaaaaaaaccggaatgacctatcagaagtatctgacagattatcgtgtggatcgtgccaaaaagctgttggcagagacggaactgcatatttatgaggtgtgtaaagcggtgggatacagtgatgtaaaccattttaatcagacatttgaacgggtggaaggaatgaaacccagcgagtacagacaaaaatacaaacaggaagagaactgacagcagatgaggaggcgtttatgaattccaaaataaacagcctgttgcatggagagatggaaaattatattttcccctttttctggcaacacggtgaatcggaagcagtgctgagaaaatacatgcaggtaatttatgatgcaaatattcgtgcggtgtgtatagaaagccgcccacatccggattttgtggggaccggctggtggcgggatatggacattattttggaggaagcaagaaaacggaaaatgaaggtctggatactggatgacagtcatttccccacaggatattgtaacggaaaaattgaggaaaaaccggacacctgcaagagatggttcctgacctaccgagtgttggacagggtggctccgggagaaagaaaagtctggaagagaccaagctacgatagagcagaaccgtttgttccatcctggatcgagaattattttcacatggaatttgaaacattcccgggagatcagacactggggataatagcggtgcggaaaaacggatcagtggaaaaagatctgatattgctggaggaaaaaaacggagagattgcgtttgcaccgacggaaggagaatggaaagtatatgcacttcatctgacgagaaatcgtggaccacatcgtaattatatgaatatgttggatgaggaggcctgtcatacactgatcgaggctgtgtatgagccacactatgcacattatcaagaggatttcggagataccattgcaggatttttctcggatgaaccggagatcgggaacggtcatctctatcagatggatcagaagatctatcagatggaagatcaaccttggagcaggggacttgcgcaggaacttgagaaaacatttgggacagaatatgtaaaatatctgccgcttttatgggaaagggaatttgatgaaaatctgacggctaaggtgcgttacagttatatggataaagttaccagatgtgtggaaaaggctttttcccggcagatcggagactggtgtcacaaacacggtgtcgaatacataggccacctgatcgaagataataaccagcatgctcgctgcggatcgagtctgggacactacttccgcggactggcaggacaggatatgtcaggaatagatgatattggaggacaggtattaccacagggagaagatattacttatgtctctcatctggggacaccgcgtgacggtgtgttttatcatttcacactgggtcgtcttgcttccagcgcggcagcaatagatcgtcgtaaaaaagatcgctccatgtgcgaaatttttggaaattatggatggaaagaaggggtgagactggaggcatatctggcggatcattttatggttcggggtgtgaatcattttgttccgcatgctttttcggccaaggatttcccggatcaggactgcccaccgcatttttatgcacatggacataatccgcaataccgtcactttggagtgctgatgaattatatgaatcgtatctgcaatctgataaacggtggacatcatgagagcgaagcggcgattttgtatcatggcgaagccgagtggacgggaatgacatgcatgtatattcaggaaccggcgagaattctgacggaagcacagattggatttgacttcttgccgtcagatatttttacagacagttgttatgaaacggatctgagtgacggattacaggtccatacacagaaatataagattttcattattccacagaccgattatataacaaaggaaacggcagaagctgttatccgactgggaaaacagggattcccctgtgtattcctaaatgcctatcccaaaggaatatgcagttggatcgacagtaatagtgaagcggaaaggttgtcacaaatacgcaaatacgcagaaacattgccggtaacgaaacttttggagtacatgagaaagcacaggatgccggaaatacagatgattccggagaataaagatattcgcagttacaggtatcatggagacccggaactcttgtaccttgtgaatgaaggaacgacgatatatgaaggcacggtgctcttgtcagataaaagagagatatgctatcggtataatgcatgggaaaatgaactggaagagctacagctaaaagaaggaaattcgatagagtttaatgtgcggatagaacccggaaaaagttggatcatcatatttgatacggaaaccccggactgtttgaaaaagcaatcgacgtatgcggtaacaggaggcagaaatttgaataaaggatggacacgctcggtgtgcgatagcattcattatcctgtatttgaacagcctgtagcggtagaattaccagatcatgcagagaaggaaatgccggatttcggcggtgtgattcgttatgaacaggaagtggaactgagaccggaagaaatacaacatgcagttttagaaatcagtgacgcaggggaagccgtacaagtatttgtaaacggagcagattgtggaatccagattattccaccgtatcggtatgagattgataagttacttataacaggaaaaaaccggattgtaatcgaagttgctactacattggagcggagaataccaccaaagagaaaacaggagaactggaaaccggagaatcagatcggtttatgcggagaagtacatttatatcacaaaaaataacaagagcaggaggaacaggaaaatgaaattatttccggagaattttttatggggagcagccagtgcttccttccagatagagggagccagaaatgaggatggtaagaccgacagtatctgggacgctactgcagatggacacatcaagcggaacctaaatggggataaggcttgtgatcattatcatcgttacagagaggatatcgctctgatgaaagagctgggattgaagagttaccggttttccgtcagttggccgagagttatgcctcaaagaggtattatcaacgaaaaaggacttcagttttatcgagatctgacaggcgaactgcgtcgtgccgggattgagccgctgtgtactttgtatcattgggatcttcctatgtgggcttacaacgaaggaggatgggagaatccacagattattgatgaatttaaagaatatgttcagactgtggtagacgctttatctgataaagtgcgttattggataacgttcaacgagccggcatgctttatcgggttcggttattttgaaggtcgacaagctccctttaagacaaatacgatgacaaaagagcaacgattcagtgatctggcttacatcagcaggaatgtattattatgtcacggatatgcggtgaaaattattagagaacgttcgaaacttgcagatccgcagattggattcgccttgaatggacgcaattttgtggcgtatgatgaaacgactgatggaatcgaaaaagcaagaagtgaaatgtttgatattgaaaagggattttccatggcggtaaactggtgggcagatccaatgattttgggaaaagcaccacagtatctggaaaaggttttgacacaagaggatttgaaagtaatctgccagccgttgaacttttttgggtataatatttattttgctaacaattataatgcagatgcaaaatctcccgatctcggctggcccggaatgccacgtacacagttaggatgggcgattacccccgaggtactttactggtctccgaaattcctgtatgaacgatatcatcttccaattctgattacggagaatggtatgtccaatcttgattttgtaatgagtgacggtaaggtacatgaccctcagagggttgattatatgtattgctatctgagtaaattgtatcgtgcaatgaatgatgggattcctgtgataggatatacagcatgggcatttacagataattttgagtgggcggaaggatgcgacccgagatttggattagtttatgtggactatagatcacagcagcgaattccgaaagattccttttattggtatcagcaggtgattcgggataatggtgttggcgatatcatgcagtaaagaggcgtatgataaaaaagtacagaacaaacattcgattttgttctgtacttttttatttttgaatgatatactagacgggtaatcatactaagaaaatgatggagtttttcgaggcgctggtagagcaactttatgatgaaataatagtgaagaatttaagaatttttgatataataagaagagcagaaaaggaggactgatacaatgactaatgcagaagcttgggattatgcaatcggaatgatcagggtagatggacttgaacctacagaggatttaaaaaaatatatcgaaaaagaaaaaacaggtgaggcaacgatggaagatgttaaaaaatttcttgataagaaatataagatgaaggagcctgcgaatgcgtgatccgtatttgtatgaaaatacagaggtattaaaaaacaaactggatatcagaacgcaggatgggctgaatgatgcggaagcagattacgtggtgtatcgtttaaaagagttagcaatgaatccattgccgggagaatataataccgaacatcttttaaggatgcaccattatatttttcaggatttatatgaatgggcaggagaaccacgtatcattgctatctataaggaggaagatgtcctcggaggtatgtcagtagagtactctgatccgtttgatatcgtgaaggatattcacaatatcctttcagatatgcgaggaaagccttggaaagatatggatagaaagcgtgcaacagtcgaattttgcgattctctggcaagactatggaaagtacatccttttcgggaaggaaacaccagaacaacgataacatttttctgccaatatgctgatgcgattggcttaaagataaacagagagttatttgaaaaaaacagcagatatgttcgaatggccttggtagcatataatgcatattttgcggatggcagtaatttctcaaagagagaatatctggaaaaaatagtatatgatgcaatggctgagcgtacagtgttatgaaaatgttgaaatattgcgtgttatcatcagggtataagaagtacagaacaaacattcgattttgctctgtacttttttatttttgaatgatatactagacaggtaatcatactaagaagatgatagagacttcctatttttacagatagagttttacagatagaagcgaaaatcaggagaaggaatatggatcatttcaaattacattccgaatatcagcctaccggagaccagccgcaggccattgcggagctggtggaaggcttccggcagggcaatcagtttgagacattgctgggtgttaccggttccggtaagacctttaccatggccaatgtgatccaggcattgaataagccgacgctgatcattgcccacaacaagacactggcggggcagctttacggggaaatgaaggaatttttcccggaaaatgccgtggaatattttgtctcctattacgattattatcagccggaggcttacgtgccgtcttcggacacttatattgccaaggattcttccatcaatgatgagatcgataaactgcgtctgtcagcgacagcatccctggcggaacgcagggatgtggtggtagtggccagcgtgtcctgtatctatggtctgggaagccccgacgaatatcaggatctgatcgtatccctgcgtcccggcatggtgaaggatcgtgacgaggtattgcgggaactgatcgatattcagtacaaccgcaacgatatggatattcagcgtgccactttccgcgtcaggggagatgtggtggaagtatatccggcacagggcggcgattatctcatccgtatcgaatttttcggggatgagatcgaccggatcgcagaggtagagcctcttacagggaaaattcatgcagagctgaatcatgtggcgatcttcccggcatcccattatgtggtatctcaggagaagatcaaggcagcctgtgacaatatcgaagaagagatgaaggaacgggtacagtttttcaagggcgaagacaagctgatcgaggcccagcggattgcggaacggacgaatttcgatattgagatgctccgggagaccggtttctgttccggtatcgagaactattccagacatctgaacggacttcctgcgggagcaccgcccatgacgctgttggacttttttccggatgatttcctgatcatcgtggacgagtcccatatgacgatcccacagatccgcggtatgtatgccggggaccgctcgcgaaagcagacactggtggactacggtttccgtctgccctcggcactggataatagaccgttgaactttgaggaattcgaggcgcatatcgaccagatgatgttcgtatccgccactccttccgattatgagaaggagcatgaactgctgcggacagagcagatcattcgtcccacaggtctgctggatccggaagtacaggtgcgcccggtagagggacagatcgatgacctgatcggagaggtcaacaaggagatcgcacagcatcataaggtactgatcaccacactgaccaagcggatggcagaggatctcacggattatatgaaggaagtcggtattcgggtgaaatatctgcattctgacattgatacgctggagcgtgcccaaatcatccgggatatgcgtctggatgtgttcgatgtactggtaggtatcaacctgttgcgagagggtctggatattccggagatcactctggtggccattctggatgcagataaggaaggattccttagaagtgcgacttccctgatccagaccatcggccgtgcggcccgtaatgcggaaggccatgtcatcatgtatgcggacaccatcacggactccatgcgggaagcactggatgagaccaacagacgtcgtgagatccagatgaaatataatgaagaacatggtatcaccccccagactatcaaaaaggcggtgcgtgatcttatcagcatctccaaggtaatcgccaaggaagaggtacgctttgagaaggatcccgaatccatgacgaagaaggaactggagaagctgatcggcgagatccagaagaagatgcagaaagcagcggcagacctgaatttcgaagcggcagcagaacttagagataaaatgcttgaattaaagaaacaattaaatgatatggaataaaagtaaagcatcaaagatgcgattttgcgaatggggctctgaataattggagaacgatattttatttaagaaaggcaagacaatggaagaagcaaagaagatgcgtccccgggagtacattaagatccggggtgccaatgaacataacctgaaaaacattaatgtggacattcccagaaacgagctggtggtattgaccggtatgtccggttccggtaagtcctctctggcattcgacacgatctatgcagagggacagagacgctacatggaatccctgtcctcctatgcgagacagttcctgggccagatggagaagcccaatgtggaaagcatcgaaggactgtcccccgctatctccattgaccagaaatccaccaaccgtaaccctcgttctaccgtaggtacggtaacagagatttatgactatttccgtctgctgtatgcgagaatcggtattccccactgcccgaagtgtggcagagagattgccaagcagactgtagatcagatggtggatcagatcatgaacatgggagaaggcacgaagatccagttgctggcccccgtggtcagaggccgcaagggcgagcatgccaaagtgctggagcgtgccaagagaagcggttatgtccgggtacggatcgacggcagcatgtatgaactgacggaagagatcaaactggataaaaatatcaagcacaatatcgacatcgtggtagatcgtctggtggtaaaggatggtattcagcgccgtctgacagactctattgaaaatgtactggaactggcagaggggctgctggtggtggatgtgatcggcggcgaaccggtgactttcagccagagcttttcctgtccggactgtggtatcagtgtcagcgaagtggaacccagaagcttttccttcaacaatcctttcggtgcctgcccggtatgcttcggcctgggatataagatggaattcgacgaggatctgatgatcccggacaagagactcagcatcaatgagggagccatcacggtcatgggctggcagtcctgtgcggacaagtccagctttaccaatgctattctgcgggcactggcgaaggaatataattttgatctggatactcccttccaggattatccccagaagattcatgacattctgctccacggcaccaacggtaaagaggtcctggtgcattataccggccagcgcggcagtggtgtgtatccagtagcctttgaaggcctgatcaaaaatgtggagcgccgctatcgtgagaccgcttccgagagcagcaaacaggaatatgagaccttcatgcgcatcactccctgtaaagaatgtaagggcatgcgactgaagaaggaatctctggcggttaccgtatgcgacaagaatatttatgagatcacatccatgtccatccgtgatctgcagaaattcctggataccatgacgctgacgaaacagcagcagttcatcggtgaacgtgtgctgaaggagatccgcgcaagagtaggatttctggtggatgtgggactggaatatttgtccctggccagagctacggctaccctgtccggcggtgaagcacagcgtatccgtctggctacccagatcggttccggactggtgggtgtatgctatattctggacgagcccagcatcggcctgcaccagagagacaatgacaaactgctgaatactctgaagaacctgcgggatctggggaacactctggtagtggtagagcatgatgaagacaccatgctggcagcggattatatcgtggacattggtccgggagccggttcccacggcggagaggtcattgcctgcggcacagcggaagagatcatgcagattccggaatccattacgggacagtacctcagcggcaaaaagcggattcccgtaccggagaccagaaggactcccaccggctggatcaaagtactgggagctcaggaaaacaacctgaaaaacgtagatgtagaaattcctctgggtgtgatgacctgtgtcaccggtgtctccggttccggaaaaagttcactggtgaatgagatcctctacaagcatctggcgagagaattgaaccgtgcccgctgcattcccggcagacacaagggtatcgaaggtgtggaacagctggacaaagtcatcaacattgaccagtctcccatcggacggactcccagatccaaccccgctacttataccggagtatttgatctgatccgcgatctgtttgcttctacggcggacgcaaaggccaagggttacagcaagggacgattcagcttcaatgtcaagggcggaagatgtgaagcctgcggtggcgatggtatcatcaagatcgagatgcatttcctgccggatgtctatgtgccctgtgaggtctgcggcggtaagagatacaaccgtgagacactggatgtaaaatacaaaggcaagagtatttttgatgtgttggatatgacggtggaagaagcattgcctttcttcgaaaatgtaccgtttatccgcagaaagatcgagaccctgtatgatgtgggactttcctatgtaaagctgggacagccttccactaccctgtccggtggtgaggcacagcgtatcaagctggccacggagctttccagaagaagtaccggcaggaccatctatatcctggatgagcctaccacaggactgcattttgaggatgtccataagctggtggagatcctgcacagactggcggacggcggcaacacggtggttgtcatcgagcataatctggatgtgatcaagaccgcggattatatcatcgatatgggaccggaaggcggagaccgcggtggtacagtgatcgccaagggaaccccggaagagatcgtcaaggtgaaaaaatcctacaccggttactatgtgaaaaagatgctggagaaggacaagaaactacgataactattcagccccccattcgcaaaacgctctttcatggctccctgattctgaatagttatcaaattttaagaattaccctctatgaaaatggaaaaaattcagttataatatgatgtatatgactaaaatagcgtgtagagtcaagacttatagatagataccatcggaaaggggtaataaaaaagatgcagtgcacagatatcggaattgatttaggtaccgccagcattctggtatacatcagaggaaagggcgttgtattaaaggagccctctgttgtagcttttgatagagatacaaataagattaaagccatcggtgaggatgcaagactgatgctgggaagaactcccggcaacatcgtagccgtaagaccgttacgtcagggtgttatctctgattataccgtaaccgagaaaatgatgaaatactttatccagaaagcgctggggaagagaactttccgtaagccccgtatcgctgtctgtgttcccagcggcgttacagaggtagagaagaaggcagtagaagatgctacctaccaggcaggtgccagagaggtttccattattgaggaacccatcgcagctgctatcggtgcgggtattgatatttccaagccttgcggtaatatgatcgtagatatcggcggcggtacttccgatatcgcagtcatatctctgggaggtactgtagtcagtgcttccatcaagatcgcaggcgatgattttgatgaagccattgtgcgttatatgcgtaaaaaacataatctgctcatcggtgagagaaccgcagaggatctgaagatcaagatcggttcctgctacaagagagcggaagtggattatatggatgtcagaggacgtaacctcgtgaccggtctgcccaagactgttaaggtgtcttccgaggagaccgaggaggcattgcgcgagactaccgcacagatcgtggagaccattcacagcgtactggagaagactccccctgagctggcagccgatattgcagacagaggaatcgtactgaccggaggtggaagcctgctgcgcggtctggaagatctgatctctgccaagacaggtatcaacaccatgacagcagaggatcccatgacagcagtagctatcggaaccggtaaatacgtagagttcctggcaggctacagagagtaacacagacagctccggggaaccggaaaagatagactaaggcaggatgccgtacatttgtcgaaggatcgcagccgcaaatggaggatatgaatggttaaaggcttgtataccgcttacaccggtatggtaaacgaacagaacagaatggatatcatgaccaacaatctggccaatgcatctaccgtcggatataaaaaggaaggatccaccagccagtcctttaatgatgtgctgacggtcaagatcaaggaccagtcggtaggcatgagaaatgtccagaggatcggtatcaaaaatcccggagtgaagatcggagagaattataccgattatactcagggatctttccgcattacggataatacctatgatctggcattagccggagatggcttttttgccattgaatttaccaataaggcaggagagaccgacaccaaatacacccgtgcaggacagtttacactgaataaggatggatatctggtaacggaagagggtgactatgttctggatacccagaacaggaggatccgcctgaacacactgctggattccaagatcaccgatgacggtacgatttatcagaacgatcaggcagttgccagaattcaggtgacggactttgaagattatgattacctggaaaaatatggagagacctattatcagcccattgaaggggccaaaacgactacggcagatgcacaggtgaagtcaggctatctggagatggcaaatgtacagattgtatccgagatggtaaatctgatctccattaccagagcatatgaatccaaccagaaggtggtccagaccattgatggcactctggatgtagcagcgaaccagattggtaaactgtagtaatgaattcggctgggacagccgataactgattatagaatattttcaggataaaaatcaggtcatggatgacataagggacattgtgagaggagactacatatggtcagaagcttatggacagcagcgaccggcatgatcgcacagcagacaaatgtggatacgattgccaataatctggcaaacgtaaacaccacaggttacaaaacacaggtgaatgaattcaagagcctgttataccagaacatccagacgaagacaacttccgcaaacggagataccaagcccggcagtgcgcaggtaggtctcggtgtaagaaatgcttccatcagttccgtatttaaggaaggaagtctgacagcatccgacagcgacaccgcatttgcaattgatggcaagggtttctttgcagtaagaggagcggacggcaatacctactacaccagaaacggtaatctgaagtttactcttgcagccaacggcggcaatatgctggctacttctgatggacttccggtactggatacacagggtaaagcaattgttctgggcagcaattatgtgatgagcaatattacagtcagcaaggacggaagtctgtgttatcccgatgcaaagaacaaacctcagcctatcggcatcacaataggtgttttccagttcaataatccgaacggactggaaagactggcagacagcctgtatcagcagaccgcagccagcggacaggctatcaacgaagcaagaaataataatgtagaaaagagcagtattatccagggatatctggaaagctccaatgtacaggtcgtagacgagatggtcaacatgatcgttgcacagcgtgcctacgaactcaactccaaagccatcacagcatccgatgagatgctacagcaggccaacaacctgcgtaggtaatgagaaatgtcaaaccgtaagatgacgattcgcctgcttgcaggcagagacgtcagattacggtttgatagggcgaatgcccgacatcgaaggaaacgcgaagcgtttacgagatgcattgctcattaccgtagggacgattcgcctgcttgcaggcggaaacgtcagattgcggtttgatagggcgaatgcccgacatcgaaggaaacgcgaagcgtttacgagatgcattgctcattaccgtagggacgattcgcctgcttgcaggcggaaacgtcagattacggtttgatagggcgaatgcccgtcgcattaccgtggaatttagaaaggataaattatggatatctcttctatatacggcagttccgctctggacagcaccgcatacaccaatgcggcgaaccagacggcttccaaattgcagaaccagttaaacggttcggattacaccaaagcaacagacgatgaactgatggatgcctgcaagcagttcgaggcttatttcctggagcagatgttcaaggaaatgatgaagaccatccctgagagcgatgagacttcttcttccaactcccagcttatggattactataaggatgagatggtacagcagatcgcatccgactctacggagcagaacagtctgggattggcacagatgctatatgagcagatgaagcgtaattacaatcttgagtagcgacttcgggctgccatttctggcagccctgatcttttttatcttacgccgccaccgcggtgacctcttcccaattcggagagaacagccttgaaacccacaaatcaacagacagatagtatgaggactaaaaatggagacgattacaggttttgtagaccatattgtgtttcaaaacagtgaaaacggatatacggtaatgatcctgtcgacagaaggggaagagatgacctgtgtcggtatgtgcaaaggactgacccagggagaaaatatttccgccgagggagaatacatagaacatcccgtatacggccgacagttcaagatccagagctacgagaccgtaacaccgaccgaccgtgtgggaatggaacggtatctgggttccggagcaatccggggagtcggtgaggcactggcagccagaatcgtaaaaaaattcggagacgatactttccgcatcatcgaggaggagccggagcgtctggctgaggtaaaggggatcagcgaacgtaaggcacaggagatcgctatccagatggaagaaaaaaaggatctccgggaagcactggtctatttacagcaatacggaatcagtaatactcttgccgtaaaaatatataatacctatggtatggaaatgtacagcgttatgcgggagaatccctatcgcctggcagaggatgtcagtggtgtgggattccgtatcgcggacgagatcgcggggaagatcggcattcataccgactcggattaccgcatccgcagtggcattctgtataccctgctgcaggcggtgggagaaggtcattgttatctgccgttggatcttctgctgcgcagagcttccgaactattgggggtatcagaggaaaatatccgtcctcaggtggataaccttatcatggaccgaaagcttgtggcaaagggagaagcagtatttgcttcctcttattactatgcggagttgaattgtgccaatatgctcaggaatctgaatatccctatggtggaggcagaaaatcttccctcccaggatgcagcgatccgcaaacgtctggaacgcatggcggaaaatctgtccatggaactggatgaactgcagctgaaagcggtggaggaaagtatcaaaaatggcctgtttatcctgtccggaggtcccggcaccggaaaaaccaccaccattaatatgatcatccgattctttgaatcggaaggcatggacatttttctggcagcacctacgggcagagcagccaagagaatgacggaagccaccggatttgaggcgaagaccattcatcgtctgttggaactgaacagtgccctgtcggaagacgacaccagaaaggcaaatttcgagcggaaccaggagaaccccttagaggcggatgtagtgatcattgatgaaatgtccatggtggatattcaactgtttcaggcgcttctgaaagcaattcttccgggaacacgactgatcctggtgggagatgtggaccagctgcccagtgtgggacccggacaggtattgcgggacctcatgaacagccgggcgttccccatggtaactctggagaagatcttccggcaggccggacaaagtgacattgtcgtcaatgcccatcggattaacagaggagagcagatcactctggacaataagtcaaaggatttctttttactggaaagaaatgacgtaaatgtcatatataagcacatgatccagctgattcaggatatgctgcccagatatgtgggagccacctcctttgatattcaggtactgacccctatgaggaagggaagtctgggctgtgagacgttgaatgagatcttacagcgttatctgaatccagcggatcctcataaaaaggagcatgcctatggcaataccgttttccgggaaggcgataaggtcatgcagatcaaaaacaattaccagatcgaatgggagatcgtcgggagatacaatattcccatcgacaagggaatgggcgtattcaacggagatatgggaagggttaaggaaatcaatgataccatgtccacactgctggtggaattcgatgacggaagacgggtcaactatcctttctcggcattggaggaactggaactctcttatgccattacgatccataagtcccagggaagcgaatatcctgcggtgatcctgccactgttgggcggccccagaatgctgttcaaccgcaaccttctgtacaccggaattacccgtgccaggaactgtgtcaccattctgggaagcagtgagaccgtgcgaaacatgatcgagaatgtcagcgagaatcgcagatatacgggattggagcagcggatccgggagatctgctgtctgccggaaaatgatacaccgtagacggaaaacaaaacgggagcctgagattgcagaaagagatcagaaaaaccataagcaaaataaaggaaacgggattacagctgctgtttcccggaagatgcccggtctgtgacgggatcgtccgtccttttggcagaaaaatctgcccggaatgtctgcctaaattaaagccggtgacggctccgtggtgtatgcgttgcggaaagaaactggcggaggaacgggagtattgcggtgattgtatgcaccgggaacataaatacgacagagccagaactttatacgaatacagggatgtggctccgtcaatctatcgttttaagtatagtggacggcaggaatacggcgattttttcggagaagaaatggcgcgtctgttgggagattttatcggccgggtgcgtccggacgttatagttccggtgccgctgtaccgtgggaaactgcggaaaagaggatataaccaggcagcatgtctggcaagggctttgggcagaagcctggaactgccggtagatgagaaactggtaaaacgggtgagaaatacagcaccgatgaagcatttaaatcccacagaacggcaaaataatttgaaaaaggcttttattataggcagaaatgatgtaaaattatatgaccggattattctggtggatgatatttatacaacaggtacgaccctggatgagatcgcagcactgttaaaagagcacggagtgtcaaaagtgtattgcgtgacattggcctgtgggtctggtgtatgatcaggaaggtgtgagatactatgaatataagaaattgcagaatgtgcggacatatttttaactatgtggcaggaccgtttctgtgcccgcattgccgtgagaagatggaagccaagttccaggaggtaaaggaatacatccgtaataaccccggtgtaagtattcaggatgtatcggagaactgtgacgtggagccgtcccagatccagcagtggctgagagaagagagactggaactgacagaaggatccagtattctgctgaactgtgagaaatgcggagcaccgatccgcagcggaagattttgcgaaaagtgcaaatatgatatggccatggatctgcagagtgtactgccgaagaagccgactgcgccccagcagagccccagaacatccagagacggagaaagaatgcgttttctgtaagcatttgtaagcggaggaattatgctgaacgaagaaaaagtcatactgatgacgcaaatggcatcttatgaagagaatgaaggcaaaaagaatatggccatcggccgttatttccgcagtgactacatcgccatacaggtgttgaagtccattctgtgtgcgacgatcgcgtatggagtctgctttgcgttgtttgtgttctatgattttgagaatttcatgcaggatatttacaagatggacctgatcggttttggaaaaaatgttctgctgtactatggaataacggttgtagtgtatggagtggcatcttatctgatctgctctctgcgctatgcacgggcgaaaaagagcctgaaatgctattataacaatctgaagaagttgaattccatttacaatgagtaaacggcctacacagattgacctggaggaaatatgactgctttactggaattaagagagaatctcaagaagatctacagcagaaatgaagcttttattctgccggtgatcaagtttttactcggcgttatcgtgctgagcatcataaacggcaaaatgggatatatgacaaagctggataacatggccatcgtgctgatcgtatcgctgctgtgttctttcctgcccaccggatttatggctttttttgcaatgatgtttgcagtgcttcatatgtatgcactctctattgaaaccgcggcggttgggctggttgttttcctgttgctgtatctgctgtttctcagatttaccgcgaaggaagcactggtagtggtactgaccccggtgctttgtatgctgaagctgccctatgtgatgcctgtggcaatgggactgatcggaaccccggcgtcctgcgtatctgtaggctgcggtgttgtggtgtattatctgctccagacggtgatcaccaatgctccgaccatcaactccatgggagcagaggaagccactgccaaactgcgcctgctgattgacggaatgttggggaacaaggcaatgctggtgatgatcgcagcatttgccattaccgtgatcgtggtgtatctgatccggagaatgagtgtggatcactcctggaccattgccatggttgccggcgttatgatcgaagtgatgatcctgctggtgggagatctgatgtacgataccaatctctccatcgtcagcgcactgttaggtgccgttgttacgctgatcgcctgcaagatcatagaatttttccgattctgtctggactatagcagaacggagaaagtacagtttgaagatgacgagtattattactatgtaaaggcagtgcccaaaatgacagttgcggcgcccaccaatacagtgaagaaaatcaatacacagcgacgtccggcaggtcagcagaccagaacctccggacagggtaagagatctgcaggccagacctacagaagtacggcacataccggcaggccctcagaaggaacaggccgaagtgttgtgacagaacgtacccccgccggaaacggagttccttacggacagcagggcggttaccgcggacacgagatgtccggtggcagaagtgtcaccataggcggcaatcacacgaatcctcaggatgactccgatgattatgaagaattgttctgaagggattaatggaaaatgcaattaggggataagctggcagaatatattaaaaatttcagcagttaccgcacaaccatggatttcggcgatgtggccgagatcctgatcattgcggtactactgtattatgcgttagtgtggatgaagacgacccgggcatgggtattgctcaagggtctggttgtcatcctcatttttttgctgttggcttattttttccgtatgactaccatcctgtggatggcccagaatgtcctgggatttgcggtgacagccctcatagtggtgctacagccggaattgagaaaggcattggaggaactgggcaagaagaatattatcagttctgtattaccttttgacaacaatcatcgtgtggacgagggattttccgagaagaccattaatgagatcaccaaagcctgtgtggagatgggcaaggtcaagaccggtgccctgatcgttatcgaacagaaggtttccctgcgggattatgagagaacgggaatcgatgtggatggtatcgtgaccagccagctgctgatcaatattttcgagcacaacaccccgctgcatgacggtgctgtgatcgtacgggggaaccgggtagcctctgccacctgttatctgccgctgtcggataacctgggactgagcaaggaactgggtaccagacatcgtgccggtgtgggtatctcggaggtgacagattccctgacggtgatcgtatccgaagagacgggtaagatcagcgttgcatacgaaggaaagctggagcggaatctggatgcggagactcttcgcgacagaatgcataagatcctgaacaataccggagaggaacacaaaaatctgcgaatctggaagggaaggagccgtgagaagaaatgaaaaaattactgacacgtaatcttggactgaagcttgcttctctggtgctggcctttgtattgtggtttctggtggcacagatttatgatccgaaggacacggtaaccttcaataatatccaggtcagactgattaacacagatctgctggagcaagaaggaaaagtatatgaggtgctggacaacagtaatttggtaagagtaacggtaacaggcccccagagtattgtaaaatccgaattgcgcagaaacgatattgtagcggaagcggatatgagcaaactgacagatatcaatacgatcgccatcacttattattgtgagaatatcagcaacgattccgtggagatcaggggtaatcacgattccgtgcgcctgaatgtggaagacaagaccagcaaatggatcaaactggagagcaccacgctgggagaggtggcatccggttatatgatcggcaatgtaacgttggatcagaccaacatcgaagtaaccggacctaaatcagcgatctcacagatcgatcatgccggagtggacatcaatgtagcagattccaccagcagtctgtcggctaatgtggacattaagctgtatgatgcggacgacaatgaactatctctggaaactgtcaagaaaaacgtggattctgcgcatatgacagtagaagtgctggcaacgaaggaagtaccggtagagattgaatatatgggtgtacctgaggacggttatatggctaccggtgaagtagagagtagcaggtctacagtgaagatcgccggaacggcatcagcactgttgggagtatctgccattaccgtaccggaggatcgtatgaatattaccggacagtccagcgatctggtggatatcattaatctgaaggagtacctgcccgctaacgtcagactggcggataagagctttgacggcaagatcactgcaacggtatacattgaaccgatcgcaaccaaggacctgtccgtaccggcagagaacattacgatcagcggtgtgccggagggaatggaggcagagatcactacagaggcggagacttatgatatcacggtatccggcctggacagagatatcagtattctgcgggatgatacggtgacgggagtactggatctggagaaatggatggatgacaacaatgtagaagaactgacaccgggaaattacacgatccctgtgacgtttaacctgtcggaggatatcatggtagaaaatgatgtcaatatccacatccgactgaagaatcaggatacaaataattaaaagatagaatgagaggttttttatcatggctagaatgtttggaacagatggtgtacgaggaattgccaacgaggaactgactccgttgcttgccatgcagctggggcaggcaggagcctatgtacttacgaaggaaaatgagcataaacccacgatcatggtgggttgtgataccagaatttccggagatatgctggcgaatgcgttgatggcaggagcctgctccgtaggagccaactgtgtctacgtaggtgtgattcccactcctgcggttgcttatctgaccaagaaatacaaagtagatgccggcgttgtgatctccgcatcccacaatccggtagagttcaatggtattaaattctttgacggtaacggctataagcttcccgatgccatggaagatgagatcgaggcattgatccgtaacaatatgcccggtatcaaatttcccatcggtcccggagtcggcaagatcaagtaccgtaccgatgccagagaagagtacatcaatcatgccatgagagcggtcaatgtggatctgaccggactgaagatcgtggtggattgtgcagagggtgcctctttctatacatccgtagaatgcctgaaagaactgggcggcagcgtggtggccatccacaacaatccggacggtaccaatatcaatgccaactgtggttccacccatatggaagaactgcaggccagagtggtctatgaaaaggccaatgtcggtctggccttcgatggagacgcagacagactgctggctgtggatgagaacggtaatatcgtcgatggtgaccagatcatggcaatcgtaggcaactacatgaagagcaagggtactctgaagagggataccatcgtggcaaccattatgagtaatctgggattcttcctgatggcagagaagaatgccatccatatggagaagaccaaggtgggtgaccgctatgtactggagcgcatgaaggagatcggcgccagcctcggcggcgaacagtccggtcacattattttcctggatgagaataccaccggagacggactgctcagtgcactgcatctgctgcaggtcatggtggataccggaaagcctctgtcagaactggctaaggtgatggaagtactgccccaggcactggtaaatgccaaagtggccaatcacaaaaaagagaaatatatggaatatccggagattgcagcagccattgggaaactggaagaaaaattcgccggagagggccgtgtcctgatccgtccttccggaaccgaaccgctggtaagagtcatgatcgaaggaaaggatcagcaggtgatccgggaagaagcacagaagcttgccaacctgatacaggatatcatgttctagcagacagattccgaaagttgtctggtaaaagcccttgtgaatgcttttcattcatgctatgatagaaatgtaaatgaaaagtaaaatcataaacactagagaaaataatgcagaataatatagatattggagggtttattatatggtaagtcagaaagtcgtaatcaagaatcctacgggtctgcatctgcgccccgccggaattctgtgcaaggaggcaatgcagttcaagtcattgatcaccttcaaatttcgtgaaaatactgcaaatgccaagagcgtactcagtgtattgggcgcttgcgtaaaatgtggggatgagatcgaattcgtatgtgagggtgaggacgaggcagaagccctgaagaccctggtagaagccgtagagaacggtctgggagaataacaggatcgtcatagaggaacattacagaggctgtgcatattgaagatgcgcagccttttcctatggaactgtcttgagccatggaaaaaatagtttcatactcaaaggatttatgctatgctgtaactattcagagcggatttagaaaatgtgattctgaatagtttatagtacatgagggagagaaaaataaatggaagaaaaaagcatgaagaaaagtttttccagcttaggtttccgattcctgatcggaacactggtcatctacgcagtgcagatgggagtaatggccatcgtaggtgcggtgaagccggaatggctgcaggacaccaccataagcctgatcctggcagtattaccactgtatcttgtgggtatgccggttctgatcgctgtggtaaagcggatgcccggggaagcacccgcgaagaaaagcattacaccgggacagtttgttctggcgctgatcatgtgttttgcactgatgtattgtggtaatctggtgggaacgctgatcaccactgtcgtaggggcattaaaaggctccgcagtggacaatgcactgatgacctatgccaccggatccaatatgatcgtgacatttctctatatggtgatctgcgcgccaatccttgaggaatatattttccggaaactgatcgtggatcgtaccgtaagatacggacagggagtagctgttgttctgtccggtctgatgttcggattgttccatggcaacctgaatcagtttgcctacgcatttttactgggaatgtttctggcatttctgtatgtgaagaccggagaactgaaagtgaccattggcctgcacatgtgcattaattttatgggtgccgtagtcagtgtactgttattgaaagcaatccatctggaggaataccaggaagtcattatgaacggggcagattcacaggctgtcatggactacatgatgaagtacctgccgggctggatcggctatatgatctatgtattgtttattctggcagtattggttacgggaattgtattgttcattgtatatcgtaagaagctgaaattagagccgggacagattgcaaagggacggagattcaagaccgtgatcggcaatccgggaatgatatgctactgtattttctggatcgccatgatcattatccagatgttccctgagattgttacggcaattacgggaaatctgtaaaaagaacggctgcggcagaacatcgccgcaaaggagatcggaagttatgtacgcatttgacagtagaatacgttacagcgagacagacagtgaagggtatcttacgctggacgcattactgaattattttcaggattgttccactttccattcggaggatgtggggctgggaatcggttatatgaaggagattggtcaggtctgggtcctttcctcctggcagatcgtggtgaaccgttatccgaaattaggggaaaaagtaaagatcgtgacgctgccctatgagctaaaagtatttttgggataccgtaattttgccatgctggatgaacagggagaatatctggcgaaagccaactccttatggagtctgctggatgtcggcaccggcaaaccggtaatggtgaacgaagccatgcataagggctacgaaatagacgaaaagctggacatggagtatgccccccgcaaaattgccgtgccggaaggtggagaactgttggaacccatcgtggtgaaaaaacaccacctggacaccaaccatcatgtaaacaatgggcagtatataaatattgccatggagtatctgccggatgattttgtgatccgtcagatgcgggcggaatacaagaaacaggcattcctggatgatgtattgcatccgtatgtagtgtctatagagaatggctacgtcatctgcctgcaggacgaagccgggaaaccttatgtatcagtggaatttcagggacagtaatcctatgctgtcagaacaggagagaacgtggaattgagattaggcgaaaaacagacgctggtaatagtgaaaaaagtagaattcggagtgtatctggcaacgaaggaagcaccggaggataaagtgctgctgccggcgaagcaggtgccggaaggagcaaaggtcggagatgaactggaagtattcctgtaccgggattccagtgaccgtctgatctctacgacgagaaccccgaagctgtgtatgggacaggtggctctgctcactgtagtacaggtagggaaagtaggtgctttcctggactggggactggagaaggatctgctcctgccctttaagcagcagacccgcaaggtaaagaccggagaacaggtgctggcagctctctatatcgacaagagcggcagactgtgtgcgaccatgaatgtctatgaacatctgcgcacggacagcccgtacaaaaaagacgataaggtaaccggccggatctatgagatcagcaagaatttcggtgcgtttgtggcagtggataactgcttttccggactgatcccgaaaaaagaactgttcggagataccgagctcaggattggcgatcaggtcactgccagagtggtaaaagtgttggaagacggtaagctgacactgagtgtccgggaaaaagcctatctgcagattcagaaggatgcggagaagatcgagagactgctggacagctatgaaggttctctgccgtttaatgataaggcggcgccggaggtcattgcccatgagaccggcatgagcaagaacgagttcaagcgcgcggtaggacatctgttaaaagaaggcaagatccagatcacggagaaaaatattcgcagggtgcgtggatagtgtggaaaaaacaaaaaaagtgtgctatagtaagaacgtaatctgagagatatgaacagatacaggaggtgttatcatggatatcgcaggattatcaatgtcaatggcttcaaataatctgcagacgaaaatcggaacagctgtgctgagcaaggcgatggatacgaacgaagcactgggacagggaatcgtccagatgattgattccgctgctatggaacgtagcgtaacaccggaacttggtgcgaatatcgatctgcggatttagcgcagaaataatacataataaacgctaagacaaaaagagttcggaatattagttttccgaattctttttttgcgcgtatttaaaagaaaaaggcatttttactaaaaaatgcataaaaaactattgcatttttaccagtttttctgtaaatttatatatgatatggactctcatatcatttttcggggttatagcaaaagagaagtatgtttggggactgaaggagcagaagatgatatcaaatcagattttacagaacaccattgaaggattgaaaggaatcgccagagtggaattgtgtgtcatggatgtggatggcaaggaagtagcagccaccatggatatgggcaactgttccaagcccgcggtggaattcgcggcatcaccggcggattcccaggagatccagggatatcagtatttcaagatctatgatgagcagcagctggagtatattctcgtagccggaggtaccggtgaggatgtctatatgatcggcaaaatggttgcgtttcagatccagaatctgctggtggcctataaggagagatttgataaggacaatttcatcaagaatctgctgctggataatctgctgctggtggatatctacagccgttccaagaagctgcatattcagacagacgtgcccagagtggtcatgatcgtggaatctgcgggaggcaaggataataatgtcctggaactggccagaactcattttggcagcaacagcaaggatttcatcacagcggtagacgagagcaacgtgatcgtggtgaaggaattcgcagagaccgataccggcaaagaaattgaaaaatcggcaagagcactggaagcggctctcctgaaggaaggtatccgtgagatccgtattgcatacggtaccattgtacatgagatcaaagaagtcagccgttcctacaaggaagcaaagatggctctggatgtaggcaagatcttctttgacgagagagatattatcgcatacagtgaactgggaatcggccgtctgatctatcagctgcccattcctctgtgcaaaatgtttatccgtgagatcttcggaggcaagagcccggatgattttgatgaggagaccctgacgaccatttacaagttcttcgagaacagcctgaatgtgtcagagacctccagacagctgtttattcacagaaatacgctggtatatcgtctggataagttacagaagagtacagggctggatctgcgggtatttgaagatgccatcaccttcaagatcgcattgatggtcgtaaaatacatgaagtatatggaaacatatgagtattgatttctttggcgagaaagcctcaaatgagcaaacaacaagttaacttgttgtttagaagagcatcgtagatgcgattttgcgaatgaggctctgaatagggatcaatatggtagcacaaaggtagcaactgtccgcagggtgggatcttacgggcaatagaaaggcatgatcataaaatgacaagaaaagaaacacaaaggctgaaaagagagcggatcattgaggaaaacggaatcattttcctggacaacgtcagcaagtcttattcctcaggttctccggcactgaatggtgtgtcgttaagcatcggaagaggggaatttgtatttattgtaggtgacagcggatccggtaaatccacgttgatcaaattactgctgcgggagcttacagcgaccagcggcagtgtttatgttatgggaaatgatctggcgaaattaaagcacaggcagatcccccgttttcgtcgtaacctgggtgtcgtattccaggatttccgactgctgaatgaccgcaatgtctatgaaaatgtagcattcgcacagcgtatcgtagagactcccgtcagtgagatccgcagaaatgttcctgcgattctggcaactgtgggactggcaggcaaatataaggccaagaccaaacagctctccggcggtgagcagcagcgtgttgcactggccagagcgctggtgaacaatccttccgtactgctggcagatgagcccaccggtaatctggatcccaataattcctgggagatcatgaaattgctggaggagatcaatgagagcggcaccacggtagtcgtggtcacccataaccgcgaaatcgtcaatgccatgcagaaacgagtgatcaccatgaaaaaaggtgtgatcatcagtgacgaagagaagggtgggtatatcgatgaagattagtacacttttttatacgatcaagcagggatttgtcaatattttccggaataaatggtattctctggcatccattgccacgatatccgcatgcctgtttctgtttggactgttctattgcatcgtggccaactttcagaatatcctgaagactgcagaagaaggtgtatccgttacggtatttttccacagtgatatggataactgtgagagtcatatagacggacagatcccgtccgaacagcgcctggaagagatcggacaggagattgccaagcgtgcagaggtatccgaggtacagttccagtctgcagatgatgcatgggcaaccttcggaccggattatttcggtgaggattatgcagaaggattccccgagaatccactggcaggagaggatacttatgagattttcctgagtgatgtctccatgcaggatgcactggtgacctggctgcagtccattccggaggtgcgcaaggtcaactattccgaaatgacagccaacacactgagcggtctgaaccttctgatcgcctacgtgtccatgggaatcatcgtgatcctgctggcagtcagcatcttcctgatcagcaataccgtagctatcggtatttctgtccgttctgcggagatcaatattatgaaatatatcggcgctaccgactttttcgtgcgtgcgccctttgtgctggaaggtatgctgatcggtctgatcggtgcagcagtaccgctgggactgatctattccctttacaattatgcgttgaactatgtgatcaaccgttttatggtactcagcggcttcctgaatttcctgtctgtggacgagatattccatttcctgatcccggtatctctgggtgtcggtgtgggtatcggtttcctgggaagtatcgctactgtaagaaagcatctgcacgtgtaaatacaattccagcagataacccggatcctatttgtcatgatgtgtgcggagtgtggctctgcactgcatcatgacattttaagaatggagactaaatcaaattgaataaaaagaaaaaaggcttcctgtgcctggcactgtgcctgatcctgacggtttccttcggcatgcagggattgcgggtaaatgcgaccaatatgtcatccattacctctgacagtatccgggacaaacaggatcagatcaaacaggcggaaaaagaacgtgaacagatgaaaagcaatctgagcaatttggagcagatcaagaaagacctggagacacagaagaccaatctgaaaaattatgtaacccagctggatcagaatctgagccagatcgaacagaatattgcggatctgaaaaataagatcacagcaaaagaagaagaaattgcaaagacccaggcggaactggatgcggcactggagagagaagaaaatcagaaagatgccatgatccgccgcataagaattatgtatgagaaaggggattcctacatcctcgatatgatgttgaaagcagaaagcttcagcgatttcctgaaccgggcggatttcatggatctgatcatggcttatgacagacagcaatggaaagacttcatggagaaccgcaaatatattgaactctgcaaagaggaactggaagcggagaaagccattctggatgaggccaaggccggcgtggaacaggagcaggccaatatggaggctctgatcgaccagaagaaccgggatatcaccgcttacgaatccgatattaccaacaaggaacaggccatcaaggaatacaagcagtccattgcggatcaggatgcggagattgcagccctggaggctgccattgccgcagagaaaaaaaagatcctggaggccagtggtactgtgctgacttacgatggcggtacctttaagttcccgctggcaacctatacccggatctcggatgattacggcaaccgtatccatccgacactgggaatcgaacagttccacaacggcgtggatttcgcggcgcccaagggcacggctatttatgcggcctatgacggacaggtggtggcagccacttacagcaacaccatgggcaactacgtgatgatcgaccatggtggtggactgtatacgatctatatgcatgcctcggcattatatgtatccaaggacgatattgtggtcagaggagagacgatagccgcagtgggctccaccggacgttccaccggcaaccatctgcacttcagcgtgcgtaaggatggagcttacacatccccctggaactacctgtcgcaatagttctgcaatcgcagggcacgtgactgcttgcaggcaaagtgctctggcgattagcagaacaaacatacatgagcaagtagggcgatagcccggaatgcgaatgtatgcagcatttcgagagtgcgaagcacggagaaatgcgtgttgcgacaagaagcaggacgtgttgcgacaatatcttggaaataaaggagagcatttatggaggaaaataaggaactggaaaccaccaccgaagaacaggcttctgtaactccggcggcaaataatggcgagaaaaaaggcttatttctcagtggccttatcgttggctttgcggccacgttgctgatcgtgggcggtatctttatcgcttttcagatccacaacatcatgaccatgaaggatgatgtggcagcacaggtatcctatggagaagattccgcggtcaatgcacagaccattaaaaaactgcaattgctggaagacactgtgaaggagaacttttatctgagtgaggtcaccaatgaacagctggaagacggtatgttccgtggcctgatggactctctggatgacccgtattccgagtactataccgcagaggagctgaatgaactgacggaacagacacagggcatttactttggcatcggtgcctatgtcagcatggattccgagaccaatctgcccaagatcagcggcgtgatcgaaggagcaccggcagctgatgtggatttgcgtgccaacgatattatctatgaagtggacggtgtctccactgcaggtaagacgttgacggaagcggtgaatatgatccgcggagaagccgggaccacagtggatctgaccattgtcagacagggcgccggggattatctgcacgtcaccgtggagagagccaaggtagagagtcccaccgtaaaatacgaaatgttggatgacaatatggcatatatccagatcgtggaattcgacgatgtgaccatagaccagtttaccgatgcactggcaaccgtgaagggctccggcatggaaggcctgatcctggatctgcggggcaatcccggtggaagtctggatgcagtggttaaaattgccagaaagctgctcccggaaggcatgatcgtatataccgaggacaaggcaggcaagcgcacagagtatacctgtgacggcaagactcctctggaagtacctctggtggtactggtggatatgaacagtgccagtgcctccgagattttggccggagcaatccaggactacggcgttggaaccctggtaggtaccacgaccttcggtaaaggaatcgtacagcagatcatgcccttcaccgacggatccgccatcaagatcaccatcagcgcttactatactcccaatggccgcaatatccacggaaccggtattgaaccggatgtggaatgcgagtttgacggggaagcatactacaacagtgatgatccggtggacaatcagctggagaaggcaaaagaggtcctgaaagaattaatgaaataaaagtcttgacaaagcgcacaaaactgtataatatgtaacccataaaaacaaaggcgtttttaccggatcggtaaaagcgcctttttctattatcaaaaattcctgcccggaacgtagaatggaggagcaaaatgatcagactggaaaatgtatgtaagaatttcggagatctccaggtactgaaaaatgtaaatctggaagtaaaagaaggcgagaagctggttatcatcggaccctccggttccggtaaatccaccaccgtgcgatgcatgaatttcctggaggagcctaccagtggtcaagtatatattgatggacagaagctgacccatgcgaacaagaccaagatcatccgggagtccatctccatggtattccagcagttcaacctgtatccgcatatgacggtattgaagaacctgaccatagcacccatgaagctgcatcacaagagcaaaaaggaagccgaggatctggcttatcattatctggatgtggtaggacttagggataaggctcatgtgtatcccacaacactttccggcggacagcagcagagaatcgccatagcgagagccctgtgtgcacagacgaagatcattcttttcgatgagccgacttccgcactggatccggagacaatccaggaagtactggatgtcatgatcaagctggctaaggaaaacatcaccatggtagtggttacccacgagatgggatttgccagacaggtggcggaccgtatcgtattcatggcagacggacagatcattgaggaaggtacgccggatcatttcttcgacaatccttccaacgaacgtgtaaaacagttcctgggcaagatcatccgttagaccgcagcattacataacagcaggtctatccacgaagtcatatttacagcatgtcagtcagaaggcttcgtgtttagatatataagtaaagggaattaaaggaggaaaacgttatgaaaaatctaagaaaatggactgcattggcagcagtcatggcaatgactgcaactttatttaccggatgcggcagcactgatgcctccgcttccggggcaacagcacctgcagcggaaagtaccgcagcagcaaccacagaaacaggagcggaaactcctgcaacagacggcgagctggcagcagacgtacaggcaatcgtagaccgtggtgtattgagagtcggcgttaaaaatgcagtagtaggctttggcttccaggataccctgaccggtgagtattccggactggagatcagcctggctgagaagatcgcagagagccttggcgtggatgtagagttcaccgccgtaaccgcagctacaagaaccgagcttctggattccggcgatattgactgtgtactggctactttcaccatcaccgatgagagaaagcagagctgggatttctccactccttattttacagactatgtaaccgtactggtagaggataagagcggcatcagctccctggcagacctggtagacaagaaggtcggtgtatcctccggatccacttccgcaaaggcactggtaaaggctatgatcgatgcaggcctgatcgatggcagcggctttgatgcagatacctttgatcccgcactgtggactaccggaatctctttccagcagtatgatgactaccctgcaatctccaccgcactgagtgccggtgaagtagatgccttctgtgtagataagtccattctggctatttacaagactgacggacgttcctacatcgacgacaagttctcccctcaggaatatggcgtggctaccaccaagggttccggcttctctgcatacgtggatgaactggtacagggatggctggcagacggtaccattgacagcctgatcacagagaacggattagagtaaaaaagaaaaaagtaactgggaggaaacactatgtctggtattatttcagcaagagcctggggcaaggtctgggcgtacaggagcacattcctgttaggacttctgaatactgtggagacagcattttttgcgatcctgttatcgctggcactgggtgtgatctttggcctgatggctaccagcggaaaaaaggtattgcagatcatcagcagagtctatgtggagatcatgcagaatacaccgattttgcttcagctgtgtttcttctactatgcgctggctttttccggtcacagtatcggaatcctgccgacaggtatcgttgcactgggcgtatacaccggagcctatatggccgaggtggtgcgtgcgggcatcgaggccgtccccaagggacagttcgaggcggctgtgtcccagggattcacttatgtggagcggatgtattatattatcctgccccagagcatcaagatcattctgccgcccatggtgaaccagatcgtaaacctgatcaaaaatacctcctgcctgtatattatcggcggagcggatctgatctcgctgacttacagctttgtcaccggtgaaaataccggtggagcctatgctccggcctatctggtcagtggactgttatttttcgttatatgttatcccctctccaagacagccagtgtctgggagatccatctgaagaaaagagaccagcgggtgacatttcagagaacagaagggacggtgacggacaatgagtaacctggaagcaagcttttccatactgggacagaaaggtgttatggcctacattctcaaaggtacggtattcactctgatcattgccctgatcgctgttgtgctgggaatcgtcatcggttcggtactggccctgtgcagaaactactgcacaagcaaaaagacgaaaatatttggcatgattgccaccgtatacatagaagtatttcgaaatacaccgttgctgctgtggattttcatatgcctggtattctgcccctgcccggagctgttcaaccggaaactgttcgggctgaccacagtagagaccaagctgttgttcaaggcagcagttgctttgatcctgtttacctcttccgttattgcggagatcatccgcggaggactgaattccatcgcacatggacagtttgaagccggccacgcacagggattcaatgtggtacaggtcatgatctatattattctgccgcaggcttaccgcaatgtcattcctaccctgttgagtcaggtgatcaccaccatcaaggactcttcctatctggcaaatgtggcgaccatcgaactgatggctcggaccaaacagctgctttccgcagccagccgttacaatggtactggcaatgtaaacgtatcggatgtatttgtgctgtttggtgtagctgcattgatctattttatcatcaactacacactgtcctgcgtggtacgtaccatgcagaaacggcggaagagaccggtacgtgtgaccgcagattaaacgagaaaagaaaagaggatatccatggaacagtatgtgatcacgatttcaagacaattcggaagtatggggcgttccattgccagggaactgtccgaaatactgggaatagaattcctggacagagatattgtggaggctacggcgaagcgcatgggccttccggtatctgtcatcagcgatgaagaagagagtatgaagtctactttcttccggaggcagtatccgctcggaatgggaatgtccagcctcaaggatgagatctttcttacccagaaaaatatcatccgggatttcgcagccaagggatcctgcatcattgtgggacgctgtgcggactatattctggaggatatcccgaatcatctgaatgtgtatgtctatgcccccgatgagtcaaggctgaaaaactgtgtggagaacctgcagatggatccccagacggcaaagaaaatgatgcgggatgtggatgctgccagaaatcgttaccacaaagcctatattcccggctggcagagcgttttcgaccataaggatctcatgatcgacagcagccggttcggcatcgacggcacagcaaagattctggcagacattgttaaaaaccagtggggctgacggcccacagatttttgatctgcggagacagcgtgtcataatcccaggtgcgggaagaattgcttacccgattgggatctttgacgcaaaagcccgtgtcatcataatcatagagcaggatatagtggccggaggtggtgaaatcccccggccgcatgctgcatacgataagttttccctgatccagggctgttttcatgctgttttcacccaggggaagttccttgccggacaggccgagggcaggaagcccttcggtccacagggaccaactggtgccattttccgtataataaccgttcttttcacagtaggaggcaatctctctcggggtgccgttcaaatcgtgggtgaaatagacatagaccatggacagacaggtgggaccacagccggcgagaccgatgatgctatcaccgtaggactcgtagccccagcgcttgtcccattgcaggagcagaggcacctgtccaatgagaacatcggaagcaagatcgatggactgtcccagataattttgtctgttggggtagtctgccacgaaatccgcggcttcggcattattttgggcaagatcggccagtgcttccgtgatgcttacggtatctgcggtggtagagagacttccggcagcgtcagattcattttcttcccgcagtgcagcaaaatcatattggacaaccggcagatcataccgggcagtcagctgataatacagatgattgacggcaggaagaatctcatggccgtaatcctgccagaaagagactgcggtcaggagcaacacgatggcaaatgagacccggaggaagcagactatgcgttttcttctgcggatcgcccgcttcctgcggagcatctcctgcctggaaattctgcggcggcgttgttgcaccggaacctgataagctgcatttgcattcatagaaatccctcccgttagaaccttttttgacaaaataaccgtcttttctatagaagagtataaaggattgtcccataaaaagtcttttaagcagttttaagctttttgacagatatctttaagaattcatgaagatatgttacaataaagcatgaaccaaaatcattcggaaaggggaagggaccgatgatcaggagaaaatatgtcccgctgcgcattgtgcagccggggatgatgatcgatcaggcaatcatagaccgtgcaggccgtgtactgatcgccagacgtacccgactggaggatttccatatcgatgcgctgaagaaaatgggggttacaggaatttatacctgtgagggtacagaggatgtgaagccggcggatgcggacaagccgcaggaactgccggaaccattacagaaaaaatatgaacaggtgaaggtgaaggatcctgccaaggtacagatctcagagagcgtgcgaagccgcgtggcacagggagtgcagtatttgtaccaggatacgcagtcaccggattttaccaatgcttcccggagtattacggatgacctgctgcgggctattgaggataatgatgcagtagcagtggatatcggtgcattgaagatcagtgatgagtacactttcaaacatagtgtggatgtggcaacgatgtccatgatcgtggcgcggaaatacggactggatgacaagcaggtctacgagatcggaatcgcaggacttttacatgatatcggaaaatcaaaagtacccaatgagatcctgaataaggcggcgcggctgacggatgaagagtttgccattatgaagcagcattccgtgtacggatatcgtattctgcagtctaaggaagatctgtccatggagatcaagctgggtgtgttacagcatcatgagaaaatgaacggaaaaggatatcctatggggatcacaggggacaagatcgacctgtttgccagactgatctctgtgtcggatatttatgatgcattggtgacggagcggccgtataagaagccgttttctcccagagatgccgtggaaatgatcatgtccatgacggaagagctggatattacagttatgcggtgcttcctggagagcgttattctctatccggtaggcacagatgtggcattgagcaacggagagaccgcccgtattgtggagaacgttcccaatgcggtgctgcgccccaaagttctgggtctcaccaccggcaaagtgtacgacctcgccaatgatgtgaaatgcgcgaatgtaattatattgtaaattgaaagttagttaaatacattggcaaaatccacgaactcccggagcatgcgatacacatgtctcgatgt

SEQ ID NO: 5726 - DNA, 702 bp, Unknown
  gut microbiota DNA sequence
caagtcgtcattggtttgtgtagacgcaaagaaacggcggctctgaaaatcaaagccgccgtttcaaacgggcgtgtcaaattgtctgctctacgacggctttttttcttttgccgtcgtgcggcagatcatttcaatattcggttgaagtatcgttattcggtgttaagttctactaatacaacctctggacgattattaaatcggaatggaataatactatttccaaggccgcggctaacaaccatatttgtctttccgtctgtataaaggccggaatcatatttaggaaacagcccttgattgggggcaacgagccccccaataaaaggtaatcgaaactgccctccgtgtgcatgaccacataaaaccaaatcaacaccacagcatacataggtttcaaataactctggccgatgtgatagcagtatagtgtaactgttttcgtcatcaataaggctattcaattttgtgttgaccatggctggcgcttcattaaacatatcgcccttaatcgtaaagtcagaatcagaaagcccgataagggtaatcatttcgttgttatgcactaactgtattgcttcatcttcaaggacagttacgccagacgcttcaagccctgttttgaattgatcataatgtgagaagttagcttcgtggtttccggttacaaagtagacaggggctatttgaacagcttgt

SEQ ID NO: 5727 - DNA, 187 bp, Unknown
  gut microbiota DNA sequence
caagcgaggctggttcactctatttttatacggcgacagccgtctatgaaataagattgacagcgttccttgctgacaatcttatgaataggcatggttcgtagcggagggagccttaaaccagacgaactcccggagcatgcgatacacatgtctcgatgtaaggtctccggatgtgaattttcta

SEQ ID NO: 5728 - DNA, 2967 bp, Unknown
  gut microbiota DNA sequence
aagaagatggctgccagtgcaccatggaatacgagagcgtgatcggtcagggaactatagagatcctgtcggatgcggaaaaacagaaagcattgaatcttctgatgaagcagtactatcctgacagaacggagaatttcgtattccgaccggaagtcgtagccatgacggagatattctgcctgaaagtggagcatatgacggggaagaaacgtttcaaaaagtcgtagaagatatcttctattgatatccccacgggatagggcagcaggaaaatagagataaaatagagaggatgagggacaattatgtatgcagacggacagatatatatgggcctggcagatggccagcgtgtgaatatgccgctgaatatgagtaaccgccatggactgattgcgggagccagcggcaccggcaagacgattacgatgaaagctatggcagaatcattttcggacgcgggagtgccggtatttttgtgtgatgtgaagggggatgtctccggaattgccacagccggtgtggcttcggaatccatggacaagaggatcgataaattcggtatccgcgacagcttttcctataaggcttatccggtctgcttctgggatatctatcaggagggcggccatccggtgagagccaccatctccgatatgggaccggagcttttatctcgtattctggggctcaccgctgcgcaggaaggtgtattgaatattgtcttccggatcgcggatgacaagggacttttattgatcgacttaaaggatctgcgtattctgctgaattatgtggcagaacacaaggatgactatctgaccacctacggaagtatctccaagcagtccgtgggcggtattctgcgggcgctactgcctctggagaatcagggcggagatctctttttcggagaaccggatctggatatttatgactggatgcgtacggatgtgtacggcaaaggtattgtcaatgtgctgaactgcgtaaaactggtgcagaatcccacactgtatgccagcttcctgttatggatgatgtcagaattattccagaagcttcccgaggcgggagatctggaaaagccgaagctggtatttttcttcgatgaggcacacctgttgtttgctgatgcaccgaagatactggtgcagaagatcgagcaggtggtgaagctgatccgctccaagggtgtgggcatctattttgtgacccagagtcccagtgatatccccgattccgtactggcacagttaagcaaccgggtacagcatgccctccgggcgtatacccctgcggagcagaaggctgtccgggcggcagcacagtctctgcgggctaatccggcgtttaaggcagaggaagtcatcatggagttaggtgtaggagaagcgctgacatccttcctggatgagaacggcgtgcccggcatcgcccagcgtacctccatcatctgcccccagagctttatgggacctgtggatgagacggagcgcagaaatctaatggcgagagacggcatgggacgctacgatgaggcggtggacaatatttctgcctacgaagtgttgacagataccatggagcatgaggcgaaagcggcgcagctggcagcagagcgggcacagctggagaaggataaggaagctctggcaaagcagcaggccaagctacaggaatccgccgtaaagcagaaacagaaagagtgggaagcagcacagaaaaagaaggaaaaggcagcggaacgccgacaggcccagatcgaacgccagctgatcaacaccggtgcccaggtcatcaagagaggaattttgagtacactgtttggaaagtaattaggaataaaattcttttgatgcttattctgccatcgtcagcggacggaaagattatgcaaaacgatggaaatgctagaataactggaaccagagaaagtgtccgccaaagatcagccagaggacggacagaaccgacagcaggatacagacgatggtctccgccggctgccgggggcgtctgcaaagtaacggcggtagagcgatggcaagcagaaggatcggaatcccgtaccggaaaagcataagcccgatggcaaaggcacccaaagccagggtgaagagtgcttcgtctaaatttgcttcattttgtataaataagaacgcaccagtaaagaagagaaacgcaagaaggatcacggaaaaaatactaagacagaggatgcgaagccatttcgcggctctgtcttttttctgttggcttacctcggcgatgacatcgctcaggagtgtattggtgtcagcagagggcagggcaatccgctcaccgcgacaaagctcttcaaccgataccgacagcgcagccgccagatcatccagcagagcaatgtccgggtaggcattgccggtctcccagcgggagattgccttattcgtaatatgtaactgttcggccagctgttgctgcgtcagtcccagagccatccgctgttctctgataaaagtccctatttttgttttatccatgtgcccctcctgattgttgcatacgaactgatatttgatttcagtatagaagaatcaaggggaattggcaatctaccgaagcgagaatgccgggaaattaactggaaagttagtaaagaaatgctatcaaatccccgtagcccttggcagggtataagaaacgcggcacgctcgtactttagtacgatgcgctcctgtcgcagagcgtagcggtacataagcggtcacaatacgaccgcaatgcgtcccttgggacgctatggtaccgacgtctgcttacggcactgcttattcttatacccagccggggctactggtttttttgaaagctttccaaaacgcagaactcccggcgtatgcggtgccatgtcgagtatgcggtgccatgtcgaagatgtttgtcggaggatgttgacattttctagaaaagtgctgaaag

SEQ ID NO: 5729 - DNA, 440 bp, Unknown
  gut microbiota DNA sequence
cagatggtggaagcaactccgggccgctgggtcggtgtcaaggacggactgtttgccatcaatgagcagggtatggaaggcggcctggtcgctgcggactatttcgtatatcaggagctgtaactatttatagggcgaagtaaccactatgagcaaataacatgcaagcatgttattcaggaaagcctcgtagaggcggttttgcgaatggggtgctgaatagttactgaatcataaaattacatttctatttacaatgcaatgacaatgtgatattttggcagttgttaatgtgatgataaaggaacgatgtaaggtatgacggaagagaaaaaaatgttattttcacaggatgcactgaaaaaattattgtggccgctgatcatagagcagtttttggcaatcgcaatgggaatggcggacacggtgatggcggccag

SEQ ID NO: 5730 - DNA, 2168 bp, Unknown
  gut microbiota DNA sequence
ttcgtgatctgcaaaaaatgaagtctggctgtaagaaaaagaccggtagccagaatgaggacgatcagggggatgccccagacgaaatcatccactgtggtcagaaagttactaatcatgtctaacatattccctctccttccgtcacctcttgtgacgtcctatcgtagattgatttcttccgaagagaatgggaataagcatatagatgctctgtccttttgcctgagagattggcagctttactgccgtacaccttcggcgccttctatacggaaatatgataattgctttccgtggaagaactctccagagtaaatctttaccgcactaaagcggcaacaaaatcacaatagcatactttttcacccattgcaactttttttatctttagtcattgatctgaccaacacagacattgacttttatggtacctgattactataatataattcatatgaatactaacacgaacaatcacaaaacttcatattccattacacgtggactgtttttcctgatcatgtgttctgtgatttttacagtactgtactacagtctgcccaggcagaaccgtgagccggcaatatcggattatattgacttttcagaaggctggaccacctccgatggaagccccgttgatttttcccatatcagcggcacctgcacagtgaccaagaagcttcctgcgctgactcacgacatggcacttttctttttttataaaagttccaatgtgacgatcctgatagacgaccggctgatctatgagaccatgcagccggagagagttttcttcggcaagacaccgggagcctcttatgtctctctgccgatctaccgggaagattccgggtgcacgctcaccctggtgatcgataatccttacggagacggcagtggcaagatcaatcatatgtacctaggacgtagtgaagatatcctgataagccgcatccgcgacaaggcacccggattcggcatcagcttcctgatcgcccatcttggtctggcatttatcctgttttatctgccattacacaagaagcacatcatcggcagtgagatgctttatctgggattatttgctctgaataccggtatctttatgttggcagataaccgtatgctgcagctgatcctgcgtaacagccatatttatcatacaattgcggaactttttatgatgctgatcaccattccactgtttctgtaccttggcaaaatgtatacagagtactcccctgtgatggtacagacagtatgcctgatcagtgtcatggatttcagtatacgtttctgcctgaatctgaccggtctcaaggacttccatgaaagtcttcgtctgacccatattacttttggcattctgatcgcacttgttatctatgccatcggcaaggggttttatcagaatcaaaggcagcatctgaagcacaatctatatcataaccttggaattctgtgtctgtgctttggcgttctactggatatcctgctgctatggttcggcagtgctcccgagaccagcttcttcacacggatcggtgtgcttatgttcctgatcatggaagcagtccaggttaccctgcgcctcatgaccaactatcaggaaggtgttcgcatgcagctgctcagccgcctggcttatcgcgacggtctgaccgacctgctgaaccgtacttcctatatggaagaattgaaaagactggacgcatcccataattttcatgtgttgctggcactgtacgatgtgaatagcctcaaatatgtgaacgacacctacggtcaccaaagcggtgatgaaatgatccgccgggtagcggatactctgtcggcacatctcggttccttaggaaaatgttaccggatcggcggagatgagttcgtattcctgtcgaccgtatccgattccgaaaaagaatttctcaagctgcaaagagatttcgaagcgtctctgggaactctgaagcttcctgacggttccgagcatcccattactgtagccatgggatattccgtactgacccatactatgcctcgttccatggacgatatggtccgggaggccgatgccaaaatgtatgaggcgaaacgacgaatgaaaacagaaaattgatcataggatttgcagatcttatttcattttgtaatgtaacttgaaa

SEQ ID NO: 5731 - DNA, 2230 bp, Unknown
  gut microbiota DNA sequence
cctggcaggagaagatattgtccgggaaaatattgccaaaaaatcggaagaaaatattatcgggctggcaacggacagtaagcagaagcaaaaacgattgaaatacattatagatattctgcttgtcacggcggcgattgttgttttgacggtcggaatcatgatatttcggaaaaatatgccacagaactttatcgttccggtggacaaggacagtattgaaatgaaaacggcggaaatgctgtcaggcgtagacggtgcctttatgtataaatacacggcaacgaatgaatttaaaactctatatattcatatttggcaataccgggaaggaaagctggtagacagacaaagggcagggctttcgtatgaaggaatggattcaccgcagaatggaacgattattattgtaccgcagtttaaggatcgtaccgtgaaaattattattgcagatgatgaatcgcagggagatatgctaatcccaatcctggaggatgttccggaaggagagcactatggatatggaagaactgcaacggaaattcaggagaaaacagatattgtctatgatgaacagcagccgcttcttgcgctgatctatgataatgacgaagcgagaacttttgattttagttatattgtgaacgaccagctggatgcccttgaaatggatgattatgtgtactatttttcttttgagttccgaacggaatagataaataaaccccattccgtgaaaacagaatggggttcgtttttagtttgctgcttttgcctttttctctctctttaaaaacaggtacacacagataccggcaaaagcaatcgttgcgacgatcagtatcggcagtaccggtatggaacggatatctgtactgatgagcttcagtccctgatacagtgtgaagacgccgaatacagagaagatggcgaaggcgagagtattgagtagcccttccggtgtcttgctctttaacagatagcctaaaagcattcccaggatgtctgctaaaaacagccccagagaacagccgatccatacgatcagtgcggaactcataccttcattggcaccaaaggtgatggcggtaagctgtgtcttgtctccgagttcagctacgaaaaaggtacagaaaaccgcaaacggtgcgaaccggatcctggatctgccgttgccctcctcttcctcgtcatcatcgcccgcaagtgttgatgcggcaaagtaaagaaatgcaagtgcagcaatgatcttgataagccaggcagggatgaattcgctgacaagcccgccggcgagaacggccaggccgttcagcaccaggattgcggcagcggttcccaatataatatctcttaatttgtatttcgaagtaagggcgatcagcataagctgtgtcttgtcacccatctccgcgatgaattccgtgagaaataccttaaaaaataatatcatttgtatggccctcatttatctgattatgatatacaccgcatatgctgcgtaaagagccaccatacagaagccttcgactcttccgattttctttttgcttcctgcgaagatccacacacacacagtaaatgcgatcagtacacacagatcaatgatgttttccgtaatgatgctgatgggactgatggcggaagcgatacccagaaccatcaggatgttaaatacgttagaaccgatggcgttacccagtgccatatcgacttcattttttctggctgcaacgatggaagtcacaagctccggaagagatgtaccgatggaaacgatggtaagtccgatcagcgtctgcgtcattcccaggtcgcttgcgattctggatgcagcatcgacggtgagatctccgccgaaggcaatcgcagcagcaccgccgacaatgaaaataatgctaagcggcacggagatcagcttgatctcttcatcggaaccgccctcaatttctactttttttccttctttatttgcctttaaggcaattctgatcatgtagaagatatatccggcaaacagacctatgaatatcacaccatcgaaatgtcccagtgtcattttggtctgatcaccaagtccgatgcttcccaaaagcagtaaaagaccggcacagatcagggaaagggggatatctcgcctgatagtttcccgcgcaacctctacggtggcaatcattgcacatacgccgatcacaaccatcagattaaagatattggaaccgacgacatt

SEQ ID NO: 5732 - DNA, 1081 bp, Unknown
  gut microbiota DNA sequence
cacgtcgcagcgccgacgcgcgaggcagatgatggcggcgttgtggtgtttgccctgttcgcgtttgcgcttgtaataggccacggagggcgggtgtttggtggatgcgacgaacgcggtctgccacagcgcgttcttgaggcgtttgttgccccgcctggagggccgttcgcctttgatgctggtgccggattggccggtgacgggcgatatgcccgcgtaggcggccagatgggcggacgatttgaagttggcgatgtcgccgccgatgccgagcaggatgttgcttgcggtcctgacgcctatcccgggcatcgacgtcaggaccgtgagaagagggtggtcctccaggagcttctcgacctggcggtcgacctcgcgccgccggtccctgatcgtcttgatgtcgtgggcgatggaggggatgatggtctcggccatgagggtgccgggcacggtgacggtctgctcgccgatcgccttgaacatgtcgtcgatgatgcggccggcgcgaagcccgttggacttggcccagtccttcacgtcctcgatcccggcccgtttcacgcccatgggcccgccgtatcgttcgagcagcgcgagcgtcgcgtcgcgcgtgattctctcgcccttgagcgcgcgttcgaacgcggggtgggtctgcagcagcaggctccgcaggcggttgacgtggcgggtggattcgtgggcgaggtcctcgtcgtggccggcgagcagcttcagggcggcgagggtctcgtcatccgggcccgcgtccctgagcgtctcgggcagcttgagcgcggcccacgcgatcacatgcgcgtccctgcggtcggtcttcgcgtccccgggcagcagctgcgcggtcctgcgcatggccgtgccgggaaggtaggcaaccgcgatccccatgttccgcgccaccgtcaggggcagggagccgatggtgttgggctggtccacgaccagcagcacacggccatgcttggagagcttgcccagcatcgtgcggatggccttctcgtcctgtttcaacggcttgtcgtacagggtgttcccgtcatggtcgagggcgtgc

SEQ ID NO: 5733 - DNA, 3227 bp, Unknown
  gut microbiota DNA sequence
ggtgaggatatctcctttgtaggcttcccgaccgatggagatatgggatctgtattatgggcaggtaactggatgtatgccctgtctgcaaaatccaagaatctggatggtgcatgggaattcctgcgctactatctgacacaggaatatcaggataagatacaggaacaggaatacaatcttccggtacttcgcagcacctttgagaagaatgtgcaggatgctacgaagaagccgtactatatggatgagaacggcaacaaagtggaatacgatgagacctattacatcaatggggaggaaatactgctgccgcagctgacacaggagcaggtggacaggatcgtaagctttgtggaaagcgtgaacaagagaggatactataatgaggcaatctccaatatcatttcggaagaagccggagcatacttctcaggacagaagagtgcgagagatgtggcaggtgtcattcagagccgtgtacaggtctatgtaaacgagaacagataaacggaagatagcactgcgtagagcagaatagtaaaagatggcggtctgttgaaaaacaggccgccatttatagcatggcgccttagccaaggcggatgggaatgccctgctttttcagatgtgtcgtcagggtaagctcctgtccgtgctcccttaaccactgcttatagatccggtaatccggcatgatgcgctcgaccatgttccagaagtccttcgaatggttcatatgagtcaggtggcagagctcgtggactaccacataatccagaggaccggcgggaccgtagatcaggcggtaattgaaggataaagttcctctcgaggaacagcttccccagcgggtcttctggtcacggatggtgatagaagtgtagtgcccaccggtgaacctgtggtagtattccacacggttcgtgaacacttctctggcagcattccgatatcggttttccaaagcctgcaacctgcggagctccgcaacggtcagcggctgattgtcatatagattcatgagagtgcctttcacatacagggatgttgatcctctgagtatcgttgtaagtttgaacagattaaatatactgcgtatggcttgaaaagtaaacgcagaaattgtagaatagtgcgtgacggctcgtggacggaaccgttacaggaaaggaaaactttaaatactatgggtaaatgtattttgatcggcgcaggagatctcacgatgggagagctgtctgtgacggaggaagattatgtgatcgcggtggacggcggtttaagctactgtgggatactgaatgtggagccggatctgatcatcggagattttgactcgatgagcgaacaggagaagcttgctgtggaacagctacaacagaccgttccggagaaaatctgccgcctgccggagtgcaaggatgacacagacatgctggcagctatcaagcgggggctggagctgggttataccgatttccgtatttatgcggccacaggtgggagatttgatcatactctggcaaatatccagtgtctgctgtatctcaaaaatcatggcgcggtggggtacctggtagacggtacgggaatggtgctcgtactgcagaacgaagctgtgcatttccggaaggagctggagggcaccatgtcactgtttgccctgacgaaggaggtaaaaggcgtgaatatccgcggcatgaaatatcctttggaaaatgccgtgatcaccaacgatttccccatcgggatcagcaatgaattcctgggagaggaagcagaggtgtccgtagaggacggcgaactggtatgcatgatccggtactatgaggatgaagtataaccatggcagccggaaatgtacgcttcgaagatgatcaaggaggtggcaccgaatgtccacctccttggtgtttttgcgaaaaaaatctttagaaaatcttttgttttttctgtaggtgaaattagaaattataaattagaatcagaaacagacaggggagaggatccccttgccgcatgtggcagaatgagagggagtcatggagaacaataaatatcatattctcatcgtggaggatgataaggaaatccgggatggtgtggaaatctatctgaaaaatcaggggtatcaggtatggaaagctgccaacggtaaggaaggactggagatcgtaacacgggaagagattcatctggctatcctggatattatgatgccggtgatggacggtgtgacaatgttaatgaagctgcgggaacagaatcacgagttcccggtgatcatgctgtccgccaagtccgaggaagtagataagatcatgggattaaatatgggagcggatgactatgtgaccaaacccttcacaccgttggagctgttggcgagggtgaattcccatctgcgcagatattccaaatatctgacggcggtcagtggggaagaacaggaaaaatcccatgtgtataccatcggtggactggaactgaacgaagaaaccgtggaagtgacggtggacggagaagcagtgaagctgactcctatggaattcaagatcgtacagctcctgatcaagaatccgggcagagtattttccgcggatgagatctacgagcgtatctggaacgagaaagcagtcaacacggatactattatggtacatgtgcggaacatccgggagaagatcgagatcgatccacgcaaccccaaatacctgaaagtggtatggggcgtaggatataagatcgacaaacaataaatacggctgtggaaaacaaagcgtttcggcaggcagagggaaatggccggagaggtgtaagaatggaacaggtaacagaggctgtgaaagcggagacaacagaaaacagggaaaaccgagaatacagaaagcctgcagtcaaatggctgatcatcggactgattgtcagtctggcagcttccggcatttttactgcctgctacggaatcttcgagcgcagggcggagagcaggagaaatgaacaatacattgcggatccgctggagacgtcgaatacgattacgtatttgtatcagaactgctatctgctctaccgagatctgtacaacaaagaacaccagacttccttaagctatgtggaattatatatgcagcccacggagggaaacgaatggctcaatgatgaccggaaacgggcagaagtggcatatggagatacggaggagctcacgataccggaaggag

SEQ ID NO: 5734 - DNA, 1219 bp, Unknown
  gut microbiota DNA sequence
ctgattgtataccttaggcaggtctctgtaggaatggatgtcattcttatagaaatcacagaacagggtctctgaagtaggtctgacacagagtctctcaggaagctcattcaatcctccctgggtaacccatgctacttcgggtgcgaagccttctacatgatccttctccttgtccaacagggactcaggaatgaacatgggaagatatacattctgtactcctactgctttgaatcgtgcatccagctccttctggatcagctcccagatcgcatagcctgcgggcttaattaccatacatcccttgacactggtgtaatcacacagctctgctttcttcactacatcggtataccactgggcgaaatcttcttccatggaagtgatcgcttctaccattttcttgtctgccattttctctctccttttctttttctgaaaataaactgctcatacgatctacggaaacgaaaaacgccgggtcatcgctcccgaaaaagggaccgatcactcggcggtaccaccctgattgatacaaatatgtatcctgctctgtcaccgttaacgccggttctacgctgtgcttcgccgcttccaggtacattgtgtctcgcacaggactccaagggaggtttccgatcctctgtcataaggggttcccagccgcacgtcaccgtgtccttcccctctctctgggatgctttccgatcgtactgatccttttcatcgtcattgtcgtatgcaagtaattgtagtgcatgcttccgtgatttgtcaaggtctatctgctaataagaagatacctgccggagctgcataaaataaaagcagataataacgcaccagggatatgggacccagaaagaccgtaaggcacagtgccagaaccagcagccaactgttccatatctctgccctccgccgccggatgccatagaaaaacaggatcactgccagccagaaataggtgccgattgcaaacaacgcacggatcaccggaattttctggtaataatattccagcgatatcttacgataaaattctgtcagccgggaactgatcgtcttcatttccagtacatttcttccctcgaaatcaaagtaataaatatcaccgtccggatcatccacaaccgatgtccccggataccaggcctgatacgtattatccagaaaggctctcagataacatcccggatactgccatccttttcgg

SEQ ID NO: 5735 - DNA, 11620 bp, Unknown
  gut microbiota DNA sequence
aggggcacaacatttttcataacttgtttgtgccttgagcgaagcgaaaggaatgacaaaaactatgacaattcaggaaatcaaggcacttccccgtacggaggaaggcattttcgacctggcagccgtgcagcagagtgcaggtctgggcaacatttatcaggcggcggatctggtgtatcccgtctatgcggcctatgagaccacggagaataaaaaagaaggctatccggatatcatggcacagatgcgtgtgctgaaaaagcatgcagaaagtgaattcagtgctgaaaacggtgcagcttataccgcagtcatgcttcataccgtagagcagatcagcccggagatctacgagaattacagagagcttctggacaatttccgcagtgcggtaaagcgtatgctggagcagtattatgatgcaaaggaaaataagtttgccatggatgccacatcggaaaaggtattctgcgatgccgtacagaaggcatgtgcggagtatttattgttagcggaaaaatatcaggagtgcattaggtagagaacgagaggaaacagcgcatggaaatcagacatattatgcatactgcccgcagtgcgaccatagagatcgcagacggcggcagatattttacaaaacagcccgtggagctgcgggtaaacggtgagccgtcactgaccacagagaagaccatcacttccctgtttgatttaaagccggatcagaagtatgtggtggaagcttatgtgaacggagaaaagcagggcgaagtatctttcaagacggattatgagtacgtgactctggatgtgaccagattcggtgccaagggtgacggggaacatgacgatacccactttattcaggctgccatcatggcatgtccggtgaacagcagagtgtatttcccggcgggaatctaccgcataaccagtctgttcttaaagagccatatccggatcgagctggcagagggcgcggagctgaaggcctttaccgacagagagaaattccctacgttccccggaatgctgcagagctatgatgagaccgacgagtacaatctgggcacttgggagggcaatcctttacctatgttctccggcattatctgtggtatcggtgcagaggatgtggtgatctatgggcagggtaagatcaacggcaatgcttccaaagaaaactggtggaaggatccgaaggttatgaatattgcattccgtcccagactgtttttcatcagcggatgtaaaaatgtgattttgcagggtgtgaccttctgcaattccccttcctggaccctgcatccctatttcagcaatgatctgaaattcatcggtgtgaccgtgcagaatcccagcgattcccccaacaccgacggactggatccggaatcctgcaaaaatgtggagatcctgggtgtgcgtttttccctgggagatgactgtattgcagtcaagagcggtaagatctacatgggcaaaaagcataagactccttccgagaatattcatatccgtcagtgccttatggagaacggccacggtgccgtaactctgggaagtgaaatggcaggcggcgtggtaaatctgacagtggaagactgtattttccgtcatacagacagaggtctgcgtatcaagacccgtcgcggcagaggaaaagatgcaattctcagcaatatcattttccgaaatctgacgctggaccatgtgatgacaccgctggtggtcaactgcttctatttctgtgatcccgacggcaagaccacttatgtccagtccagagatgtttaccctgtggacgacagaacaccgcaggtgaaaaagatggtatttgaaaacatggaatgtacgaactgccatgtggcagctgcgttcttcgacggacttcctgagcagaagatcgaggaaatctacatgaaggacatttccatcagctacgctgaaaatgccaagtgtgatgtccccgccatgtctgacggcgtggagaagagcagcaagcgcggaatgtttgccagaaatgtagcaaaactgacactggacaatgtgaagattgaaggacaggtcggagaagcttacgaactggaaggtgtggatgaactgatcagacgttgatataatgagcgcaagagagccagagggagcttgctcactctcggtgaacggcgaagtgattgagtgataaaatcacgaaataatgagcgcaagagagccagagggagcttgctcactctcggcgaacggcgaagctgatcatgatagctgcgaagcaggatgtagagtgcgatagcacgaattcgtgagctcgcgttataatagagataagcagaagagaatacggcccaggagccgtgatcggaatggaggaaaatatgcagttaggaatccgtttacatgatacgaaaaagcttccttttgaggagcgtattgccaatgtacatgagttgggctttgtctgcggacatctggcccccggtaaggtgatcagcgagttccccaccacggatgaggcgctgaccccgggacttgccatgtacatgaaaaatgtattcgcaaaaaatcaggtggatgttgcggtattaggatgctatttgaacctggcaaaccccaacccggagcagcttgcgaaaattacccaccgttatatggcacatatccgttttgcttcctggctgggctgcggtgtcgtgggaactgagaccggtgctcccaacgagacctataccgcggttccggaatgccacggagaagaagcattacagacctttatcaccaacttacgcccggtagtaaaatacgcggagcagatgggcgttgtcatggccatcgagccggtatggaagcatatcgtatacaaccccgccagagccagaagagtgctggatgagatcaattctcccaaccttcagatcattctggatccggtgaacctgctggattactgcaattacaaggatcaggtggctatcgtggatgaagcaatcgatctgctgggtgaagatgtggctatggtacatctgaaagactttattcccgaggacgggaagcttcgttctgtaggctgcggtctgggacagatggattatacttctgtactgaagttcatgaaggagcgcaaaccctttatacatgcgactttggaagataccacaccggaaaataatgtgcaggtgaaaaattttattcagggactctatgacaatctgtaaagatgtggtatactctttcgagagtattcccagtagattggtaggaacagtgaattatgttaaatgaattttccagaacagaattattgatcggtaaggaggctatgcagcacctgtatcatgcgagagttgctgtgttcggcatcggcggtgtcggcggttatgtggtggaggctctggcccgcagcggtgtcggagccttcgacctgatcgacgatgacaaagtatgtctgacgaatatcaatcgtcagatcatcgctaccaggaagaccatcggcaaatacaaggtagatgtcatggaggaacgtgtacactccatcaacccggaggcacaggttacagtacacaaatgtttttatctcccggagacggcagaccagtttgattttacccagtatgattacgtggtggatgcggtggataccgtgactgccaagctggagatcatcatgcgggcgaaggaggcgggagttcccgttatcagctgtatgggagccggcaacaaattagaccccacgcagttccatgtggcggatatctacaagactaccatgtgccctttggcgaaggtcatgcgcagagaactgaaaaagcgcggtgtgaagaagctgaaggtggtgtattctacggaaagcccggtgaagccgctggaaaatatggaaaacagctgcaagacaggctgtgtctgccctccgggtaccactcataaatgcacggacagaagagccatccccggcagtatttcatttgtaccgtccgtagcgggattgattctcgcaggcgaagtgatcaaggatctgattgcagaaaaagcatagcttttttattaactgtgcggtataattctattatgcatgaactgttaaaggtacaaaggaggttgctttatttatgacagaagaggtaagcaaagaacagatcaaaggggaaaatgggacaggtattgatgaagctaagcgcctgaaggagaaaaagggagctaacatggtagtcaagatcctggcaatcgtactggtaccgcttatagcgatcgcagtcattgccatcctggcattgaattccgcaggggacagaatttccgacgcaatgatgaagcatgagctggcagcgacggaatatgcattggaaatgagcctgaacaattccactcccggggacttttcatacgagaacggagcactttataaaggggaactgaatcttacggacaataagcaggtactcgatgctttcaaacagaatgccggtgtggatgtggcactgttctggggcagtgatctggctgtgaccaatctgaccggaggtaccatcactctgagtgaaaaagtggcttccaaggtactgggtggagaagtctatttttccaattccctgaagctgggggataccggatgctatgcatatctggcacctttgaagaataccgacggcacggttgtgggtattctggctgcctgtatgccggtaagggaagtgaatgcgctttacaaagggattgtaaccggaagagcaatagcgattctgatccttgtgacagcattctgtgtctccacctttattgtagtaggcatgatctccaaagcactactgggtgtagtaggtaatctggatcagatcgcagagggtaaattgaacttcaaggttcccgataagctgttaaaccgcagtgatgaagtaggtaagagcgcacgggctgtatactctgtagtgaacggcttttccggaattatcagggatattcacaattccatgctggatatgaatgagtttacgggaacgttcaccagcaattttgacagcatcggacagtccatttcttctgtaaatacagctgtgaatgagattgcccagggagctaccacacaggcggcggatacccagaaagtcagcgaaagcatgaacgagatgagcaatgcactgggccgtacggcagacagtgttaatgctttgagcagcagtgctgccaacatgaaggagagcaatgctaccgtggacagcaccctgaaggaactgttggagatcagctctcatacacagcagtcggtggatcaggtgcaggagcagaccaatatcaccaacgagtccgcacaggcgattcaggcagctaccgatatcatcgcaggtattgcgaaccagaccaacctgctgtcattaaatgccagtattgaggcagcgagagccggcgagatgggcagaggttttgcagtcgtagccgaagaaatccgtggtctggcagaccagtccagggaatccgcagacaagatccgtggcatcgtagagaacctgatcagcaactccaatcagagtgtagagatcatgaacggtgtggtaggcgagatccatcagcagaacgagaagctgggtaccacgctgaatgtcttcagcaccctgaaccaggaggttcagaaggtagtcggtgagatcaatgtgatctccggcgagctggatcatattgagaattataagacggatgtggtggagaagatcgacggacttaccgagatctcccagaacaatgcggcaagcaccgaagagaccgcagctaccatggatcagctggcggagatcgtggaggattgccgacaggctaccacacagctgaatgaaattgcgggttcactgaatgcaaatgcgaagaaattccagctcggataagatggaacggagcaaatggagaaatgaagaaatgaagagaggcactgttacagaaaaaactgtggcagtgccctttttggaaaggagacagccagtggaggatacctcaatattggaactgtattgggcgagggacgaacaggccatcgcagagacacaaaagagctacggaaaatactgctatagtattgcttatcatatcctgcatgacagagaagataccgaagaatgtctgaatgatacctggatgcgggcttggaatgcgattccaccgaaaaaaccgaatcgtctggagctgtttctgggaactattacccggaacttgtcgtttgatagatggaaggcgaaaaatgcacagaaacgagggaatggtattatggatacgacactggatgaactggcagagtgcattccggcggcgcataacacagaagaagccgtggaagcggcggaactggagcggagcatcaatgcgttcctgcatacactttcggaacaggagtgcaatgtattcctgcgcagatactggttcgtagaggaatatgcggagatcgccgggcgttatggaatgaatctgaatacggtgaagacatcgctgttccggaccagaaaaaaactgcaaaaatatctggaacaacagggaatcgtcttatagacggagaaagagacgaaagcggtgatgaaggatatgagcgattgtaataagaacaataatcaagatgtgaatttaaaagaagaaaaactgttccgggcgatgtccggagtggatgaggatctgttgcttcgaagcgaacagatcagaaattcgggaagggtacataagttcccgatgcgctatgtgacccgcattgcggcagcctgcctgtgtttcgtggtagcgggagtattgtatatgacaatgagcagtaccaaaatggcagacagtaccggcaatgcggatacggcagcaccgcagatggcctacggtatcactgaggatcaggagatccaggaagaggcggcaatggcggaagcggaggctgctatgccggagagtgaggctgcggaggatagtgccaatatggctgaaatgacagactctgcttcgacagacagcggacagcaggcagcatccgggaacagtatagacgggcagaaacagagcggactggagagcgcgttatccgtcagcggtaatgaaagttcacaggacagtacagaggcggccccagaagaggatggaattcttaaaaagaaggaaagacaattaccgaagaaaatgacagtgaaaggacaataaagcaatgagtacgatagagaaacacgacatgacccagggaaagatactgttacccttagtatcttttacaatcccgttggtactggggaatctgtttcagctgacctacaatgcagcggactccgtcattgtgggaaaatatgtaggagaacaggcactggcggcagtgggaacttccactcctattatgaatatcgcaatcctgttgatcagcgggatgtgcatgggagccagtgtgttgatgagctcccagtacggagcgaaggattatgatactttatccagacagatcagtacgacgatgttagctggctgcgggttttccgtagtgttttcactgttgatgcttcttctggcgaatccggtgcttcgtctcattcgggtgccggagacagccatacccgaagctgcggcatatcttaggatcattttcatgggcctgatctttacattcatgtataattttctggcaaataccatgcgggcgctgggagacagcaagacgccgctgtattttctggtgaccagtgctttcctgaatatcttcggagatctgttttttgttgtggtactgcgctggggtgtggcgggaagtgccattgccacagtgtgcagcgagggactttgttgcctgctgtgcggtatatatattaagaaaaagattcctcttttatgtcttgggaaaaagtggtgggtattcgataagagcctgctgggcaagacagtcagctacggcagtaccagtgccatgcagcaggtatgtctgcagctgggaaaactgatcatacagtctgtggtcaatacgcagggtgttgcggtcatggcggcatttaccgcagtgaaccgagtggatgattttgcctatacaccacagcagaatatcggacatgccatgacgacttttctggcacagaacaagggtgcagggcataaggagcggatgaagaagggattccagacaggtcttttgatcgaactggtctattccatcggattgttctgtgtaatctggggactggctccgcagatcatgacattgttcgccgaggacggggatgcacaggtggtatctctgggtatcagttatctgcatctgatctcctggatgtatattctgccgggattgaccaatggtgtgcagggattcttccgtggtattggtgatctgaaagtgacattgtacagcacatttatgaatatgttcggcagagttgtggcagtatttgtaatgatccgtctgttacagatggaatttgccagcctggcctgggccaatatggtcggatggatcgtgatgctgttgttcgaggtgccgctgctagtgaagtctatgcggaacggcgagtgcggatagaatgagcatgtggcggacggtcgcgggagacctcgggaaatgccgcagagtcttggcaattgggggcgtaaagcagtgtcgaaagtctgggagcggatagagttaaggataggaaattttacatgaagtatggaaagatcgtagagggaaaattcattgaccgtcccaaccggtttattgcccatgtggagattgcagggaaagcggagacggtgcatgtgaaaaataccggaagatgcagggagcttttgctccctggggcagcggtgcgtctggaacagtcggataatccggcaagaaagacattgtatgacctggtggctgtttataaagacaggatcggctggatcaacattgacagtcaggcaccgaataaggtcgtgaaggaatggctggaggcgcaggactatgatgtggtcagaccggagtatacctatggaaattcccgcattgatttctatctggaaaaaggggagcacaaaatactcatggaagtgaaaggctgtactctggagatcaacggcatcggctattttcccgatgcacccacggagcgtggggtgaagcatctgcgggaactggccgcagcgagacaggaaggatatgaatgtgtggttgcctttgtgattcagatggaaggagtgacggaagtacgtccttatgtggaaatgcagccggaatttggtaccgctctggcggaagctgaagccgctggggtgaaggtgttgtttttgccatgcagggtgggtagagactggctgaagatagatggaaagttagtaaagaaatgctatcaaatccccgtagcccttggcaaggtataagaaacgcggcacgctcgtactttagtacgatgcgctcctgtcgcagagcgtagcggtacataagcggtcacaatacgaccgcaatgcgtcccttgggacgctatggtaccgacgtctgcttacggcactgcttattcttatacccagccggggctactggttttttgaaagctttccaaaacgcagaactcccggcgtatgcggtgccatgtcgaagatgtttgtcggaggatgttgatattttctagaaaagtgctgaaaggcagggggaaagcggacatgatgtccgcgtcagccgattgtcgacatggatgtcgactgtaggcggccccgtcatgacgagaactactcatcacttttcgtagaaaattcacatccggagaccttacatcgagacatgtgtatcgcatgctccgggagttcgtggattttgccaatgtatttaactaactttctatttagtcgttcaaagccatgtctttcaatttcgcaaacaaattccgtaccggcttagcgcttaaaattaccagagttatggctgcttcagagaagatatagatagcattgtaggcgagggagtaaggcaggggatcccagccttcccaggcatagtagccgaagaagatccatccggagatcacggcaaacacatatcttccaagaaccccggcaatatatcccttgatcagtcctagcttcgcattggagaagagaccggacagtcccagagcgccgaaagcaagaagatagtctaccaccagctgcaggggatataatacatagggatctatgagcagctgcaggacaccgtaggctacacctgtggcaataccggcacccagaccgaaccagtagccgggcaggcagatcaccagcatggaaagcaaagtaatggagccgccggtaggaaaatggaacaatttgatattggaaagaacggttcccagggcaatggccatggcacagaatgccagctgtttcacggtgagcttgccgtgcttcatcctggaatcaccatcggaagaagcgggagctgccgcagtctttttcatctgcatgcgggcaaataaaacagcggccgccaacagtgcggccagaatgatcaccaacaggacatttcccagggtagtggggatataagtagtctctccccagtcattggtaacagcagtgtacaacataaaaaaatcctccttcgtgtgtgcgaggagggacaacatcgtattcatacagataaactctctgtatgaataatgtgcttccttacgccggtattacccggttcaagtagtgagggttagaagcggagccttgacggcggcacttcaatctcagcgatgtgctcccctagcggatattctatttacctgtttactatagtgctttatcgtagcagtgtcaagcgtttactttcggaatgccccggggaatttataaaaaagttttcaacacctgcaacactccgttttcccaatagggcgcacaggtatcccttgcagcggcaatgacttcctctcttgcattggaaacagcatagctcattccggcgctttgcagcatttcgatgtcgttcagattgtctccaaaggtacaggtctcatctggcgcaatccccaaatattcctggagaaaacggatcgcagaccccttatttaccccaaggggattgcagtccacccattcttttccggcagaagcaagcttcgcccgggactgccaggtgggagtgaagacaggtgcacacatttcttcacaggcggaaggatgatatacagtgaacttgatcacattgtccacgggcgttttcataagatcggcagattcccggatgtcatatccgtaggaatccgtaagccaccggaacatccggcttccagcatcttccgccaggcaataatccggtgtggcaataaaataatcgcagtccggtaattcattccggactgtctcacacatgccgtgccagatctctttgggtaaggtatgcacctttaaaatttccttcggtgtgcggaccacggtaccgccgtcggtgatatagaggagcttgtcgcggatgggagcaaaaagcttccgctcactgataaattgtctgccggaacaggcaacgaaacggatgccttttgcaatcagcttttcaatgacggtcatgtattcaggatccagcatcagagtgccgtccttcaatagcgtgccgtcaatatcggttgcaataagtttgatcatagtgcctcctgaatcttacatttcattatatcgtgagcacagctcactcaatgcatttcgcaaaatc

SEQ ID NO: 5736 - DNA, 371 bp, Unknown
  gut microbiota DNA sequence
gaggctagccctaaagctatttcgaggagaaccagctatctccgggttcgattggaatttctcccctatccacacctcatgcccacccttttcaacggatgtggcttcggtcctccattgtcttttacgacaacttcaacctggacatggatagatcacccggtttcgggtctgcgtatactgacttaacgccctgttaagacttggtatcccttcggctccgcaccttaagtgcttaaccttgccagtatccgcaactcgccggaccgttctacaaaaagtacgcggttgttcatttaaagaacttccacagcttgtaaacacagggtttcaggttctctttcactcccctcccggggtccttttcacct

SEQ ID NO: 5737 - DNA, 180 bp, Unknown
  gut microbiota DNA sequence
gcctgcaagcaggcgaatcgtccctacggtaatgagcaatgcatctcgtaaacgcttcgcgtttccttcgatgtcgggcattcgccctatcaaaccgtaatctgacgtctctgcctgcaagcaggcgaatcgtccctacggtaatgagcaatgcatctcgtaaacgcttcgcgtttcctt

SEQ ID NO: 5738 - DNA, 14257 bp, Unknown
  gut microbiota DNA sequence
cattatttttctcttcgtcagaaagagctttcgagagcacgcgttcgtgcaaagcatttaactgtttttcaaattcttgttcgttcattacaattctcctttgtatgtaaaaagagccctggaatacaattccaagactctttcgcgaccggacaccagtcattcgctaattagtggaataataccattatgtgcaagccttgtcaagttattcctaaaatttatatttttgaaaaattgcaccggtgcaacaacatcagagtttctcgaataccatagtagcctggatccggtctccgccgccgaagccggtactattggcagaagcggtggtaatagtgtggtgcaggcggtatccctttgcagcctgggcgttgatcacatcctcgagctccttcagattcttggatgcagttccgataagtttctccttaagtgtcacttgtaatactacatactgattcatagtgattcccatttcttttgtgcgccccgatctcgatcatctcttttacaaactgaatgtcctccggcttcactttccgtgaggcatcgaagaggaccttgtattccggattctcgaagagaaactgagccatgtcacgggcttctggattgagataatagctatccggaataatttcagtagattctttttttccaataaggtaattcatgtcgacattgagtaaatcacccatgaggtgtttccttccaattaaattagtagagctgcactacaataattgtagaaaacatatgttcccgtgtcaagaaaaaaagcagcattttttgacctggaacaattacataaaacccaaaattaggtttgactttcaagagatcttgtctaagcagaatgatgctttgttgataagtacgtgaaagaggtgtgtgcggatgaccaattataacaaggtgccccgggagactgaataaaatagtgaatacctccgatatacatgatagaacaggtagacccggaaacaggaacggaggcgcttatgcaggtcggtggagtcggaagcggacatgacacatattctcatcatgtaacatcatgtcttcatgaacatggggcaaatacggatacgggcagtatgggggctaagtccggagccgcgcagacggcgcagatggctacagaagccttgcaggagaattctaagggaaacctgttgtcctgggtacagaatattgggaatagtggaaaacagctcttacagaagatctggggagacagcaaagaatccaatgacgcgataagttcacagaaggatggcagcggtaatcatatcgcgggtcaggagacgcttgttacgggaaattctgtgggcgtgaagactacgttgaacagggcggcggtggagacggcggctacccatacgtatttccggcctgtggaagcaaaggatgccatgccggcgaatccttttcagaaagtgcgttatcaggtacagaaggtagccagaaaactgatggaccggctgccgggacgattcctgggatcccatagcggagatttcctgcagacaaagcaacagcatactaaagaggatctgcggaagagaagccagtacaaagaggacgatcaggagatcgaatgcattcttacggatgaaagctacctgacagattcctataatcgaaagggagaatacagccatcttactacggataaataggatgtggtggaatttttcgaaaaatttcaaaaattttcttgacagtttggcattcatcatgtaatatagtctttgctgtgagacacacagcagacattcatcagattgcggatgaatgtcaacacaattaatttcataccttcaagatacaggttttgacctgtacattatgcgcgagtggctcagcggtggagcacctccttgccaaggagggggtcgcgggttcgatccccgtctcgcgcttgaaaaaagaacgataccaaatcggtatcgttctttttttcgagccctgccagggctcgaaagttcgatgtctacgctccgctccggtcagcacttctttctaataaattctgtgtttcacaatacctgtgtctgatcgtacagtgggtgacataatatatcggggtttgtatttttctaaaatgatgaatgggaaagccactggtgactttcccattctattttctattctactatgatatgtaacatgccattttcatcttctgttactattgttccacccaattcaccattttcatacattcttaataatatcctgttttcagccatacgatattcctgatggttggctcctgtgaatagggaaccatcaggtaagtaatctcctacgtggaagacttctccatatcgtggggagccttctttcatgtaaacggcatagctttcttcggaacctgctcctttgccagtgtcgtaaacccagcaccaacctatagttccatctgctccttgagattgtgcatatcccgtccacggttcataaccaccatattcttctgtcacttcattaaattcttgttttccaagggcaaaggcgatgtctccatctatgttggttgccttgggatctacatcctccggatttacatcaggataaatgatgttctcggcaatttcatccattaaactaccatcacctgctacatgataatacatgaatgacattgtcgtaaataatctgaccgcttcaccttttgtaattgctgcatcccaatcttctaagtctgattctgaaattaactccatattagtagctatttcaaatgctttatacatatcagatggaactcccttaccaggatcagagattgcatctgaaaaactgatgtctcctgcatcggatacggtggatattactacatcttcaagatagatgttgtttttaaaaccatgtttatccatatatgtctggtagtcttggctataatagtttgctaacagataaatgtactctcctcttgacattgctgacgtaaaagtctcttcatttaaaccagtcgaagtattcacataggcatattcatccattggtgcggcaaaattggtatattgtgtttctcctacttttgctgtgaagtcactgtctgtttctggtgcctgtgcttcatttacctgagtcattgctctcattattaacgtcattgcctgtgctcttgaaagggggacatctccatcaaactgtctttcttcttggtctggaagcaattcaaagtaggcattgatcgttgcatagggagcattcgcataatctgcatctatatctgcataatattctattgacatttcaccaagctttaaaacagacgacagtaccatcatatagcctcgaaagtattgattttttattgctaaaagcaacgtgatattctggtctggctgtgttgttaatggattcgtgtataagttaccctctttgttgcctgtggttcctgttacttctacatattcctcaaaggctgctcttaactccggatgtgtttctaaacttgagagtggaatccaggggagtgactccgtttttgattcttctgtttctgtttcctccggcactgtggtttctgcctgtgcggattcaacagtagcagtgatggattcattgccggatgtggtttcctgcttgccacaggaagcaaaagataaaatacatacggttatcaaggttaaaatagttgtttttttcatgagttaatgttattgtaccacagaatggggaataacgctataacgtttattatgtgtgatgcacatgaccgcgggaccagactttactgggctgggctttgtaggtggggcggcggaacaggaggcttcggagagccgggccgttaaaaggaaagaggggccagaagtagctgaagcccgcgaaggtcggggtagtcaaaatagagactgtcaccagtgtcagaccgataaggaatcccggcaatccccagagccctgttgtgacgaccaaaagaatacggtagatccgcagagcatcagcaaattcgatactggagagggacagattcgccagcatggtgacggcagcatagaagaggacttccgtggaggcccagttaagactgacagcaatgtcaccgattaatagtccgccgacaatggacagagcaccggagacgcggctggagctgagtgccgctgaatacttgaaaagatccagcaggaactccaccgccagcacatagaaaaaaaggcggaagggtgacagatcgctgacgggtgtgagctgtagcgaggcagtaatctcgggatagtaggcggagagaagtaaaaataccggaaggagtaggagactgaccggaatgcacaggaaacggatcatgcggaagtaggttccggtcagaggattgttgtaatagtcctccgcactctgggtaaattggaagatcgtaccgggaagcagcagaacggcaggggagttgtccacgatgagcagaatatgcccttcgcacagatagctgcaggccacatcgggccgttccgtcagctggatactgggcagaggattccaccagcgttttttgatcaggagttcttccagacttttgctgcccatggtcagggaagtgatctgtaattgggaaagctttttctttaaggtatctaataattcctcattgacctgatccgccagataggcgatagctacatccgtgcggctttctgcacccagagaacagatagagaatgtcagtttcggagaacgcaccctccggcggatcagattggtattgaacaacaacgtctccacaaaaccgtcccgggcaccacgggtgatccgttcggtgtcaggttcggaaatgctgcggacaggataggtacggacatcgatgatcacggcctgtgcaaaaccttctaccagaaggacagaggggccactgagaatattttgcagaatcgtatctatagaggaagtcagtgacacctgggcataccccagtttgctctgcacatagcgagggagatcccggatttcggaatccagtgtatagagggggtcctgcaagtcggaaaaaatttgttgaaggatctccgtcttacaaaaaccattgacaccgatccagtaagccggcgtatttcccagcttcaggtcacgggtgatcaggtcaaaactgtcatccagtggcagcagagcgtggaaaagtgctgtatttttggatagatttgtggataaggagcgttgtaccatagtggggaatcctttctgatcacttgcatagactgccaaacaggtatatggtattattattcagatagattccccaggtttttcggaactatacggatcagtggtataattgacacaaccccagcaggatcaacaataaacctgagacgggatccgtatattccccgatctgctgcaggaaagcagacctgcccagacggcttccgaaagccagaaatccgaaggagcagaaaaaggtggacaccgatgccggaaggaaaggaagtcccgtaatactggcggagaaaccgatgccgatattgttcatggaaagggcacagcccagcgccagtatctgcgacagggataattcccggtgcccgacaaattttttctttttctggcacagattattatccggggaaaaattgcagcaccatctggaaagcagccattttcccacgtagtaaaggccgaaaaggatcagtacactgcttccgatccgggtaccgatgccgatgggaaacaagggtaacaacaggttgccaagacctatagagatcacagtcccgatcagggtgactgtgctgatcagcagattatgtctggtaggcagagggactttctggagacccagagccatacctaccagaagggcatccagactggctgagatgccgaagagcagagggggcagaatagacataacatgctccgtagaaaatattcttaattttactatattcccctgaaattattttgtgaggttgtggggcaaaggaacaaatgagtatggaagtaaagagaaaactgagtgaattcctaaaaagagagacggttctgactgtagcgatcctgctggcaatagtgtccgcggtgatgattccgccggacagagaatatgcaggatatattgatttccgcacactttcgatccttttctgcctgatgacggtgatggcaggcttgcagaaactgggtgttttccgtaatattgcaaaaacgctgttgcggcatacacagaataccatacagttggcagaggtattggtacttttgtgtttcattttcagtatgatcatcaccaatgatgtgtcattgatcacgtttgtaccgtttaccttcattgtgctgcggctgacaggcgaagaagctgtgaaaaaactggcagtacctgtgatcgttctgcagacgatagctgccaatctgggaagtatgctgacgccgatcggaaatccgcagaatctgtatttatatgggaaaacacagatgtccgctggaacatttatacttttgatgctgccttattctctggtgtcactgcttttactgatgatctgtgtggtaattgtggcaaaacgaagcggaatcgaagtccggggagcagaagttttgctgacagaagatgagaagctggaacaaaagaaatatttacttccggcatatttgctgttatttgtgttgtgtctgctgactgtggctcatatgattccttatccggtgacattgggaactgtggcattggcggttctccttttagatcgtggtactcttataaaagtggattattcgcttttgctgacgtttgtgggcttctttatttttataggaaatatgggaagaatgcctgctttctgtgatttcctgcagaagatcatcggaggtagagaagtgatgacagccgtgattgccagtcaggtgatcagtaatgttccggcggccctgctgttatccggatttacggaaaatataacggcattgatcatcggtacgaatctgggagggctgggaacgctgatcgcatccatggccagtctgatctcttataaacaggtggccagacagattccgggagagaaaaagaagtattttggatggtttaccatagcaaatatcgtttttttaatgatattggtattggaaaactgtctgctgtaactatagaaagcagtctgtctgccgggaaaggcagaaaagatggcaataactaaaaaataatctgggaggtattcgtcatgacagaagatatgacaatcattgcagaagaggcttatctggcggccaaggagatcttggaaaaggcgaggctggagcagggagagctgtttgtggtaggctgttctaccagtgaggtgggaggtgctactatcggtacctattccagcccggagctggcggagatggtcttcggcggtatttaccaggccacgcaggaagccggggtatatctggctgcgcagtgttgtgagcatctgaaccgtgcactgattctggaaaaagaggctgcggtaaaatatggttatcccatggtaaatgtggtacctcagcctaaggcaggcggatcttttgcgacggcggcgtataaagccttcgagcatccggtggctgtggaacatattcaggcggcagcaggaatggatatcggggatacgctgatcggaatgcatctgagagatgtggcagtaccggtgcgcctccggtccggacagatcggagacgcccatgtggtatgcgcccgcaccagaccgaaattcattggtggcggcagagcggtttatgacgaagaattattgtaaagaaatgatatgtggctatttctgtggcattccgcggaagtagtcacggatccagcgtccggattcattgaaatcatcgtcggtccagtcggaaagtgccgtgctggaagccttgaagacgctgctgctttcgtctttgttggcgagattccagcaacagaagctgatctggtacttgttcagcagatccagccatttggtggtggaaacaaaatcattggcaccattgccggaggcatcgcacatgccaaattcgctgacaaataccggaagcccgttctgaacacaggtctctaagcggttccgcaggtcgtctttatgggtgcctgcgtagaaatgcagcgtatacattacattgctgtcatccagcggagaagcggcagccttgtcgatctcctgactccaggttggtgttcccacgagaattacggcatccggcttctgcgcccggatcaccgggatgacttcttctgcgtaagacttgatgctgtcccaggaagtaccgccgttgggttcattgcagatctcatagagcacattgtcgttgtcggcaaaaacttccgccatttcccggaaaaaggcgatcgcctcatctttgttctggttcggatcacagtcacttaaaatatgccagtctacgatcacgtacattccaagctctgtggcataggatacaccgtctcttaccagctgcttcagctgttctttatcaccgccggcacaataaccgccgtattccgctgtatacatggcgaggcggatacagttagtattccagtcgtcccgcaaggtacggaaggaatcataattgatatactgggggaaccaggcaattccgtgggtagacatgccgtaaagctgaacggtgttgccgttttcgtctgtcagcttaccgttttctacatggagagcgccgtgctgtccgaagggcgtggaggcatccacggagagtgcttcggaagatgggggttcagtttccgcaggctgggcttcgactgtttcggggacggatgtctgttcgggagcggttgtgctttcggagatggtttcggtgatggcagcggacgcttcgggggaagcagatgttgcggcttcatttgacgtatcctgcctgccacagccggcgagagcacaggtgcctaaggctgccagtacggcacagctgagtgtttttctgaaaatagacataataacctcttttcctatttgtttgagaataaacgaatgaaaatacaaacaatgggttaccttttaaaactaaaaacaagcacttacaacaaatattataattgtgtctgtgtagcttggcaagaaatgattgcccccgaataggagctgtgatacagttaatgggaacagagttcggaatagaggacagagatggaggaaacttatgcttccgcagtcatttacagagagaatgcagggacttttggaatcggaatatgaagagttcctggcaagctttgagcatgaaaaatatcaggcattgcgtctgaatccgttaaaaaaggatgacatgtctgtcataacagaaaaagttaagcagacttttcagctgcagccggttccctgggcggagaacggatattactataccaaagaggaccagccgggaaaacatccctggcatgaagcgggactttattatattcaggaacccagtgccatggcacctgtgacactactgtcaccacagcccggagagcggatcctcgatctatgtgctgctcccggagggaaaagtacccagatcgcatcagcgatggagggagaaggactgcttgtcacgaatgagatccacccggcgagggcgaaaatactctcggagaacgtggagcgcatgggcatccgcaacgcctgtgtattgaatgagacgccggagcacctggcggatattttcgaggaatattttgaccggatcctggtggatgcaccctgctccggagaaggaatgttccggaaaaacgaggtggcctgcgaggagtggagcccggagaatgtacagctctgtgcggacagacaggacgggattctggaatgcgctgcgcggatgctggtgcccggcggcagactggtatattctacctgcacctttgcttctgcggaaaacgaaggcagcatcagccggtttcttgcaatgcatgaggaattcgagatcgttcccattgataaaaaagcactggggatcccggagggctgtgacggcattccgggttgcgtggagaatcccgcgccgggaatcgaaggtaccttgcgcctgtggcctcataagctgaagggagaaggtcattacgccgcggtattgcagaagaagggaaagcttccggaggggtatcagccggtgtgcgcaacgggaacagaaaaaggaatccccgcaaagaaccttgcgaaggactgggcggaatattttgcttttgcaaaagagactttttcggagaagctgatgggggaagcgggattgtgtacggcgggagaaggatttctggcgttcggtgataatctgtaccgtatgccggagagaatgccaggggtcaaggggctgaaagtgctgcgtccgggactgcacctgggaaccttgaaaaagaatcgtttcgaaccggctcatgcgctggcactggcgctgtgcccgaaggatgtgaagcatgtatggaatctgtccgtggaggaagcggctgcttatctgaagggacagactttttccgcggaaggcgagaagggctggtatctgatctgcgtggacggcatcagcctgggctggggaaaactggccggaggcatcatgaagaaccattatcccaaggggctgcggaagggataacggatcacgacaataaggacagtttatatgagaacagaaatattatacgaagacaagatcatcatggtcatccgcaaaccggcaggactggcggtacagtccgccgggatcggacaaccggatgtggtcagcgagttgaaatcccatcttgcaaagcttcccgacacagggaggctgggaccgggaaaaggagagccatatctgggcatagtccacagactggatcagccggtggagggcgtgctggtatttgccaaagagaaaaaggcggcagcagctctgacgaaacagttatccgatggtacactgaataaacattactatgcagtactctgtggatatcctgctgttgcagaaggggagcttgtggattatctacggaaagagggcagcgtggcagtggcagtcaccggcagagagaagaattttccggacgcaaagatcgcaaaactgcattatagcattttggagaaaattaatcagcctatgccgctggcactggcagatgtctgcattgagaccggacggttccaccagatccgcgtgcagtttgcccatgcgggatggccgttgttgggagataccaaatacgggaacactacagtcgccggaacggcggggagtccggcatatcgcggcgtggcactttgcgcatattctctggattttacccatcccggcaacggcaaaaagatgtcattccgggtgaaaccgcagaatcctgcatttgaaaaatttacaaaaattccttcggaggatattttcgaaggataaaaaagcctgtccggcacacactaatcccaaaaaggaagtgtgcggcatggattggggagaatttggcaaaaaaataataggaaaaaagatgatagtactgcttctggtaacgggggcagtctatttttttctgcaatatctgacacctctgtcggcaccggtactgttggccatgctgtttgtcacaatttttgggccaatgatgaagcggatgaatcagcgtctgcattttcccagacccctcagtgccatagtgcttctcatcgtggcaacagtgttgttggtggggttactctggattctggtgtcctggatgctaggcagcctgccggtatggatcggcaatctggaactgcgggagcaggagtggctggaagtcgtccgggggctgtgtcgcagcgtgggagagattattggtgtggacactgcgtatctggaaaatacggtcagtggcagactacaggaggggctggattcactggaagaaaatattctgccgggaatgctttcccagtctatgcagtatgtgcagtggttcgcggagctgggaggatttctggtgacgtttttgatcgcttcggtgctgctggcgaaagactatgacggtattatgaaccgtctgctggatcaggaggcctgtcatgtacttctggaggtgatctgcgggatcgtccgttatattgccacttttgtaaaggcccaggggatcattatgaccacgattgccatgacagctgcggcaacattaggaatcgccggaataaatcatggtattttgtgggggatcctggcggggattttagatgcgctgccttttatcggaacgggcatcgtgttggtgccgctgggagtttttcagattttggaaggaaattggggaagagccattgtctgcggtgtattgtatttggtctgtattttcctgcgggaaatcatggagcctcgtcttatcggcaggaaaataggagtgtcacccatagccgtattggtgtcactgtatgcgggaatccggctgttcggcgtctgggggatcattaagggacccctgggatttgtgctcatttatgagacttatcacagtctcgcccggatgtttgaccgccagagggagcaggaacaacaggaatgagaaaagattgacgaaagaagtgtcgaaagctatcataaaagtattagacaaaggaagcttaggagagacggatctatggcaaaaaaaacaaaagggaaaaattctgtggaatcggtggcagaaacgctatgcaatttcagccggttcctgtgtgatatcgtgatcagcgtgtatctgtttgtgatattggctgtactgccgttgtacaacaggggctatgcccagatcggaacagacaaggagaatttttttattaagactatgacttatgcggggaaatgtctgcttccggtatttgtgttgtggctgatccttcgcctcattgtggcaaagcagaaacaggagcttccggaatttcggactattccgaaaagcatctggcaggctttgaacaccacggataaattcgctgctctatacgggattgccgtggtaatgtcctatgtgtttacccggtatcgggaggaggcactgtgggggacggcatcctggcggatggggatgtggacccagctgggagcggtcattgtatattttatgatctcacggatgtggcagagaaacgactggatcgtgatcctgacattgccggtgtcgaccattgtttttttcctcggatatatgaataaattcgggctgtgccttgtagataaggagatcatcaattcctcctttatttctaccgtgggaaatattaactggtattgcggttatctggtgacggtgctgttcggtggagtttatctgttatggtggatgggatcggagatcacttggaagagagcgctgctgatggggtatgtgacgatcggttttgcttctctggtaacccagggcagcagcagtggtgttgtaactttagccgtaatgctgtttgtactgtttggcatgtctgtgaaagatggcggaaaaatggaatgcttctggcaggaaatgacattgttatcggtggcatgtctgatcacatatattctgcggagctgcaatgtgctttcgcaggaactgccgatggaaaaagtgacggatatcctgacgttttccgcaatgagtgtgattatgacgatcgtgtcagtagtggtgctgtggctggtacataccagcaataacagaaatcattaccgtgggaaacttttttggggcatctatcggatattgtgcgtagcactgccggttgtgagcgtggcattattagcgtttattctggcgaatacgctgttgggcggaaaactgacgtcctttctgacggagacggcaggtgacgggggcagcaactggctgatgttcagcgcggcctggggcagcaacaggggagccacctggtcggcgggagccagctgcttctgggaagcagatctgttacataagattttcggcgtagggccggattgcatgtatgcgtttctgtcaaatgaggccagcccggagctgcaaaatatggtgtatgatttcttctatggaaaccgcctcactaatgcacataatgaatggctgacgatcctggtggatataggagtgctggggctggtcagttatgcgggaatgatgatctcagtaatccgtaatttcctgcatgccgggaaaaagtcgatgctggtgggagcctgcgggttctgtgtgctggcttatacggtgaacaatatgttcagcttccagcaggtgatgaatatttcgacggtgtttgtgattatggggattggagagaatttgcggcattcagcccgtgattgaaccagcgaaagttgaatttatggtctccgcttcggtcggtccaggccgaggtcccccggacctcgtggg

SEQ ID NO: 5739 - DNA, 2801 bp, Unknown
  gut microbiota DNA sequence
caaagccgaggtccactggacctcgtgagccctctgcgcccgaacggtgtgttcgtgtcgactagaggttataagttagaacaatgtggagacaaaaagactccctcacacatgtgtgagggagtctttttagtcgtcgcgacaagattcgaacttgcgacctctgcgtcccgaacgcagcgctctaccaaactgagccacgcgacgatgtgaacattaattgcgtcaacattaaaataataaataaaaacccattgattgtcaagcaaaaaacgaatatgatagaagaaaaagttgcaaaaacgataaaaccacgaaattaagagaggaaattctatgtacaatacaacggtaacattgaaaaaaggagagggcagaacactgaaggctggaggaatgtgggtattcgataatgagatcgcatccatcctggggacgtttgagaatggcgacattgtaaacattcatgattttgacggctatttcatgggatacggttatatcaataccaattccaagatcacgcttcgtctgctggcgcgcaggaaggatacggtgatcgatgaggcattttttgagcagagggtgcgggatgcctggaattaccgcaaggagaccattgatacctccagctgtcgtctgatcttcggagaggcggatttcctgccgggtattgtcattgataaattctcggatgtactggtagtggaatctctggcattgggaatcgataagtggaagcttgtgatcattgatgctttgaagaaagtactggcggaggatggcattgtgatccgcggtgtctacgagcggagtgatgccaaggtacgcttacaggagggtatggagcgttataaaggcttcatcggcgaaccgtttgacacgaaagtagagatcgtggagaacggtgtgcattacatggtggatgtagaggacggacagaagaccggatttttcctggatcagaagaataaccgtgccgccattcatcgtttctgtaaggataaaaaggtgctggactgcttcacccataccggctcctttgctttgaacgcgggaatcgccggagcgaagagtgttctgggtgtggatgcttcccagctggctgtggatcaggcaacagaaaatgcgaagctgaacggactggaaaatatggtaagcttccgatgtgcagatgtcttcgagttattgccggagctggaagcgcagggcgagaaatatgatgtggtgatcctggatccgcccgcttttaccaagtcccgcaattccatcaaaaatgctgtaaaaggatatcgtgagatcaatcttaggggcttaaagctggtgaaggacggcggattcctggtaacttgttcctgctcccatttcatggatcccgagctttttgccaaaacaatccgggaagcttctcatggtgcgcataagcgtctccgccaggtagaattcaagacacagggcccggatcatccgatcctgtgggcagcggacgagagctattacctcaagttctacatctttcaggtcgttgatgaacgctagatatccgtctggagaagtaagcggctgaaagtggcggaaatgcttgatttacaagggttcgaacgtgtttggtgataagcttgcaaacctcgtaaagtattgcaaaatatcgtatcacagtggtataaagtggtaagtctgagtggtaactatgaaatgataatgatatcggaaaaggttatatgttcgctcttcattatgttaaaatgaaacatgaattaacggcagactaacgacagactaacgacagactaacaatgatataattgtaatgccaaaataggtgtgatattattactatggcaatcgaaacagagatgttccggttgctttttttatgccatgaaagggtgaatttgatggaattatctatgagagagaaagagctgttaattagtgtctgctgattaagtatctatctgcagcttccagctcttacatctgttccagtcatgccagaagcggaacagatgcaaaagagcgtaaagtattcgccgctgaatcctgaacagattcgtcacgaatacagataatgcgatagaagtcaactgcgtttcttccagttttgtggtaatgcagctcataccataacagcgtttgatcagacttaaggtgcgctccacttcgattctatcggtattatcctgatactcctgtttcttatcaacttttgttgtagcgcttggtctgcccagctttggacctgataaccggattccatgttccttgcaatagttcctggtttccctggtccggtatatctgatctgccaggacccgttccagataataaccggtacgctctctgaatcgttctattgcttcaatcaggcaggtgctctcgttgtatgcctcgaaagatattttttcgatacgcccataaccttcgctgtcaagactgagatcaaattttgcaccaaattcaacaggtgctttgaccttgtgcttcctgctcttagcaaatgcaagatactcttttctggcacgtttgcgatatcttcttggcaacttaagaccatagcacttacaaaaacagtaaatcatggtctccagtttttctcttgcttcattcaaaagtgagatatcctgcggataacgtatgtttgcaggcgcacaggttgcatcaaaggctggttgaaatcaaggaaggaatgctgtaaagtcagtaaaatcaagtgtttgcaacttaattgaataaattttatttgaaatacttgacagaaatagttaaatgagttagtgtataactataagtaatgacat

SEQ ID NO: 5740 - DNA, 212 bp, Unknown
  gut microbiota DNA sequence
cagcccaagaccttccagaatcacctgtaaaagcattacttattcctcctgtatccgttttcatcccgatattcgggatgttcctttgcatacgggtcttgatcgccgcagatggtatagtcacaccggcagccgtccacgcatgtggtcgtccgcaccagccttgcgtggagcagctccatggacgcatagtccacattgcacagggcggg

SEQ ID NO: 5741 - DNA, 5014 bp, Unknown
  gut microbiota DNA sequence
cgaaggagacggcgaagattttcctggatatgggattctacttcggaatcggcggcgtgctgacttttaaaaatgcaaagaagctgaaggaagcggtagagtacattcccatggatcgcattgtattggagacggattgcccgtatctggcaccggaaccgaaccgcggcaaacgcaacagttccctgaatattccctatgtgatcgctgccatggcacagatcaaggagatcacagaggaagaagtgtgcaaggcggcatgggacaattccctgaaattgtatcgcatggataaataaccgggtaaaaagaaatggaagcaagcaaaacaaaactattttcaaaagatgatctgaaaaaactgatcatcccactcttatttgaacaggcactggcaatcactgtgggcatggcggataccgtcatgatctcttcggcgggcgaggcggcggtctccggcgtatccctgatcgatatgttcaataacctgatcatcagtgtgttggcggcattggctaccggtggcgcggtggtaacttcccagttcctcggagccgggaaaaaagaggacgcctgcaaatctgcaaaacagttgatcgtgtcatcggtatgcattacgatcggtatatcgattttggtcatggtgttctgtaatggcatcatttccctgtttttcggtaaaattgaagcggacgtatttcataatgctgtgatctatatgatgatctctgcactgtccttcccgttccttgctttgtacaattcctgtgcagcgctgttccgctccatgggaaattccaagatcacattgaaggtctccgtggtggaaaatatcatcaacatcgggggaaacgcccttggtgtctatgtgctgggactgggcgtggccggtgtggcgatcccttccctgatctcccgtggtgtggcgggttttatcctgtatcacttattgaaaaatccgtccaacgaagtgcatctgttaaaagaaagattccggatcgactggccggtgatccataagatcttttatattggcattcccagtggtattgaaaacggtattttccagctgggacgcgttatcgtggtgagcattatcgctggcttcggaaccgtgcagatcgctgccaacggcgtggcgaacagtctggacagtatgggctgtatcgtgggtcaggccatgaatctggccatgatcacggtgatcgggcgctgcgtcggtgccggtgattccggacaggtacggcactatacgaaaaaattattgaagatcacgtatgtttgtacgttcgtggtaaacagtatcattctgctgtgtctgccctggatcctgaaatgctacggattgagtccggagactacgcagctgtcctacattctggtcatgatccacaatggcatggcaatgtttttgtggccagcatcttttgtactgccgaacatgcttcgtgcctgcaatgacgtgcgctttaccatggtgctgtccatattctctatgttcatgttccgcatcggtttcagttatatcatcggtgtgaacatgggctacggagccattggtgtctggatcgccatggtactggactggatcttccgcgtgatctgcttcgtgagcagatatttgtccggccactggctgaaaacggccgggttaaaggataacagatagtatagagcatgatttttgcgcccgaataggttcacggatgaactgttatgaggtataatgtgggaaaaagagaggaaggtatgtaatatgcaggtagtattggaaaatgaagctttaaaggtaacgatcaacagctttggcgcagaacttgcaagtattcgggggaaagagacagatactgagtatctgtggaatgcggatgcgaaattctggaagagaagtgcaccggtactgttcccctttgtgggcagtctgaaaaataaggaatatcattatgaaggaaagacctattccatgggacagcacggttttgccagagatatggagtttgccgtggatgtacagacggcgacggaagcatggttttccctgagatctaatgaagaaaccaaagagaagtacccgttcgagtttattttaaaagtaggttatgaattagaagggagaaatctgaaggtcatctggcaggtggaaaatccggatacaaaaacactgtacttttccatcggcggacatcccgcattcatgtgtcctgtgaatggaaaaggaaagcagtcggaatattattttaagtttgatgccgacaaagatctgacttacggactggtggcagatgacggacaaggactcatgggacagcaaaaggatgtactgccggtgaaaaacggctatgcgcagatcacagagcatctgtttgacagggatgctctgatcgtggaggatcgtcaggcttccgcagtgagcctgtgtactccggacaaaaagccttaccttaccgtaagctttgacgctccgttattcgggctgtggtctcccgcaggcaagggagcaccgtttatctgcatcgagccctggtacggcagatgcgaccggacgaccttcgacggcagcctggaacagcgggagtatggcaatactctgcaggcgggcggggtattccgcagggagtacaccatcaccgtagaataaatccagaaacagcagcgatatgtcaggtatcgctgctgtttttaagcggctcatcttatgaattattcttgttcttgtaatggaaattcggaatatgattccatctgtcccgaaagtaatgagcgatcagtttcggacggcggtctcgggtaaagatgcctttccggttgccgtctgcgcgcatacagccctgcagggtggcataatcggcgaagttccatgcctgttccccgataaaaaagtctcttccgtcgaaggccttgctgtacattttataaagttctacctgaaattcttcactccacatttccggcgcacagttatggagcccggcgagagtatcggcgccgtattcggtcatcatcacgggttttccgatcttttcccagaaatccagttccagattccaggcgtaggatgcagcctccagatcaccggagagattgtaccatccgtaatagcggttgagacagactacatccatggttctggtcacaatgtccttctcgtaattattctggcagcagacaaaggtcacggggcggttctgaggatccagccggtgggtaaattcatagagagaatgccagtaatcataggcggattccgggaaatgctcggtatccggttcgtttcccatggaccacatgacaacgcagggatgatttttgtcccgtgcgatcagatcccgtagtacctgttcgtgatgctctcttatgggaaatgtcttataaggatcacagctctctccggcaccgatgcccacggcgggcgtctcgtcaataataacgataccttctctgtcacagagccggtagatctcctccgcgtaagggtaatggctggtgcggaaggagttggcatggatccagtgtagaagattaatatcctttacatcgaggcagagatccagtcctcttccgcggaaaaaggaatcctcatgcttgctgaatcccttgaaataaaaaggctccccgttgatcagaaactgcgttcccttcacctctacggtacggaaaccgaattcttccgtatagcagtcctctccgtaatgaacttccgccttgtacaggtaaggagtgccgggataaggctgccagagatggacctgcgggatccgaagctctccctttcggccggtggcttctgctttgcagttgctttctgcgtctatgatttttaaagtgacaggagcgtcactatctatcccatccgtgagaatttcgtaatttaagacgccggtgtcaccttcgatagacgggaccagagtaatgtctctgatgtaggaggccggagtgctgtagatgcgtaccggacggttgatacctgcaaaattaaagaaatcaaaattcggcagattctgtttctttctccatatttttgcggcttccacactgggaatgccgggattgtccgagccgaagaaggcaatattaccttcgttgccgatgggcagagtgctgtggctgatccggttgtccacagcgacaccgatggtaaggtgcccatcctccggaatcagatccgtgatctctacttcaaaggggagaaaaccacccttatgtgtcataatcagtttcccattgatataaacttttgcaacatgggtcacggcatcaaaacgcagtacctgacgctgtccgttgcttccgcacaaaagtgccgggagttccacggttcgctcgtaataagcccaaccgtaatgattccgataagacggatcatccttctggtcattataagaagccggcacggcaatcaggtccatttcctgcggtccgctccagagatcctccggctctgtctcatctcctaattgaaattgccatactcctcccagatcgatcaagctgcgggaacggttcatgattggatataacatggtagtcctccttttgccctgtggcctgtaattgcgcttattatagggcaggacaaaaggaaaatccatgtgattatttttaagaagtatgtaaatttttatgaatctggcaagtcagtaattaatggtgggtattcctgtttttttgcaagggcgcaaatagcgccccagcgcctggatttaaagtagaagagcatggcaatcatgccggtaataaagctggcggaaacactgaccatggcatattcgccatagccggcatacatgatgagataagcggcagggattcggacaacccataatagcagaatatttacgatggtgggatagcgaatctctccgataccattgataaagcacataatgccattgaacacggcgtaggcccaggtgaatggcagaacaagataagtatatcgctgtgcaaaagccaatacggcaggatcacggctgaacagcattagcagaggatggcaaaaagcagtcacaagtaa

SEQ ID NO: 5742 - DNA, 2499 bp, Unknown
  gut microbiota DNA sequence
atataattctttttctgtcatccaattgcattccatcactccctttgggattattagcactcatctgaaaggagtgctaacatcttcttaccctaaaatatcactacaggatattattgtcaactgattttcccgaaaataattctaaacaaaatattaaaaaaaactattcagagcctcattcgccaaatacagattcttgtgcaagcacaaatctgtacttggctcatcgtatacacaaaaaggaccggcactatttcagtaccagtcctgtctccagatatacgggaagtgcccgtacatataccatatctattgtgcctccgacaaggatcagaaaacatatcgcaacccctgtattcaccagccaccggggaaaggttctgcctttgatcttcagttccgaaagtttttgaattccttttatcatataatacatcagggggagcagcgctgggagcaggtaccgtccctgattctgataatccgtggtgtatgcataataaatcgtcagaaatgccggcataaaaatgcaataaagcatattaatatggaagaaccattctcttccggatattttgcgacgcttcttatagcagatcacatacagaaggcttcccgcggtgccaagcacaaaaaatgctttatacgcccgatacagccagatgcttccgtagatggacatggagccgaaagctgccacgaagctgtggaacagaccggacagtgtgtagcgttcccggaacatttccagcaccgtataacccatggactgataagtctgcatggtcagcggattgacactctccaccgcatattggatcgccatcttttcccgggtggccagtcccagcagatctccgtccagaacgatataactgcggatgaaccaccagccgatccccgccagaactactccggcgatcagacagccgtatttcagcatattcttccagtcatagaaatagccgccgtttttcttcttctgcaaaaaggacaacagaaagagtaaaatgcagcttacgatatatccgtaagcattataataagaaagagcacacagaataataccaccgctcatccacagactgttgcggagatttataccatcctgatatacgcataccagagcatataccatcatggccgtggataacatacagcaggaatccgtattcacataagtgtgcaggaacaatccctccggcaggtacgttactgcaaagcagaacagccaacggaatcggtcatcccggaacactctttttccaatcaaatataccactactgccatcagcaggccaaaggttacgttcaccagtcttgcggtatagagcagtaccacttccgattccgtaaacaggctcacaaagcgcatgagatatccctgcacgatatagggaaatacgttatacagagcataggaaaatccgtaggccggaatccgcacctcttcctcccatcccgtagggatcttcccatacttgcagataaactgcgggatcagatatctcgcatgttcatccggcggattaccatacagcggcggtgtgttggccagcggctgcaacagtgcaagtgtaagtgccagtgccaggaatcccaacagatataatgtaaaaataatcttttctgattttttctgcattctgtcatcctttaacatttttatagatacgaagaccccaaagtggtaaattcaactttggggcctggtaaactattcagaccctattcgcaaaaccgcaccttcggtgctttccttttgctcatagggttacttcgtaatataaaaataagtatatatccttatgaatgcaagcattcaacgtatatatacttattttttattactctgaatagtttatatgtagaagcttccggtgatctctttgttcattacatagtaaaccatgttctcttcgggctttacatacagctctacgctggtcaggtcagctgccttctgcttcagatcgtatttccatacatccttggcgatcttcagcagttcttcctgagagtaggactttccaccgaactgaacgctgatctcactctttaactctgtcttcttggctacgggcttcttagcctctgcctttgcaggtgctgccttcttggtctctttcttaactgtttccttcttggctgcaggcttcttaacctctgcctttacaggtgctttttcttctgcctttgctacaggggccttctcagcttccttcacagcggtcttggtttctgtcttaactggagttgtcggtgctgctttcttaacttctgccttaggcgcttccactttagctgctacaggtgctacagttttcttaactactgccatgttaccgtctcccttctgtacgaatcatgtacaaaaacattttcattctcctcacaagtaccgtatttcggtgctcgataagggtagtgtattccttttccctataattgtcaactgttatgcgaataccagaaagtacagcaatacgataatac

SEQ ID NO: 5743 - DNA, 146 bp, Unknown
  gut microbiota DNA sequence
gtacgaacagggatacaatgaaggatatcactgtaccgaccagcaggcaggcaagctccattcccgtgaatgcaaatccgaacttcaataccttcagaagactcgctccaaacataacgggaatcgccagaaagaaggtaaattcc

SEQ ID NO: 5744 - DNA, 687 bp, Unknown
  gut microbiota DNA sequence
agaaccggaatcgaaccagtgacacgaggattttcagtcctctgctctaccaactgagctatctgggcattttagatctgaattttcactcagatcttagtagcggggacaggatttgaacctatgaccttcgggttatgagcccgacgagcttccagactgctccaccccgcgatattatgttgtatatgatatgttttccttttcaaaaatattcctgaaaaagaaaatggatggaggtggattcgaaccaccgaagcaaattgcagcagatttacagtctgtcccctttggccactcgggaatccatccatatggaattgtattccataaagccgatgatcggactcgaaccgataacctgctgattacaaatcagctgctctgccaattgagccacatcggcgtattcataacagctgatttgtaatcagcagctctgcctacgcttgactcgtttcactcctcaatcgtcatgaattgagtcacatcggcgtaacatttaaaaccgttttcactagaaatggggcctatagggctcgaacctatgaccctctgcttgtaaggcagatgctctcccagctgagctaagaccccacaaggattaaaaatcctttaacgacccagatcggactcgaaccgacgaccttcgccgtgacagggcgacgctctaaccaactgagccac

SEQ ID NO: 5745 - DNA, 2878 bp, Unknown
  gut microbiota DNA sequence
gattggcaaatatggcagaatgcgacagaggtatttgtttgaaaatcatcatgccatgtatacacatctggttcttacggaaaaattgtggaaacatctggaagaagtagatatggaatgcaatgacatgatggatatgcttacggtaagaatggctgagcgtgaaagtgtgacggagcacttgaagtcagtagatcagctcggatgggtgcggaagatgaataacatccggagcagagcagaggaagtagtgttgcatgatctgatttatagataagaataaagcaggaatcgtcatggttcctgctttgtcttaccatatatacgagaatggagctattggttgttattatcattctcattgactgcttcatctagcagtaatcgagattccagctcatccgttgaaggcagtaatgttgcaagattttctggtaagaaattcgataattcgtatgctgaaattgctattggtttgttggaactgttaacagcatatttggctaatacattatttttttctttgcagatgatcaagccaatagtttttccatcggaatccattttgacaatatcgtcaacaatgtttatataagtacctatctgaccaatatcacgagatttgaattcttttattttgacctctactacgacataacaatgtaggtttaggtggtagaataacaaatcaatatattcctctgtgccttctataggtaaagggtattctcgaccgacaaaggcgaacccttttcccatttcaattaaaagattcataaccttttcggtcagggcatcttttaattctttttcgttatagtcacgatttaaagcaataaaatcaaaattgtaaggatcttttgttatttcctgagctaaatcaccggtgtaagccggtagtgttgtttgaaaattacttattgccttgccttggcgttcatatagattagtgtcaaggaagtttagaagaacagctcttgaccagttattctttattacttcatcaacgaagaacattgctttttcgggttcatctttgcatttatcaacaattaattttatatgtccccatggaatggcatatatttctgccccaacttgaggcagatttgtagcctccggtaattctgccccaagttggggcagaatttcaccaaataaattgtagtatcttttcatgtatctcaaattagtggttgaaaatccttttgcacctgggaacatcttttttaaatcttcacttaaagtttcaaaaaaagcaccgccccatttgctttcagcctgcatgttaacgatatccttgccgattgaccagtaaaacctaagcaactcgtcattaaccttgatagatgcttttatttgtgtatttttaaatctttttttaacatgtttcagccattcgatataatctttatcaattctaatcatattgtccatagtatttcctccagatatgtcatttattcattattcatctgttttatttttcttagcccttgtcttatagacattatactgattcttgcatttcggagagcagaactcatttcccttacggcttgcgataaatgccctgccacagtgcttacacagcttcatatcgcagtcagaatccgtaagcataaaagaaaagcacatctggatcatgacgagcagggaatggaagttccatacgataaccggggcattttccgctaatgagatatggtaagtcggggatattccgccaaatgcagacataccctgacgatacagtttttttgtctgttcatcaagactgtcgtagtccatataatataagaaacttgtggtaaaggtaaatgcccagtcggaaaattctttcaccagccagtcatagcgttctgcatattctttctgaaaactcatcgtaacagcctgtggattctttcccgttgcaagtgcgattgcaatgccatccttgtcggataccgaccaacttgattctaccccttttttgtgaaaatccatcttatcaaacggataaaaataatcgagataactttctgttgatagagattcttctttaataaaatggttttttggaagatatacagattcataggtgataaattccgcagttgtcggaagtgcagtcataaagcctaaaaatccgtaggaattgatgaaacgaagaaccatacttttcagttcatcttctggtgctttatgcatgacctgcaaaccgatattgacagcagccagtacaagtgattctgcatctttcatagggttatacatttctggtttggcatccgcagatactacaatatacaaagttccatcttcggcagtgcggtattcataactgctgtaccgtatccatggggaactggtatgttcaaatagatttttcatgaaaagcctccaatctgatttcactggaatcagagcaatcgtctgaaattcaattcgtataacttctatataaagaaactgtaatctattaacaattctattcgattacacattataggtcaagggttatcattctgaaatttcaacgcaattttttttgacaaaacattaaaagtatcatattaccctgttatatatttcaggcagcatagtcactgtttttcagaattcttttcgtctttagttcttaccccgttttcaaaaaaatatttttcgtccaatgtaagtgtccaaggcagatgaagcagccttgtttcgagagcagtcttatatttctttcttatctgctttatggcagtttcccttacaccacgcacattgcggtctgtttttccattcagctcagcgtattggagagtggagtatgaccggacaatcacatagtacaaaagctgtttctggtgttctttcatattctttaatatcaggcataaatcctgac

SEQ ID NO: 5746 - DNA, 1095 bp, Unknown
  gut microbiota DNA sequence
gcatacgatacagatgcactatgtaccggaaggacggaatatcggtattttagtgagtgcgggaagtgtactgatcctgttgggatgcgtgctgtgtcagaggtgtgacaggaaaaggaaagactgtgcggagaatgagcctttgcaaaaggcagcagacgaaacgatggaagacgggaatgcggaaaaaacgcacacagaggaaggttctgtgaaggaagaggcaggaaggatgtaagaaggagcgaattatgacgaagaagagtatttgtgataccttgcggcgtacctgcctgatcctggcgggatcctttatcatggcagtcaatttgaaaagctttgtccgggccgggggattgatccccggtggattcaacggtctgacccgactgatccaggagatcagcgtgctgttgtggcactgggagcctcctttttcggtgatcaactttatcttaaatgcggttccggtggtcatcagcttcaaattcatcggaaaaaagttcaccggttattcctgtctgatgatcgtggtgagcggtattttgacggatatggtgcccgcctggccggtaacggaggatattctgctgattgctatcttcggtggactgatcaatgcactggccatcagcctgtgtctgttcgccaatgccaccagcggcggtacggattttatcgcgatcttcctgtcggaaaagtacagcattgattcctggaattatatttttgcgggaaatgtggtgatccttggaatcgccggagcactgtttggctgggacaaggcgctgtattccattatttttcagtatacctccacgcaggtactccatgtgctgtacaagcgctaccagaagcagacactgatcatcgtgacgaaacggccggaggatgtctacgaagctattgcggagatcacccatcacgatgccaccctgatcaagggtgagggctgttattccaaacaggaatgtgacgtgctgtattccgtggtgggacgagacgaggtgagcaaagttgtgaatacggtgcgggagacggacccgcaggcctttgtcaacatgatccgtacggagaatctggcgggccggttct

SEQ ID NO: 5747 - DNA, 393 bp, Unknown
  gut microbiota DNA sequence
atgaaatgtccatattgtggtgaagaaatgataagaggatacctaatgagctcacgagacattacttttacagttgataatctgacaaaagtttttcgcattaaaaaatcggacgatctggaattgagtaaaggttcagaaggaatccctcattgtgaagcttatcgttgcaatagttgcaaaaagattttgattgattatgcgaatagataactacttcaccaagcacatttttcaaccggaatgtgtaccgcccatgcagagccaacacattccggtctgttaaggaacaaatcagcccttactacgatagcagacgcagaactaactatgcgcaaaacacaagtttaacgaatagttctacataaaaatggttctaaaacactctcaatg

SEQ ID NO: 5748 - DNA, 1911 bp, Unknown
  gut microbiota DNA sequence
ttcgactttgggaatttcctgtcggcacttggcaataatgtattcatataattcattcgccatatccggtttaccagcattgatgaaggaaggacgatttccttttttgcaatctgcgtacagtgtaaattgtgataccagcaacaattcaccgtccacggcatgcagatccagatttgtcttgccctgggcatcttcaaagatccgcagaccaagaagctttttaatcattttatcggcaatttccctggtatctgtttcagccacaccgatcagcaccaggaatcctttgccgatgctgccggttacctcaccgtctacctttacctctgcatgctgtacccgctgtattacaaatcgcatctgtctacttctctcctacgttttcctgttcttgatcttttttatcctgtccagaatcagtttgatctttgatctcatgatctttttgcagtctggaatccagtgtatggaatccctcttcatcaatatttttcagataagaatattgttctgtctctaccggcagatcctttttccgaaggaacgtattaactactgccttgatagccgcatagatcactgcaaagataggcaccccgacgatcatgccgagaataccgaataatccaccgaataccgtgatggcgaaaatcacccagaaaccggtaagcccggtggaattgcccagaattttgggtcccaggaaatttccgtcaaactgctgtaacaccagaatgaacaggacgaaataaacacagtttaaagggtgcatcggatccaccacaaggatcaggatggcactgggaatagctcccagataaggaccaaagaagggaataatattggtcacacccacaatcacgctgaccagtgccgcatacggtgtctgcaataacgtggttccgataaagcacaggcatccgatgataaaggaatctacaatcttgccgccgataaatccgatgaaagtgctatgggtaaagcgaaaactcttgatcaggcggttggctgttttctgttcaaagaaagcataggccatttttttcgcttgtccggcaaatttttccttacttgccagtacataaatggaaataacgaatccgatgataaaatcccaaagactcttcagaatattgattacgctcaaagatactgtcatgatcacctgactggtcttggtcagtactgtgttatttaaccaattctccagttctacggaatacttatcaatcagaaaagtgatctgactgcccagctccggattgtcatccataagcttgctgatccattttgtaaaattgctgatgtaggtgtcaaaattggaagcaatatttacaatactgggaacaatctgggaaagcatcatggcaaccagactataaatcagggtgacgaacaaaaatgccgtgatcagtatgccgataccacggacaatggaattgcgcttcctgctctccttcaccttcattttccggcacaaaggaaatagcagtttggtttctataaaattaagtaccggggtcagcagatatgccgtcaccagtccgaataccaccggcatcagaatcccgatgatcgtatgaaagcctgtcttgatactgcttccgtggaataacagataatagaaacaaatactggcggcaatggttaagaatgccgttcccccccaacgaaaatacttattattttttaaatcgtacttcattcactcacacctttctgtgtaactcactatgtttaatatactatggttttgtcctcaccacaagaagaaatctgtcgttttggttgaaaaagaatctccgcaagtataaaataaataagaagaaacgaatggagaaagagtgaaaaataaagtagatttttgggcgcacttatataagggttcataaaaccctgtttttacaa

SEQ ID NO: 5749 - DNA, 427 bp, Unknown
  gut microbiota DNA sequence
tagatgtggggtcagttataaaacttaccataggggatcaagagattcctgtcactgtttccggtctgttcctaaacgacgggcttaaaaatggtcatggtcctctggcattggacagcacctgcatggttgcaaccaaagagctgtttcaggaagcaatgcccatgatcgattgctttgattattcttggagcattgtcagtgatccccaaaaggcagagcagattgaaaacagtctgagtgcgatcatttcttctaatcccgaccttgcactggacaccattgggatacataaggattatgaggaaatggaaaaccgggtcgtttttggagggcttcaggcactgtcctggctggtattcctctttggcgtggtcaatctcatcaacaccaccctctccaatcagatgtccagaaagagggaaaa

SEQ ID NO: 5750 - DNA, 2769 bp, Unknown
  gut microbiota DNA sequence
cagactttgtcaacaactttttttgaaatcttttcaagtttctttcgagctgttgtgttgtctcggcgttgcctcaacaacgaatctgagtatatcatccgctagtgtacttgtcaacactatttttcgaattttttacacaaattatcccctgctacgtcaattccgcataaacaggggatttttgccatgtttctattctgttttttactattttacaaagaacggaagcttttgtccgagctgttccaccagatatgccagatagttattttcatacaaacatgtaagtattctgctgtctctggtataatctacgatcacctggcccagggttcccaggtctctgaagatattaaatgcgtatattgtccaaacaattagaacagtttccaacattccaaccacaatacctagtaatttgtccaggctatgtactataggtagtttcacaatcatctttgccgagaaaaatacgatattaagaagatgatgcaccaaaccgatcgccgccagcaacagtattgtcaggatcacattgaatatctttccatcaaagtaactgctcagaccattcccgatcaggaacagcaccacacaggtaatcagcagggagatcagagagatcagggattttaccattcccttcttgcagccgtccatcaccatgcagatcaatactactgccatgatgaccagtaataaattcagattcattggtatactcctttattttaactgtatcgtatctattgtactatctgtcaccagataatatttgtaggaacctcctgcaggaagcagaagccgggcactcttaccgaagctgccatggtatttttccacaccgtccgttgtaaagatctggcactccgattcgttgtagatcaccatgtcatcatccccgaagaaaatatccgtataatccacatcaaaatagtagctgcccacctttgccgccgaagtattgtacacatccatgcggtatttggtctccgcctggtccgaaaggaataccagtcctacatatttatcactgtagaaaatcgactggatctcgtcgtcatacaggtattctcccgccgtcacaggcttctgggtacccgagtagatcataaggcggctgtctcctaccgcaaacgctgtatcattattcataaactgcactttcggcacgaccaggtcggaataagaatatgcgctgaccatataatcgctctgattctcacccaccggtccgaaattgtagaatgtcacattactttttactacgcctgcatccacatacaggtaactgattgccagaagctctccgtccggtgacaaactgacggataccggataacctccatccgtcatatgcgcctgtcccgtgtagctgttggtaccgtccgcttcgtaagtcatgatccatgccacatccgtatccgccagcactgttgtcactcttcccgtttccgacactgtgatatttcggatcggcatggtcgttgtaatagttcccagttgcttgtccgtattctgcacgtagatctcacggccgttataactgccgatagctgccacatcgccacaagtagcgatcttcacatcctggatcacataagtctgattccactttacatttcccttggcatccgtacagtgagcgccgtctttactatatgtaagaatactgtttttcaaccgtatgtctgtggcatccgatgagacctcccggctagtggaagatacggtgtcatatcccgtatagatatgtctctttgcctgtaccaccacaagagcaagtgccgctcccaaagccgccaccaccaacagcacccggtacacgattttcagccggtgtttacggatctttttcttatagtcatcctgactcttttgccgcttttctttttccttcagataattcttgatatctgctgccatgtatctgtttccttatgtattatcgtaactattaagaatcgcattcgcaaaattactgcggcgcagtctgctttttgctcatgtagttacagtataacacacttcccctttttgaaaataagttttttacgggagaaggatttcctgaccgatcttgatatcatcggggtcagcaataccgttcagggaacagatctcagatactttactgttgctgccgtagttccgcagagaaataccgatcagtgtgtcccctctctggatagtataatgtgtgggttgagcaaccgcctccactgtaggagtctctgccactgcaggttctgccgtctgtgtcacatcctgtattgtttcctgtgtcgtgttctgttctgttgtctccgtcacatctgtcgtattttttgtgacattgctgtccgcagaggttccatccgctacactgcccgtattttcttccgtcggatctacagcactgttccctgttccatccattgatgcattttccgtgccttccggcatcactgtctctgctgcagtcccagtagtatttcccgccgcagcattttcctgtcgcagggcatcctccagcttgtcctccgccaccagcgtgctgatctggttctgttcctccaccgcatccggcagtttctgctccatcaggttgctcatggcctgcctggctgtctcccccagggattctccggtgctttcctgctgcatcaatgccaatgccatcacgcagagcagaacaaagacaccggtagccgccattttcatccgacgcagccccgccgttggcataggtataatattatccggctccttacgcctggttgccgc

SEQ ID NO: 5751 - DNA, 956 bp, Unknown
  gut microbiota DNA sequence
gggaggcatatccgctctcctgtctctgcctgcgttcctcctgccgcttcttcaccacttcgtatttttcctgatccaccttctccggttctgcctcttccccccggttctccagcatatacgccagcatactgtcattcttttcatagaactgcgcataccccgccacataccggcagatctcctgttcgcagatctggaaaccttccaccatctcgccattcaggatctggtagcctaaaaaggtcatttccgaaaaatactttctccgcagcttctcaatctcctgttcctgcgcctgggacaggtgccgcaccggcttctgcaggaaattcagctttgcggagccataggcgaatagatatgccacaccgtcctctgctgtcttcctgccgtataatgctatggcaatatccttgttctgtgccattccattcatttgttttatgtaagataccacataatcttccacatagattctgcagtgtttgtccgcctctccgatctgcgttatgttcttcggtaattccatacaaaaaacacctcccatgccgtttctatccgttattactaactatagcatccgcacaggaggtattttagcgttctttgtcgcgtctcttcaaaaacagttcgacaaagtttgcatcatgttctatgtatttttatctatgcttcgaacttatatacggtaacagaatcgtattctctgccattctccccaccaaatacataggaagggaaattctcatgatgaatggtatccgggaaatactgggtttccaatgcaaaaccgcagcggttgccgtaggtcaccccatcttttccgggctgtacaccaataaaattgcctgcataaaactgtactcctggcagggtggtgtatgtcttcagaactctgccgctcttcgggccttttactgtagcaatatgccgcaacgtaccgtcccagtcat

SEQ ID NO: 5752 - DNA, 2431 bp, Unknown
  gut microbiota DNA sequence
tcccgccattcagatttcccgtattatccgccccggacagcacggcatccacagtattgtctccacggtggctgccattataaactccctcattgtcaactgatccggcactgttcccggcagtcaactgtgcagaggttgtcgccgtccctacggtcaacagacgctccgggatcagactgatcctggtccccggcagcaccggacaacataaccgcacaaatacgattccccacagcagataggaacaccatttcggggcttttttcagtaaaaatctggccagtatcaccaacaaaatacaatagcttcccaccagactgagacgccatatactgtcaaacaaccgatagatgccttccaccataaagtccctcctatgttctctgcttccctatccgcggaagctccgctctctgtcatccctgttctgtaacgccccgaagctcactaattttccgtcccggcagctgaggcttccacaatcgccttcctgcaattcgctgtagattctgtcggaaacttccaaggtgatctgttcgccctctttttccagattttcaaaaatgacagtcttgacgttttccgcctcggttactccggaatttactgtgccgtttgccagatataccggttggttcaccgcagcagcctgtgccttgctatagacttttgcacggttcaccgtatgatatccccgttgcctgttccgtaagctccgcaccagaaggtacagaagatatcccagaattgccgctgcgaacaggactgtcaatatgttttccaccagactgaaacttaactgctgcatcataagcacaacctccccatttttcattatttatctcatttcacagtatcctttatgatatccttgtatacttccaacagccaccaggaaaacgcctgtgattgttttgctgcattgtcgatcatgccatctgcagttgctttgtcctccgccggtactaccagcaggaactcttcctcttctatttttactccacataatacgttttttagatcttttgagataaggaacatattaccggatgtatctccatcggtagttgtgatgcaggaatacgatggttccgcttttacgaaaagtgtcgtaaatcccatttcctcatcaccaaaaatcttttctccatccagccatacatttccctgaatataatcctcctgatttttccagataaaatgtgcctttttcgcatgaatctctaccggaacctgttgataaaattgcggatttaccaaaccgactaacatgccactgccaacataatcatatgtttcctctttcggagtatcataatatcgcaatccgtaatctccgagacacagcaggactacagcaactataacgatcagaaaaattacgattcctttgttctttttactccaatgcatgatctgtatctccttttcacactttaccctgcaaaatataaaccgctgaaatagtcactgtaatccgttccatcccgtaaccgaaaccaccccttcacaccatccgtaatctcgatgcagatccagtcctgtgttgcatccagcttcgtcatgcgtaccttgcttcctttgggcagcacaaaggtctcatccccgtccggtgtacggtagagcgttatatcctgccgcagctccacttcctcccaggcacttaatacatattcctcctgtggcacttcccgaagtcttccgttcgatgttacctgatagattttctggatataatcattctgcaccgcaaaatatggttcggtgataaccatctgtccatcctgtatccatgcctttcgcagatcctgtgcgagccggtctgtttccaccggttttccgtcttcatagtgatagattcgggtcagtggatctgcgctttcgccgtcatcatacaatgcgatcaggagctgttctccgtccgggctgaaagcgaagatcgaattgctcatatttcccgtgctgtccggaatctcagccgtctgtccgtctatctccaacactgcatcctgcaggtcatagcaattcatttgactaagtcccagattcagatatatcgtatattgctccagagaataccccgttaccggctccgcaggatgcagagaaatcttctccggcacaccatcgccatccagatccagctgcgccgatgtctcagtttctgtccgctccgatacatcaaataccacacccggataggccagaatgtctgctctttcgatgtgctggctatccgccccgctaagcgcaaaccgcatacttatggatggattactattgtaaatgtcataatatccgtcatgaacatgaagcgtcgtgtcgctgttgagctgcaaatccaccggcagaaccgtatcggtggcagtatgggtactcatgtcaaactcccgaagtaccctcggcatccactcatccgtcataagat

SEQ ID NO: 5753 - DNA, 3890 bp, Unknown
  gut microbiota DNA sequence
taccttcgggaagacctactgccataccgctggcattaccatgtacaaaaggatactccttcatcagggagtccattacaggggtattggcctgtgctacggcgttgccctctaccttatcattcaatccataaccatccaggatcattaatacaaccggtttctttctcatcgatcgttcctccatttttacttttgattataataaattaccagtacggctccggaaaatggtctgcgtcccggatccgttctgaaagcttacattacgtccaccgagattatacactgaaaacgacggatgcgcaatagtaaccgctgatttcttgatctgcatctttgggcgttttttctgcaaatcatccggatttacttgtatttttcctgcatatgcgctacaatatcccttaaaatctcatttgggaaaaggggatatcttatggttacattattggcaaaattatttatcagggatcatgaaaacgtcacggattccggcgttcgccaggcatatggaatgctctgcggtatcgtcgggatttttttcaacctgatcctgttcactaccaaggctctggcaggctttttcagtcattccatcgccatcacggcggatgcattcaacaacctgtcggatgcagcatcctccatcattacgctggcaggcttcaaaatggcgggacagaagccggactctgaccatcccttcggacacggacggatcgaatatatctccgggctgttagtctctattttaatcgtgctcatgggcttcgagctggtaaaaagctctgtaagtaagattttccatccggaagttcctgactactcccctgtcattattggcatcctggtattttcgatcctggtaaagtgctatatggctctgtataaccgcagcatcggttcccggatcggttctgtggcaatgaaggctaccgccattgacagtttgagcgatatgatagcaaccaccgtggttctcatcggcactatcgtctccgccgcctcgggcatcattatcgacggttactgtggtgtgctggtgggtatgttcatcctgtactccggatttgtcgcagccaaagacacgatcagtcccctgcttgggcagccccccgagcctgaactggtacagcagattaacgacatcgttctctcttatgatgatgtcaccgggattcacgatctgatcgtgcataattacggccccggaaggactctgatctctctgcatgcggaggttcctgccgacggtaatattctgaccctgcacgatacgatcgataccatagagcatgaactgcgcagcaaattaaactgtaacgctgtgatccacatggatcccgtcagcaccaatgaccccgagacactgtccctgaaagcagaggtaaaagcttatctggatcagatcgatccaaaactcagcatgcatgatttccgcatcgtcaagggactgacccacacgaacctcatttttgacatcgtagtcccctatgattatcccgtttccgatcaggatgtggttgactccgtcacgaaacggatccagatgaaccacccggatttctacgcagtgattgacgtggataaggcagtggtacaataaagtttgtattaaaaacgcctttttttgcataaaaaaatacaaaaacaggagattttggccttttataagagcttatttttgctaaaatgggaaaaataataaaatcagtacaaaaaatgtttgatttagaagattttttgtactgattttgctattttgatgcgatttgcgccaaaacaatagaaatggctgtaggcagaaatgcctatgacgtacagatattatgagaaaatgtagaacccccgcagcgaatggaatgtccttccgagaatgtttgtcggacgatggtgatattttctcgaccgctatgtcacttttcgtcaggaaattccctccgggagacctgacaccccggaaggatgttccatccgatgcgagcgttcgtggggggtatggcaaccctacgttacgagccatgcactcaatttattcctgactgttgatgtagttgatcagtccctctgcggcgataatcttctgcatgaactcggggaacgcctgtccctggaagctctcgccggtggtgaggtctttgatcactccggtattaaagtcgatctcgacttcatcaccgttattgatcttgcgggatgcctcgggacactcaataatgggcagcccgatattgatggcattgcggtagaagattctggcaaaggtctctgcaatgacgcagctgacgcctgccgccttaatagcgatgggggcatgctctctggaggagccgcagccgaagttcttctccgctacgataatgtcaccttttttcacattttttataaaatccttatcaatgtcctccatgcagtgggtagccagttctgcgggatcggaggaattcagatatcttgcgggaatgataacgtcagtatccacgttatctccgaatttgaaaactattccttttgcgttgttcattttccgttacctttctatttcttatattcatctatttcagttcacaagggcaggaaatcttgccggtgatggcgctggttgccgctactgcggggcttgccagatagatctcggacttgacatgtcccatacgtccgacaaagttacgattggtcgtggagacacatctctcgccttctgccaggatacccatgtatccaccaaggcagggtccacaggtaggagtgcttacgactgctcccgcttcaataaaggtcttcagaagtccctcttccatagcctgcatatagatggactgggtggcaggaattacgatacagcgcatgccctttgccacatgtctgcctgcaagcaccttcgctgcggtgcgcagatcgtcaatacgtccgttggtacaggatccgatcactacctgatcaatggcaataggatccatctcgtggatctcatcgatggtatgtgtattctccggcagatgagggaaggccacggtaggccgtaaagtgcttaagtcaatggtatactccgcatcatactgtgcatccgggtctgcttcgaatactttacagggacgcttggagtgttcttccatataagcaatagctttctcatccacagggaaaataccattcttgccaccggcctcaatggccatattggcaatggtgaaacggtcatccatggacagattggcgataccgtcccctacaaattccatagacttgtacagtgcaccgtccacaccgatcatgccgatgatatgtaagatcacatccttaccactgacccattctgcgggtttgccggtcagattgaatttgattgccgcaggtactttgaaccatgccttaccggtagccataccggctgccatatccgtgcttcccacaccggtggaaaatgctcccaaagcaccgtaagtacaggtatgggaatctgcaccgatgatcacatctccggctacagtaagtcctttctccggaagcagggcatgttcgatccccatctctcctacttcgaaataattcgtgatctcattgcgtcttgcgaattcacggacacatttgcagtgctccgcagatttaatatccttattgggaacaaaatgatccggtaccagtgcgatcttatccttatcgaacactccctgtaccttcattttatccatttccttgattgccaccggactggtaatatcgttgcccagcaccagatccagctgtgcctcgatcagctggcctgcctgtacctgcgcaaggcccgctgcctgtgcaagtatcttctgtgtcattgtcattcccattgtctactgctcctttttctcttcatacagcttttctatttcagaacccgggaacaaaat

SEQ ID NO: 5754 - DNA, 211 bp, Unknown
  gut microbiota DNA sequence
tccagtatagtaccatcggccgcttaggtcttaaccatcgtgttcgggatgagaacgggtgtgtcccccaagcgcatcgccaccagaagtgttcttatttcggatttcttcaccggcgatgcgctttacgcataaccaccagctcattatcctttttcttgatttacctctttggcaaatcaacagtaatgcaacccctacttcttccgtt

SEQ ID NO: 5755 - DNA, 239 bp, Unknown
  gut microbiota DNA sequence
atcatttccagaccgaggaaccatcggtatgcgacattgacttcgatttcttttactgtctggcgcatacttcggatgccgtacagatactggatgaatggaattttaatgagcatgaccggatccatgctggggcggccattgtctgcactgtatttatcgatcacaagatcatagataaaactccagtcgattgcctggtcaatcaggcgcagcagatgatcctgcggaacaaggtc

SEQ ID NO: 5756 - DNA, 10216 bp, Unknown
  gut microbiota DNA sequence
aaagtttaatttttatttaaaaccgtattttccaaagagggaagaagttcggcaaccgtaactttttccacggagtcagctttcgtaccttttgttttaggcttcttaaccctggttttaagaggagaaaaccggcgcattttaaactctggtttaaccattatcaccgtcagaaatccagaagtaaacaaaagtaaacatattatttgatactttgagaaatcaaaaaaatcggaaacgctgtatttatcagcatttccgacccttttaacctaatagcgagagggggattcgaaccctcgacactgcgggtatgaaccgcatgctctagccaactgagctatctcgccatatgaccaaccgaagttggaatggaacctatagggctcgaacctatgaccctctgcttgtaaggcagatgctctcccagctgagctaagattccatttcgttgctctcgcaactgacttgttaagtatacaatgggtacatcgctttgtcaacaagttttttgctatttttgtaaaaattttgtatgcaattaaaacaataatagatgatgagcatattttcaacatggagttacaaagtatgatataatgagcctcagagaaaaccaagcggctgcgaagcagacatttggttttctgggctcattagcgaacgaataatcacgcgaagcgggatgtgaagtgcgaaagcacgaattcgtgagcttatgatataatgagcgcaagagagtcaacacgcttgcgtgattggcgaacggcgaattgaatcatgaattcatgaacttaacacataatgtagacgggggaaactatgaaaaaaaaattaattgcgctactgctttttagtaccatgctgtttacttcctgtgggcagaaaaatacctcggaaaaaacagaaaacacagaatttcgtgaggaggcagtcgcagaaagtacaacagaagatacctctacacaggtagaggtcgtgacggagccggaagacacaaaccgcacggagtactggctggaagagcaaagcaacgtttctgtatgtttagactgggagcaagataactatgtcattgtggacggagaacaagagattccgtttcaacttgacggtcatcccctgacgcctctggagatcgttggagcgtataagatggatgtggacggagaccagaaggaagagtacgcagttaccttttgcgatgggaggggcaccgggatatatctgatgggacttgccgttatagaagaaggaaaggaacaaccggtattctatctgtcctctgatgacatcgtagaaaatatcgacggaaggattacctacaagtacgatgccaaataccagatgcttggtatatacacggggaatgaaaagaatgagaaaccggcttggcaggcttgtctgcagacagaggaagaagagtgtgggggcagatttgagagcacctgctttggttcgcatgtctatatagaatataaggaaggggagttctggattcatggtactctgccattatttttccagggccgtgcgatagagtatggaccagcgcccggtgtttctgcaccgctcactttttcggaaggatatgagtattccataggtaaaataggtgtacaggcaccatatgagaatgcagaatgtgggaagccgatagcgtatagtgaggtgttggcacagttttcggcagatattacccatgacggacagaagaacacgattcttcttaccgttccggaaggtgctacgctacaagatgtaatggatggaagaactgcattcggacagttttatgtatcagccgaacagcattatttggcagaagaaggggagggtgatttttctgaaatctacgctttcataaacagagagttttctcctacacatgtgggaaatgggcagatgtttgttacgacagtagagggaaaagactatctgatccagacaaatttctggagcggaatggatacacttacttaccaatataaggtcttctttgaagatcgtaatgcaaaatacgaagtggaatcagtgaaaatagaaatgggagagagcagttccaaagaggatgtttcagaatttttcagcggtttaaataaatgggtcaatgattcgacctatgttgtgtatgtcgcggatatcgattatgaaccgaatctgttctattctacggaggatcacaagatatcccccgcagaatacctgactgaaaaagaaaaacaatggctggaagcactggaatccttataatgcctttttaaccgaaattgctttcatggggcacatttcctggcaacagaagcaggaaatgcagccttttctacggaactttgccttgcggttttcaatcttaattacatgagccgggcagctttctgcacattttccgcatcccacgcatttctccgcattgagctggggataggattttaacagtctggatgcaacgaaagtaaacggtttccgcaaaaatttcggtactccgttcgtgaaatccaacttgatggtatccggtttctggaagggagacagccccacgggaaccgggtcgccgacaagttccaggtctttcggatgcgctaatcctttttccgcggcttgtcgcagcatgacgatttccatgggatccagccccatgagtccggcggcaaagcagtcctgggtatagaaatctctggcagccaacagcatgtgcagcggatgggaggtgccgccggtgggaccgttgccttccatagcatcgatggcatcaatgacggtaagctgcggagctacggtctgtgccagctctaagagcatgttggagaaatcttcgatctcgggccagcgatagtgcatctgcggcttctccagaccgggaatcgtaccgaagagattcttgatgccgccggaataaccggtcatggcgtgggttttcaatttacagatattgataatgtaatctgcctccacgatgggcgtgatcaggtgaaaactgtggttcttgaatccggagggacagttgacggtctgcgcggaaaaatccatattcagttcggcttccggactaagcgcatccatgccacagacatggtagacatgcttcatggcttcgacattgtagagaccgccggaactctcggcgatggtgatatgctgcatgccctgttccttaagccaccgtatcacggcctttaccaccaacggatgcgtggtagccggaaaatcgggggactttgccatgaccatgttcggcttgatgacgatcttcatctccggacgcaggtctgccgcaatgtttaaagcctccatgcttttacagatggcgggatagatcaggtcttcgttatattcgggtacaatgtgtaatgtctgtatcataaaaatctccatgcctttcagaaagttcaagtttttattctatagtaaaggaaattacttgttttttcaatgcttccatgctatactacgaaatgttgttgagatttgatggaagaaatcagaagcgcatcgcaatgatttctttttttgtgcaacaattcagaaccaaggttattttcataaatgcacgtgaaatgcttgcatttcaaagggcatttttgaaaatgactttggtgagaacccagacattcgcaaaaggaaagtctcaaagagacgattttgcgaatgcggttctgaattgttgtgtggagttaattaaaaggagcattcagtgagttattttttggaaaatgaagaagcagtaaaggaacaggaaattttgcaggacgagacaagcgtgcagcaggaaaatgagcaggacggcatcgcctccatcgagccgttattggacaaccgcattgtgcgcgctatccgtgagatgggattcgagaaactgtctccgatccaggagcaggcaattccctatttattacagggcgaggacatcatcggacaggcacagaccggtaccggcaagaccgcggccttcggaattccggccattcagcacatcaatcccgatgtgaagaagttacagaccattattttatgtcctaccagagaactggcgatccaggcagcggaagaactgcgtaaaatagcaaaatatatgcacgggatcaaagtgcttcccgtatacggcggacaggatatcagtcgtcagatcgcaggtctgcggggtgtgcagatcatcgtaggtactccgggacgtgttatggatcatatgcgcagacatacgatcaagctggatctggtcaacatggtggtactggatgaagcagatgaaatgctgaacatgggcttccgtgaggatatggaactgatcctgggacagattccgggagagcaccagaccgcactgttttccgcgacaatgccgaagccgatcctcgagatcaccgatcgtttccagaaggatgccaaactggtaaaagtagcggcaaaggaattgacgattccactggtatcgcagaaattttatcgtgtaaaaaatcaggacaaggatgcagcctgtgtgagactgctggaatattatcagccgaagctgacactgatcttctgtaacacaaagaagaaggtggacgagctggcggatctgctgaagcagcagggatttcaggcggaaggactgcacggcgacctgtcccaggcgcagcgtgatgtggcgatgaaccgtttccgtaacggcggcgccagcatcctgatcgctaccgatgtggcagccagagggattgatgtggatgatgtggaagcggtcatcaactatgacattccacaggatattgagtattacgtgcaccgtatcggcagaaccgggcgtgccggcagaaagggcagatcctttacgtttgcaaacagcagagagatctacaagattcgtgagatcgagagagtctgccataccacgatcaccgagaaaaagcttcccggagcggcgaaggttctgaaagcgaaagcggataaatatctgaacaaggcgtgggaactgcatgagcacgaagacgttgaactgatgaagagctttttacagcggaaaatggaagaggaaggctgcgatgcactggatctggcggcagccatgctgaaatatcaggtcggcgacaagggcgaggagatcgccgcagatgattatgtacagcgccgcggacggttcggagagaagggacgtttcggcagaaacgatggcgaaggccgtggtttcggcagaggagacggcagacggaggttcagccgcgaagacggggaccgcagaagattcggccgcagtgacagagaccgcagagatgatggcagtaccggttccggcgaggacagaagacgtcgcagagacgagaaccgcgaggacggaagaaaatggggcggctgcgacaaaaaggcagcggaccgtaaatactccggggacagagcggagagagaagtaaaaaagagaaagaagcgggaagagccgggcatcggcaacagcttccccaagagaaaaaaatcataagtagatgaggaattttatgtatttgccgcaaaagccgcagttgtgctttcgcggcaaatcgtgtatagttaggaaagaatagataggcataattcagaaaggtctgcggtatgaaaacactgaaaaaacagataccttatttcctgttgggagccacacttctgctccttttgggacttaatattatcagccaggatcactggctggattccgatatggcggcagagatgatcttttcccggatccttgcgggggagcatcagatgatttcaacgacgaactggtattattccacggagttccgtgtgctgtatacacagctgatcatgggaccgctgttccggatctgcaacaactggcatgtgatccgcacgatcacgaatctggtgttttacgggctgatgctggcgtcctattattattttatgaagccgttaaaggtatccagagggcttacggtgttaagctcctgtctgttgcttctgcctttttccgagaccatgatgacacacatgcaaatgggcaatacctacatgtcccatgtgattctggtgttgtggttcttcggtatgaatctgcggctgtgcagtggagaatacagtacaaaacgcaaggtcagcctgtggatattctatgtactactggctattgtctgtggaatgtccggcgtacgttacctgctggcattacagtgcccgctggtactgacttcctttttctatctgttgagtggagagaagttccagggtttccggggagagatgacaaaggagcgttttcgtgccttgctgcctacgacccggatgaaatattttctctacagtgtagtgggagcgtttttcgcagtagcgggctacggcattaatgtggtatggatcagccataaatatgtgttccagacttacggtgccacgaatttcatcgctctgtaccacggggtgctgtttgaccggatccagaatgcagtaggctgtctgttaatgctttttggttatattcccgacaagggctttttatccctgcgtggtattgtgacgatggcagccttcgtgatgctgggcatctatggatatgttacggtgaagaacggaaagataaagcagagtacaggatttcgcagcctgatcacacttttcctgaaagtcagctttgtcctaaatctgtttgtgtttattttcaccaccagcaccatggtgccgcggtattatattacgatttttatttttgcactgccggtattgtgcttttatctggaagaggagaaaatgccatttgaccgtctggcggtgacggtgctgcttacaatctgtctgatccttggaacggggaaaacggtgatgtctttcctgacggtggacaagaacgaaacgaagcgtcccgtggcgcagttccttgcggaaaacgggtatgattttggctttgctacttataataatgccaatatcattacagagcttaccaatggcgaagtggagatcggcaacatcggagatcccgaacatctggaatatttcaagtggtcttctcccatgaaatattatgaggaagggtatcataccggggagacattcctgcttctgacgtcggaggaatgcgcggaatatgcatcggcgcctgcgctgaaacagggcaaaaaggtgtatgaggacgacagttatacggtctatgtatttgacagtacggaggatctgatggactgtgctgtggcgagaaaataaggacagaattttagaatattgcagacgatattgacacccggcaccgtccggatccgggcatagagacctgggaattgtccggttggaaaatttggtaagacgatgggaccggtggtttttgaaaacagatagcgtctgcggaaaggttgtaagtatgagaatcggaatgggatatgatgtacatcgtctagtggagggaagagacctgatcatcggtggcgtgaaaataccttatgaaaaaggacttctgggacattcggatgcggatgtcctgctccatgcaatcatggatgcgctgttgggagcagcggcgctgggggatatcggaaagcattttccggatacggatcccgcgtacaagggcatttcttctataaaattgctggaaaaagtgggagaactgctggaagagaatcatgtgttcattgaaaatattgatgcaacaatcatcgcgcaggcaccgaagatgcgcccccacattgataccatgcgggaaaatattgccaaggctctgctgattgatgtggggcaggtcaatgtgaaagccactaccgaggaaggactgggatttaccggaagcggagaggggatctcctctcaggcgatctgtctggtgactacgccctatgaccttacggcacaggcggtgcaggggggatgtggaagctgcggaggatgcccgaagagctgataatttcggaaaataagaacttgacaaatgggtcgataggatatagactttgattagaacaaggtctgtatactatcgaccttttataatgtgatgagtgcaaaaaagccaatagggttgcataattggcaagggctggattaagaaggatacaaggaggaatgggaatgtatcagatgacggagacagaatacagatttgctgagctgatctgggaggaggaacccatcggttccggagaactggtaaaacagtgcgcggagaagttcggctggaagaaatccactacctatacgtttattaaaaagctttgtgagaacggtattttcaaaaatgagaatgccatcgtatcttccgtattgaataaggaggaataccacagagcccagggggaggctttcgtggagaaggcttacggcggttcgctgccgaagatgatagccgcatttatccagagcaagaagctcagcgcggcccagatcgccgagatcgaagctatgatcgaggattataagagctgacggagaaaacagctgcggcaccggaggggcagtgggtgcttttggaagaataaaatactattgtgattacaaaggttctatgctaatataaatggcatagggcctttttctattatcagatctgttttctattagaatccaatgtcggagaaattttccaatccattgaaattaggtagaaaatatgcttttaacttcattcttgcaactaaaaacagttgcaaaaaacaagcagaaaaaatataatataattaacaaggggtacaaatgggacaaaaggaaaaactaattgaacagttaaaaagcagaccgaagacatttacctttcatgatgcggaagttttattggattatctggaatttacgaaatccaataaggggaaaaccagcggttccagagtgatgtttaccagtgaggagcatgggagtatattactacataagccgcatccgcaaaaggaattgaaagcataccaggtcagacaattatgtgatctgttggaacaggagggattgatttgaaaaatacgatggaatataaagggtatgtcggcagcgtagaattttccgaggaggatgggatttttttcggaaaggtaatggggattcgttccctgatctcttatgagggaaccgatgccaggagtctggtagaggattttcatggggcggtagatgattatctgcaactgtgtgaaggacaggggaaagctccggaaaaagcatacaagggaagctttaatatccggatcgcgcctgagactcataagcagcttgtgatccatgcaactgcatgccagatgtcactgaatgaatatgtgagggaaacgttggaaaaagcagtgatgtagaaaactccggggttgacaaaacccgtatttttgcatatcttatttagtaggaatgatcgtatattcagtaaaggcatggaacaggaaaagtacttttcggtaggacgccagagagaagccgttagaagctgggagcggctttcgcccgaggaaaaggaagtgcgcctgtgagctgatccggggaacgttaacagtaatcagtatccggatccggtaagcacccgttatgtgcatggcgttttacgccagagtgaagggcattgtcccttaagtagagtggaaccgcggataaattcgtctctaagagaagagtttgttcgcggtatttttttcgaggtgagaacatgggcatcatcaaaaatctaaaagaagaagtccgtattatcaaggaacgtgacccggcgatccattcctccatggaggtactgctgtatccaagctttaaagtcatgatccattaccgcctggcacataagctgtaccagagcggacactatttctgggcgagatatatttcccaacgaggggtgcgcaagacgggaatcgagatccatcccggtgcacagatcggtaagggattctttattgatcacggcaatggcgtcatcatcggcgagacgacgatcatcggagataatgtgaccctgtatcagggcgttaccttgggtggtaccggtaaagagcacggcaagcgtcatccgaccatcggcaataatgtcatgatcagtgcgggagcaaaagtgctgggatcctttacgattggggataattccaagatcggtgccggaagcgtggtcctgagtgaggtgccgcccggatccacggtcgtgggtgtaccgggacgtgtggtaaagcgcaacaatgcaagcctgccgcaggagaccatgaaccagacggaccttcccgatccggtcagagaggatatcacggtattgcagcgtgagaattccgagctgacgaatcgcgtattggaaatggaagacgag

SEQ ID NO: 5757 - DNA, 232 bp, Unknown
  gut microbiota DNA sequence
tggaaagttacgcgagcaatgagccgcgcataggcatagtgaagacagcgatgggcgctcgcgcatgattcgctgtcttcacttatgccgagatgcggcgaacgccgcgatatgaaataagattggcagcgttttatgctgacaatcttatgaatagcgtggctcattgcggagggttttatcttcgggacatagtagaagaaaaatgtagattacgccccgcttgtcggaa

SEQ ID NO: 5758 - DNA, 2762 bp, Unknown
  gut microbiota DNA sequence
tattgacagcagaaaaggcattcccagcatggcacttgccacggaagaggagagagaagcactgatccgggaaaatcctgcgtttgccaatgtgatctgccgctgcgagctggtgacggaaggagagattctggaagcgattcaccgcccagtaggagcaacgacactggatggtgtcaaacgccgtaccagagccggtatgggcagatgtcaggcgggcttctgttccccgaagacgttggaaatcctgtcgagagaactgcatctcgatccggcacagatcactaaggaaggaaccggctcagagattctgaccggtaaaaataaagacaccgcacccggagagggcggaacatggaagaggacacaggcgcctgtcggaaaggaggcactccatgagtaaacgcacagaagacatcgtcatcatcggaggaggtcctgcgggactggcggcagcgctgtctgcgagaaaggccggctgtgaaaaagtgctgatcttagagcgtgacagagaactgggaggcattctgaaccagtgtatccacaacggtttcggactgcatacttttaaagaggagctgaccggaccggaatatgcggaacgttatattgacatggcagaagaagcaaaaatcccttatctgctgaataccatggtaacaaatatttccctgcgctccgatggacgcaagaaagtcaccgccatgaacaaagaggacggtctgttggagatcgagacagagaccgtgatcctggcgatgggctgcagagagcgttcccgtggtgcgttaaatatccccggcagcagaccggcaggcatctacagcgccggaacggcacagtattatgtaaatatcagagggcggatgcccggtaaatgtgtggtgatccttggttccggagacatcggacttatcatggcgagacgtatggtgctggaaggtgccaaagtacagtgcgtggcagagcttcgcccccaaagcggcggactgaagcgtaacattgtccagtgcctggatgattttaatattccactgtatctgaatactacggtagcaaagatccacggcaaagaccgtgtagagggtgtgacctttacgaaagtggatgataatggaaaaccgattcccggttccgaatgggatgttccctgtgatactctgttgttatcctgcgggctgatcccggagaacgaactgaccagaggcttaggagcagatatggacggcaagaccggaggaccggtagtgggagagaatctggagtgcagtatccccggagtcttcgcctgcggcaatgtgctccacgtccatgaactggtagaccatgtatccgcagaagcggaaaaggcgggaaactacgctgtagaatatattcggcagaaaagagggtgagacgatggcagagaagaacacaacacaaagagaactgacctgtatctgctgcccggtggggtgtgctctgactgtgaccatagaaggtgacaatagtgtcacagtgaccggcaaccggtgccccagaggggcggcttacggagaaaaagaagtcacgaatcctacccggatcgtcacctccaccgtgcgtgtggaagggtatccggacacagtagtatccgtgaagacggcttccgatattcccaaaggcaggatcgatgactgcatgaaagctctggcagatgttactgtagcggcacccattcatgtaggagatgtcattgtggaaaacgtagctgacacgggtgtcaatatagtggcaacccggtcgtttcgtgggtgacagaggacagaactattgagaatagagcatatttggggcaatggacacaatatattccaatgacacgattgggatatgctatgggcagagcctggaacgaacaacgggaggttacataacacaatgggagatacacataacacacagaaaaagacatacatcatggcactggatcagggaaccacgagttcccgctgtatcctgtttgataaacagggaaatatctgttccatggcacaaaaagaattcacacagatctatccccagccaggctgggtagagcataaccctatggaaatctggtcctcccagctgggagtggccattgaaagtatggcggtgctgggtatcaccgatgaccagatcgaggccatcggcatcaccaaccagcgggaaaccacgattatctgggataaaaataccggcgaacctgtatacaatgctattgtatggcagtgccgccgtacttccgatatgattgaggaactgaaaaaagacggctttgatcagatcatccggaagaagaccggcttgatcccggatgcttatttcagtgcttccaagattgcctggatcctgaataatgtacccggtgtcagagaacgggcagagcggggagaattgcttttcggtacggtagatacctggctgatctggaatctgaccaagggtgccgtacatgtaacggattataccaatgcttcccgtacgatgcttttcgatattcataatctctgctgggatcaggagattttgaagcattttcatatcccggagagcctgctgcccagggtatgttgttccagcgaaatctacggcaggaccgatgcttctgtactgggcggcgagattcctattgccggtgcggcgggagaccagcaggcggcgctgttcggacagtgctgctttgagcagggagaagtgaaaaacacttacggaaccgggtgcttcttattaatgaacaccggacacgaagccattacctc

SEQ ID NO: 5759 - DNA, 5183 bp, Unknown
  gut microbiota DNA sequence
acaagcaagaacgtagaatatgccctggagggcagcgtgttcgtagccggtgccgggatccagtggcttcgagacagtatgcgtatgcttaagacctccgcacagtcccaggagtatgcggagcatgtgccggataccgcaggggtctatattgttccggcatttgcgggcatgggagccccctactgggatcagtatgccagaggaaccatcgtcggcattaccagaggctgtaccaaggaacatttcatccgggccacgctggaatccatcgcataccagacggcagatgtgctggaagccatggagaaggacagcggcattgatttaaagagcctgaaagtagacggcggcgccagtgccaatgatttcctcatgcagtttcaggcagatatcgtcaacacccaggtacgccgtccggcatgtatcgagacgactgctctgggagcggcttatctggcaggacttgcggtaggctattggaagaatcgtgatgagatccgtgagaactggcagatcggagcatcctttgcaccggaaatggatgaagaagactgcaagaaactgttaaagggctggcatcgtgcggtgaaatgtgctcttgcatgggcagaggatgaaatctaaataaaaccttaattttttacgggtgacgtgtatttttggcggagcaatcttgtaaagtgacaaagtactgtggtatgataactatttagaataccatggctgtttatgatggcctctgacaggggatgatcaatgacagcttggggattccggaaaggaaccggcatggatttaaagggtttaccacagaccgttcaaaatttcatagaggaaaccatccaaaaccgggaaaacggtaaatttccggacaacgagacctgtcagaaagtgatggaatatgcagcagacaccggctcacagaagctggccggcctggggctttattatcttgcagaatattattggcagaacgaccagtatgaaaacaccttgcaatgtctgacagagagtatcggttatctgaaaaatgagcagatgtatgaactgctggccagaacctataatatgatgggagcggtgtccgatcggaagaataaccggatggtggccttaagttcctattataactgccttcaatatgcagaaaaataccatttttattatatccagggcatggcggagagtaatattgcctataccctggtcaggatgcgcctgcggcaggaggcgatacagcattaccgtacagcaatcgactcctatagtaagtcagagaaaacatatcagctgaattataacaggatcaactgtatgatcgaatgtggctgctgtcacatgtatatgggagaaatggaagaggctttacggctttggaatcaaatagaacagatcatcagagaggcaccggaaagctattattcgaaaataacattagaaatgtatcgtatttcctgcgaattattacaagggcatgaggaagaggctttaaagcttgcagcagatcttctggagcaattgtcagaccgggatgtttttgaagagatcatggatgaactggtgatcctggcgggaatcctggcaatcctgcctgatggaaaatatctggaagaattgatccggatcattgatgaaaagcatatcgaagagcattataatattttcctggatctgtatcctttcaagagtgaacttctgcagaagaagggtctcacctgggaatacatagattatacccgccagtattttgatatttatgagaaataccaacaggaaaacagagaagcgctgatcaatgtcatagaattgcagaaccggctgaaaaacgttacgttggactggacgaacatgaaagcttccaaccgggagctggaaagtctggctatgcatgatgagctgacgggactggcaaaccggacctttttacatgaacactttacgagcagttttgaacatgcctatgaggaacatgagctcatgggagtagaactcatggatattgatttcttcaaggaatacaacgatcattacggacatctggccggagatcagtgcctgaaagcgattgccggagttctgcggaaacagcaggttccgggtaagattttctgtgccagatacggtggggatgaatttatgatcctctatacaggaatgacggtggagaagatacgaagagtggcggaagatattttgaggaaggtccgcaaattgaaacttccccatgaatgcagtaattgcagcaactatgtatcggtaagccagggagtatttgtgcggattccggtgggcaataacaaggaatgggatttcacatcaagagcggatgatcttctctataaggccaaaagctgtggaagaaacagtatctgtctgtccacggaaaggttcggagataagtttatagagatcaaataaacagcgcagaatcaaatttgaaatttgatttgcgattcctccgacgaaaggaatcgtctgcggaaaggagattagtatgttagttcagaaatataaagacatgctgtcgggaaaatcggtgattcggcagctttcggaatttgctacggcaaggggacaggaaatcggatacgagaacgtatttgattacagcctggggaatccttccgttccggttcccagagaatttacagatcgtatgatccatatgctggcaacgaaggaaccgttggaactgcatggctacagtcccagcctcggtattacaagtgtcagggaggcaattgcggagaacctggagaaaaagtttgggctgccttatcgtaaggagcacattttcatggcatccggggcggcaggagcgttggcacatgcttttcgtctggtgacggagccgggagatgagatcctgacttttgcaccgtttttcccggaatatcatccttatgtggatctcaccggagcggtactgaaggtggttccccccaatctggagaacttccagatcaacttcgaggcgtttgaggagatgctgacggagaaggtcaaggcagtactgatcaacactcccaacaacccctccggtgtggtatattccaccccgacattgcagagactggcagatatcctgagcgaaaagtccaaggaatacggtcatattatttatctgatctctgatgaaccttatcgtgagatcgtgtttgaaggtgtagacagtccctgcgtatcctatttttatgacaataccatcatgtgctattctttctccaaatctctgtctctgccgggagaacgtatcggttatgtggcagtgaacccggcatgtgaggatgcggagaccatgatcaatatgtgcggacagatttccagagggatcggacataactgtcctccttccattatccagctggcagtggcacaggtgctggataagacagcggatctgtcggtgtatgagacgaatatgaatatcctgtataaagaactgaccgagctgggattcacctgtgtgaagcccggcggaaccttctacattttcccgaaggcgctggaagaggatgccaaggtattcagccagaaagcattgaaatatgatctcgttctggtaccgggtgatagctttggtgcaccgggatatttccgcatggcctactgtgtggacaccgaaaaagtggagagatccctggaagcgttgcggaagtttgtgaagacggagtatgcaactatctagagtcacgcagcatatcgaaagcgaattgtgcttgcacagatgagcctttcgatatgctgatgtggttctggatagttgcagaagcagaaaggagagtaatgagaatgtatcaggcaggactggtattggaaggcggcggaatgaagggtgtatacaccgccggcgtactggacttttttacggaaaagggaattgatttttcccacatctacggagtatccgccggtgcatgccatatgtgcagctacctgtccagacaaaagggacgggcgctgagtgtcagtgtggattatttggatacgagacggtattgcagcctggaaagcttattgaccagcggagatttgttcaatgtggatttctgttatcacctgattccggattacctgtatccgtatgattacgatacctttgaaaaatatcctggcaaggcctacagcgtggtgaccaacatcgagacgggacagccggagtatctgcgtgtccgtgatatccgcaaggatatcgacaagatccgggcatccgcatccctgccgttggtggcacggaatgtgaagatcgatgggaagctgtatctggatggtggcatcagcgatgccattccgctggagaaatctattctggacggcaaccggaagaacatcttggtcatgaccaaagaggtgggattcgtgagaaagcccgcatctgcgtcacagctgggactcataaaactcagatacctgaaatatcctaaagtatatgaactcatggcagaccgacatatccgttataacgagtgcctggactatattgacagacaggagaaaaacggtcaggctttcgtgatcagacctcataagaagagtgatgtgggacggatagagaaagacaaggacaaactgatcgcattatacgaagagggctatcaggaagcagagaactgctatgaagatctgctgacatatctcgaaaaataaaagctctgattcgtcagaaaataaaaaagataggagaaacaaaatgttagaaattatcaaggcaattatctacggtatcgtggagggcatcaccgagtggctgcccatcagcagcacaggacatctgatcctggtggagcgtctgattccctttcaggagaccagtgaaggcttcttcgatatgtttgatgttgtcattcagttgggagctatcctggcggtagtcgttctgttctggaacaagatctggcctttttatatgaagaaaaatcagcagacaaaaaaaggtggtattgtaagatctaaaaaagattttacggtaggaaatgtggcactgagcatggatgctttctggatgtgggtgaagatcgttgtagcatgtatccctgcggtcgtttacggcctgctgtttgatgatgcggtgagcgaagccttcaaaaaagagatcggaaccagtggagtaacgatccaggtcatcgtggtagcagttatgttggtactggtcggtgtattgtttatcgtgatcgagaact

SEQ ID NO: 5760 - DNA, 315 bp, Unknown
  gut microbiota DNA sequence
gatgattactaatactactctttgcaacttctattggcagatatttacaaatataatcattgttatacccatttctcgattttaaaatgaaattgcttatcatcatcataagcacacccttaactggtcgaatgtttgcaggctgcttattcattctaagtagttttgcttctattgctaataatttgtataattcttctcttgtaaattcccataacttttctcttttacttccatgcatattactaatatccagtaacatagatgtatatgaatgagtcaaggtatcaatctcttcttccgtttggcagcttt

SEQ ID NO: 5761 - DNA, 3837 bp, Unknown
  gut microbiota DNA sequence
ctcgacacccaaatagttcgtccaggaacagggcagagccacgttgtcgatgacgtattctcttttttcattatcgaaatagccgtattgcaaaacgcgtccctcccgtatatagttttttgctttttcagaacttttttgttctgtatttattgtaatttcatgtaactattcagagccatgcaaaactgcgttctgcgaatgcttgcattcaggcagataagcaattttatatggcgaagtaaccacatgagcaaaaggaagctacgaagtagcggttttgcgaatggggttctgaatagttacaatttcattataaaaaaggatctctttgttgaaaattgctcattatgtgattatttgcttaaaattgttagatataataatgatttccaaaaaaaattttactttccagtagatttttgggaaacactaaactataatagaacatcatgggattttagttgcaaagatccgcagagaaaggtgtcagcaatgtacaagataggttttgacaatgacaaatacctcagcatgcagtctgagaagatcaaggagcgtatcgcaaaattcggcggtaagctgtatctggagttcggcggcaagctgttcgacgattatcatgcatcccgcgtattgcccggtttccatccggacagtaaaatcaacatgctggcacagctgaaggacgaggctgagatcgtcatcgtcatcaatgcagcagacattgagaaaaacaaggttcgttccgacttaggcatcacctatgatctggacgtgttacgtctgatcgatgcgttccgcggctacggtctgtatgtaggcagtgtgtgtctgacccgctttgccggacagcccagtgccattgcttatcagaaaaaactggagtccctgggaatgaaggtgtatcgtcattattccattcccggatatccttccaatattccgttcatcgtaagtgatgaaggttacggtaagaacgattatattgaaaccacccgttctctggtggtggtgactgctcccggacccggaagcggcaagatggctacctgtctctcccagctatatcatgaatacaagagaggcatcaaggccggttatgccaaatatgagacctttccaatctggaatattccgttaaagcatccggtaaacctggcttatgaagccgctaccgcagacttgaacgatgtcaatatgatcgatcccttccacctggaagcttatggtgagaccacgatcaattacaatcgtgacgtggagattttccccgtagtcagcgctatgtttgagaagatcatgggcagctgcccttacaagtctcctactgacatgggtgtcaatatggcaggcttcggtattgtcgatgacgaagctgtccgcgacgccgccaaacaggaaatcatccgccgctactaccacactctgtgccagaagcgccagggtaccgccagtgacgaccagatcttaaagcttgagcttctgatgaagcaggcaggtgtcaccatcgacgatcgtgcagtagtcagcgcagccaatattaaagcagagaccaccggggaaccggcagctgcgatccagcttccggacggcagagtcctcaccggacggaccagtactctgctgggtgcttcttccgcattattattaaatgccctgaaagctctggcaggcattccggacgaagtacagctgatctcacctaccgccatcggtcccatccaggatctgaagacgaactatctggggaaccgcaatcccagacttcatacagatgagacgctgatcgccctttccatctgtgcagcttcggatgataccgcgaaggctgctgtggagcagttgaagaacctgaaaggttccgaagtgcactccagcgtgatcctgtcccagattgacatgaataccttccgcaaattaggtgtgaatctgacatgcgaacctcattaccagaaccagaagctttatcacaactaaacattttgtcatgctactataaattatggcagttattgagcgaaggcgctccccaaggggagttcttcgctctttttatatgcataactattaaaaaagcgaagtaaccaccatgagcaaataacatgcaagcatgttattcaggaaagctctgaaagagcgattttgcgaatggagactgaatagttactatatcaaaaggaggagaaaattatggcagtaaagtacgtatttgtgaccggaggagtcgtatccggcctcggaaaaggaattaccgcagcttccctgggaagactgttaaaggcaagaggttataaggtaaccatgcagaaattcgatccttatatcaatattgatcccggcaccatgaacccgatccagcatggcgaggtattcgtcacagaagatggtacagagaccgatctggatctgggacattatgagcgtttcatcgatgagaacctggataagaattccaatgtcaccaccggtaaagtatactggtccgtattgcagaaagagcgtcgtggtgattacggcggaggtacggtacaggtcatccctcatatcaccaatgagatcaagagccgtttctaccgcaattttacggatgatgagacccgtatcgccatcattgaggtcggcggtaccgtaggtgacatcgagagccagccttttctggagtccattcgtcagttccagcatgaggtgggccatgataacgccattctgatccatgtaacgctgattccttatctgagtgcttctcaggaactgaagaccaagcctacccaggccagtgttaaggatctgcagggcatgggcatccagccggatatcatcgtctgcagaagtgagcatcctctggatcagtccatcaaggacaagattgctctgttttgtaacgtacctcagagtcatgtattgcagaatctggatgtggaatatctgtatgaggctccgttagctatggaaaaagagcatctggcacaggtagcctgtgaatgtctgcatctggattgtccggagccggatctgacagactggaagaagatggtagaggatctgcgtcatccaaccgatgaagtgcaggtggctctggtcggaaaatatgtctctctgcatgatgcctatatcagtgtcgtagaggctttgaagcatggcggtatcaccaatcatgcgaccgtacacatcaaatggatcgactctgagacggtaacgcctgaaaatgtggaagaactgttaggtgactgcaacggtgtcctggtacccggcggcttcggttcccggggtatcgaaggcaagatcctggcgatccagtatgcaagaacccatgggattcccttcctgggactgtgtctgggaatgcagctgacaatcgtggaatatgcaagaaatgtcatcgggtatacggatgcccacagtgtggaactggatcctaacaccacacatcctgtgatcgctctgatgccggaccagaacggtgttgaggatatcggcggtaccttaagactgggtgcatacccttgtgtactggataaggattcccgtgcttatcagctctacggacaggagaatatctccgagagacatcgtcatcgttatgaggtcaacaacgattatcgtgccgtcctcaccgaacacggtcttcgtctgtccggtctgtcccctgacggacgtatcgtggaaatgtgcgagcttaccgagcaccccttcttcgtagccacccagggacaccccgagctcaagtccagacccaacagaccccatccgttatttaagggattcgtggaggcggctctggagaataagcaccggaagtaaattgagagttaattaatgaatctgttttcaaat

SEQ ID NO: 5762 - DNA, 236 bp, Unknown
  gut microbiota DNA sequence
ctttcagcacttttctagaaaatgtcaacatcctccgacaaacatcttcgacatggcaccgcatactccgggagttctgcgtttcgaaagcttgttaatacaccagtagccacggctgggtgtaagaataagctgaccgtaaacagacgccggcacttagcgagggtgctttcctcgcttatgtgccgttgcgatctgtttccgagcgaaagcgatgtcagcgtttcttatacccg

SEQ ID NO: 5763 - DNA, 253 bp, Unknown
  gut microbiota DNA sequence
tttatcattccattatcttttcgcagggtcagctgctgtaggtaagcgtctcttttaatctccatcgtcacgctccccatttccgtgcatctgcacattttttagtaatgagattctatcacagaatgacgtgaatttcaatatgtattcccattttatgtgcgtctacacacttttatgtaatattgataaatatattttcagatttttttgattgcagtgtctataatcgactactccaatcgttattata

SEQ ID NO: 5764 - DNA, 4350 bp, Unknown
  gut microbiota DNA sequence
atctcttttaatctccatcattgcactccctatttccgtgcatctgcacatttttcagtaatgagattctatcacagaacgacctgaatttcaatgtgtgttcccattttatgtgcatctacacacttttatgtgatgttgataaatatattttcagatttttttgattgcagtgtctataatcgactactccaatcgttattataggtaaacaacaaaaagaagatggtttcgatgtttcattaaatatgttcgttagtcttttacgttgtatgaatgaaagggggcacattttatgaagaagattatgagtctttcttctggactgccagctgatgaaactcctcagacaagtatactcgtatgacgaagaccgtgaaataccacatccggcagtccttcccttattctgtagctttattcattgttaatggctcgcctgccgatattgctttctgattgaacgagggtttcctttgtttttgattgggaaaaacgcaaattcaggcaatatatgatgacaaaatccgcattccatctttccataaaaaatacagccctgccataaacaggactgtatcataataccacttaaaattactacttatcttaaggagcagctctatgtctgtatcccgaaagaacacaaattggcagaatattctcagctgagtctttcacagcttaacggttttaactgccttcttcgtgatgaaatcggtttctggacaaatctggtaaagagcaaaatgccagcatcccgctttctgatacagacagatgaatttgagtttgaagaattggtcaggacttccacattattatgtttttccagcagtaaaacacccggctcagagcagactctgaaaggacggaaacggattcccttaactgatcctgaagtaaatgttacctatcacctgattagttccgctatgctatttagacagattgaatattttcaggctatcattgaaacagggaacttttatcaggctgctgaaaaatgtaatgtttcccaatcagctatttcccaacagataaaaaagctggaacaggagcttggggtaaaacttcttgacagacataaccggcccttctcactgacaccagcaggagaataggtgtaatggtgtcttggcatcctacgaagtatataaatgaaaaactctgggtcacgtttccccttaaaggctgtacgagtgtaatattcatctgcttgtgtatttcctctaaacaagtctgtatatccatacatggtcattatggcttggttgaccttagtctttgccagccagactgtttttgtagataagtcacaattctttgcaatctttgatattgatagttcctctacaaagcctcttaacatttctttccatgtgtcctctgaaagatgagtgtatcgaagactgtctccataattttcagaccatgaactattacaatctttacatcggtatcgttgcatacctgtgctggtatatccatttttcttgtagttgactgaaccacacttgatacaacaataaaccttgctgttttcttttgacacaggatgcttatttgattgtagaggtgttgtaggttctgtatttgatatgttcctacttagttgatgatagagctgtttttgttcctctggtgtaaggttatctaaaatatcttgcagttctttattggtgagtgccatggcatgaacctccttgcataaacaaaattcatacccttaaatgcaccctatgaatataaaaaggcttcccagattatctggaaagccttatggtattgtatttgaatttggactacttgattttctaattgcatacgtaattcgtgaaatgtataattatactgttgatacatcagacacacaaatgtaaatagggactattgtaatataaaaatatattaaattaaaaggagccactcaactacatggcagataaaatttaccgcgttcctactatatataatgaaatgaaaaaaacaactgctcctctgacagtccgggtgccgggttcgaagagtatcacgaaccgcagtctcctgctggctatgctggcagatggcgaatcgaccttgcgcggagtattgttctccgatgattccaggcattttctgcagtgtgtacaggatctgggattcgaaacaacagtggatgaagacagctacgtggtcactgtcaggggcctgggcggaaaaatcccctgctccgatgcttccctgaatgtaggcagtgccgggaccgcagcccgttttctgacggctaccctgggtgtttctgaaggaatcttccatatggatgcctccgaacagatgcgcaaacgtcccatggctccgcttttatcctctctgaaggagcttggctgtgagatcacctgcgaaagggaagacggacattttccctttattctgacagcccacgggttcggacagaatcatatttccatcgatatcggacacagtagtcagtttctcagtgccctgctgatcgcttccactttatccgcggaggatttcacgatccggttgaaaggtacccacggtatggcttatatcgaaatgacacggaaaatgatggagcagttcggtgtcagggtggaacatcccgccgcagatcagttccgtatctgcaccggtcaaaagtatcgtgcactggattatcagattgaaccggacgtctccgccgcctgctatttttatgcaatgacaccgttactgggtattcccgtatgtgtggagcatgtgcactttgaaagtctgcagggagatgtggaattcttacatattttagagaaaatgggctgtaccgcacaggagacggaaaatggggtactcctgctgcctcccgcagggcagacggataccggaacgcaggttcctgccttccatggcatcaccgtggacatgtcttcctgctccgatcaggccatcactctggcagctattgcgccttttgctgacagtcccacttgtattacaggcatcggtcacatccgtttccaggaaagtgaccgtatccatgccatctgcacggaactgacccgcatgggcatccactgcgaagagacacaggacagcatcactatctatcccggcatgccgcacccctgctccgtagcgacctacgatgatcaccgcatggccatgggctttgccctgaccgggctccgggccgaaggtatcgtgatcgacgatcccggatgctgccgcaaaactttcgagaactattttgaagtactggatcaggtgattgcgaagataatcgaaatgtaggaatagaatcatccgtactcacataaactataagtggctgcgctgtgttgcttgtgaggtacacagccaggggagcccatgcgtgggctcctttttcacgtacaattcacaaagcatcccgatatacccgcatcacatttccccagaaaatcccatccagctggttttccgtaaagccagctgtttttagtctttcccacaataccggcattgcctccgcaccgggaagagccggatttatggggatgccgtcgaagtcactgcccagacccagtatttccataccgccgacgtcagtgatatgtcttgcctgccgtatcagtgcttcccacagcacctctggatctttgcttccgccatccaccagaaatttatcataatagttcagtcccatacagccgccccgctccgccagtctgcggacccggtcatccgtcagattccggagggacggacatacagcccttgcgttggaatggcttgccacgaagggcttcttcgtacattcccatacatcgtcaaagccggcatccgacagatgggagacgtccgggatcattccgagacgctccatctctgtgacaaaattgcggccggtttccgtcagaccacacgccgcatccctgccatcggatccacgtatcccagtctcacctttctccgtctctatcgccgttgtcggattttcccccgcacagctgctcctcccggttcccggtattttctcctgaacagatttctccgtcggtctcccatctacgtcgcccctgctctgccccagacaccgacgcgtggctggccaccccagttcattccgataattccaggtcaacgtcagcatccgcacccccatgtcatacagttcccgtagcctctccagacttccgccgcagaccgccccttcttccaccgtcaaaagtgccgacagtttcccaccggcttcatttttcaaaatgtcttcatagcacagtaccgggacaatccggttcttgtttttctccagctccgtccggtagacctcatacagagcacacacccgctcccagggtgtcggtgtgcactttccgatat

SEQ ID NO: 5765 - DNA, 66631 bp, Unknown
  gut microbiota DNA sequence
ctgacaccggactctgtaagctcctgttttatcagctccagcatgaccgactttccgcagcggcggataccggtcataaccttgatcagctccgttccacttcggtccgcgctgagcaaaggtccaccggacctttagcgcccttggaaagtaagaccactgtctcgacatttgcggtccaggggaactggtccacggccacggccttgtccacgcggtaaccgttctccagaaacacttccagatcccgcacaaggctggtgggtttgcaggagatgtagacaatatgatccacgccgtaagcaatgatcttcggcagtgccttggggtggatgccgtctctggggggatccaggatgatcatatccggcttctcttccacttcgtccagaaccttcagtacatctccggcgatgaattcgcagttatccagtccgttggcagcggcatttttctttgctgcctctacggcttcctccacgatttccacgccgataacctttccggccgccggtgccatgagctgtgcgatggtaccggtgccgctgtagaggtcgaacacagtcttgtcactgccgcccaggtcgcccacataatctcttgccgtctggtacagtacctccgcactgtaagagttggtctggaaaaaggagaatgtggagatcttgaatttcaaccccagcagttcctcataaaaatactcctgtccgtataacagctccgtacgatcactctgcaccacatctgcaatggaatcattggtaatatgtaagattcctgcgaattttccggctagtttcctatcctgttccagggaaagcagcagatccttaaatcctgtgatcagcgcatccacatccaagtttccttccaccgccgtctctccctgccagggatcctgggaggtcgtcaccagtgccaccagaatctctccggtgcgggatgccttacgtaccagcaggtgacgtaagtacccctcatggctcattctgtggaaaaagcttaccttcgcccgggcaaagtaatctctcactgtctgtaagatcaggcggtaatccgcatccacgatctcacagtccgctacggtcactatatcgtagaagctgcctctcttatgcatgcccagcgccagcggtccgtccttgtactcgtctccgaaggaaaattccatcttattacggtattcataagccttcgggctgcccttgatgccctcaaaatcccaggcttcctcctgcttgtttaacacattgtccagcaggcgttttacctgttcctccttgactttcagctgttcttcatagggaagagacagataggtacatccgccgcataacccaaaaagggaacacgtccgtccggtttccagaggtgacttctctgtcacctctaaaagccttccttccgccttccctttgcgtactttattcactgagaacttgactttctgtccgggcaggccgttcttgactacagcagtctcatctcccacacagacgatccctttgttgggaaaatcgacccttacaacagatccttcatatacctgtccttttttcatgggttagttctctccttcatcctcgaagaagtcgtcatcctcttccacgtcatctgcttcgtcttcgaaatcatcctcgaattcttcgagataatcctgtgcgaagaagaaacgatatacggcataagctacggctgcaacagctgctacggcgccgatgatgcccagtacccataacaggatattgcgttccttcttctcttctacttccttgcccaacagcttgttaagcttcttcagttcgctgactttcagctcatttaatttgtcaagatctaccagattttcaattctgttcatattatttacctgcctttcctgcatctattcgtatttatggatgcaaagcattttgttttcattcctttatatgataccatattttcatcaaaaatactatagaaaaaccatatttgagaaaatacatttcttattcttatattcttatattcttataatttcttacaactgctttagttttgcaaaagacgcatacataatcttctgccctgcctggtcgaattccacggtcaccttatagtctctgggttctctcacgatatttagtaccgtgccctcgccgtatttgatatggcgcactctgtcacccacctcgtagtccagtttctccggtgccttgaactccgtgcccttctgcagtccggccagctggttcagtccgctgatgcccttggaaatataaggtttatccgcctttgccgtaacacggggttttaaggtcgccttgggtcttggatcaaagccggtattaccgaagccgccaaaaccactatccgagccggatccagaccggggagatgcaatcgcctccagtcccatggcacgaagagctgcttcattggctcttctcgcctggaaatcttccagatcatcgtcccggtatcttctgctgggcggcagggtattatccaataattccttcggtatctccctcacaaaacggctcaccggattgtactgggtctccccacgcagcattctgctctttgcacatgtcagcgtcagatcctccttggctctggtgattcccacataagccagtcttctctcttcctcgatctccagcgggtcatcggaagcaatggtcataaagctggggaataatccatcttccatgccggcgagatacaccactgggaattccaggcctttggcactgtgcagcgtcatgagcagcacccggttgtcaccgttctccacattgtcaatgtctgccaccagcatgatttcttccagaaattccgacagagaaggctcgtcgtgagtctcctcatatgcggccgccttggtgatcaattcatctacgttccccagacgatcctcagcggattcctcatcctgatcccgcagatattctgcataatcgatccgttccagcagagatttgatcagatccggcaatgtatacgaagacaatccgctgcgaagtacctcgatcagattcacaaatccacggatcttggtctccgctcttcccagtcccttgatctgatctgcttcacacaatgcatcaaataaagtaatatccttcatctgtgcatagtctgctaccttttccaaggatgccgcaccgatgcttcttttcggcacattaataattctgcgcagagccacttcatccctgccgttatcaatagttttcagatatgccagaatatcgcggatctcctgtctggcatagaagttcactccacctaccacatgatagggaatgccctccactaccatacgttcttccagaagtcgcgactgggcattggtacggtacagcaccgcacagtccgcataggcaatgccgtcatttttcaccttgtcggcaatatcgtccgcaatgtattccgcctcttcataggcattgtcaaactgcctgaaatgtacccggctgcctgctcctttttccgtccagagggctttttccttacggcccctgttgttacggatcaccgcgttggccgcatccaggatgttctgggtggatcggtagttctgttccagcttaatcacctttgcatcgggatataccttctcgtagtccagaatattacggatattggcaccgcggaatttgtagatggactggtcatcatcacctaccacacacagattgcgataaccgtccgccaacagacggatcagttcgaactgcgctgtattggtatcctggtactcatccaccatgatatatttgaaacgttcctgataattataaagtacttccgggcagcttttgaacagttccacagtctttacaataatatcatcaaaatccagtgcattactctttttcaaggtctcctgatactctctgtagaccttggcgatcacggatttcttgtaatctcccacggattttacttcaaattcccgcacatccaccagctcgtccttggcagaggaaatttccgataacagcgtccgctctttgtacatctttgtgtcgatgttcaggcgcttgcagacctgctttatcacagatttctggtcatccgtatcataaatggtaaaattcgtatcatagcccaaccggtcaatatgtcttctgaggatcctcatgcaagtggcatggaatgtcgctacccatacctgatccgcaccgaaacctgcgatctgatccacacgctcccgcatctcctgggctgctttgttggtaaaagtgatggccagaatgttccatggatttactcccatctcatcgatcagataagccactctgtgggtcaggacacgggtcttgccgcttcctgcgcccgccaacagaaggagcggtccttccgtatgaagcaccgcttctttttgttctttatttaaggtatcataaatactcatgaattatgcattatccctttcattaaattcctgcaaaaactttcggaaatcatcgattggcataggctttgcataaaaatagccctgtacgatgtcacagtccgccagacgcagcatgtctaactgttccttcgtctccaccccctctgccaataccttgaagccgagatgcttcaacattttagtcagatatttgataattgtcaatgccgtttcttcccgttcgctgttcatggtgtcatccaggaactgcttgtccagcttcaccgtatccaccgctaccttggacaacagattcagggatgaataaccgctgccgaaatcatctactgaaatctctacccctttatcccggagagtctccagattgttggtcagtttatttagatccgacatgaaaacagattccgtcacttccacttccaaaagttcactgggtactttgtagtctttcaggcgttttaaaatattcggtacgaagtctgtatattcattatgccttctggaaaagttcaccgagatcggcaccacttcttctctctgcgccaaagcatcctgcaaatattccagtacctgatccagaatggcaaaatccaccttggtcacaaatccgtttctctcaaagacatcaataaatctccccggcattaccatagaaccgtcagcccggatccatctgaccagtgcttcagcacccactacttttccggtgtgcaaagaaactttcggctgcagatacgcccgaaattccttattattgtatgcagctaccataccagatacgatctctctggtattctccagattcttacggatcttctctgtatagatttccaccgcactgtctaccttctgggtcttgcactgttttctggcctcattggcgttatccatcatggaggacaccggccagtcattctccaggacttcatacattcccgtggcaatgaccagattgcactggtcgtagcggctgttggtcttctgcacaaaagtattggtgaattccagatatttgtctctggccttctccaccgtatcttccttcagcactcccacgaaatgatccgaagttacacgacagaacagtacgccgttctggcacttttcctgcaaggctatcgcaaaatcatgcaggatcctatctcccacttcataaccgtacatttcgttcacatactggaaatttgaaaaatcagatgacacaaaaaacaatcctgatttcccatgggcagccatataggcctccagcttatccacaaacttgttatatatcggcagtccggtcagagcatcataattcagtttccggttcagctcacgctgatctttctccgcattcttcagcgtgcgcagtcggttaaaaatctggtgagaaattctgcacagtgcatttttctcctcctgccagcttctgtctgtgtggcgatttgagaaaataacgctggcctttaatcccttagcggccgtggacattacaatcatcacggactccgcctcttccttgtagacatccggagtctctgactgacggtagatcacagcaccggattcatcggcctttttccggatcctgtcccattcgaacacgccgggattcaggattcttctggcaaaatctttcttctcttcacgattccattgataacggattgttggtccagcctcgttgacttccatacagatcatgtcatcaattccaaaaaagctacaggtccgctcacagatcacctttagtgcactggtcagattcggcacattttccaacagatccatgcaaaataataccaaatcttccgcactctcaaactgtgcctctttatgggcaatctcgtcctccttgttctcttcactgtccagataactcttgccgggcaatgccacaccttccttgacatccagcaggtaataagcaccctttcctttgctctttacctgatacagggctgcatctgcccactggaacaacagattgtaatccgtcaccgtgccgtctgtcaccgccgcgcccaggctacaggaaatgtgcagccctgtcttgtcatcatcataacggtcagacatgcagcggttcagctgttttaatttctcctccaggtgttctctgtccatgtcctccacatagaagacaaattcatccccaccgatccggccttttaacgcctcggggaaaatattactgagttcatccgcaaaggaacacaataccgcatccccaaacagatggccgttggtgtcgttaatcttcttaaagctgtccacatcctgtacgaccagatacccagtctgcccgcgtttcaggctctgtagcctggcaccgatctgttgtttgatggtagaattgttcagcaatccggtcagggaatctttctgagatttttcccgcagttcccactcttttttcttctggtcatcaatgtcacagacctttcccagaacccgctccggttctcccttttcatcataaaaagtctgtccgatgaccttcacccacctgggtttcccctctgcatcagtcttgcagagttcgatataaatatccggcttgccactgcgcagtgcttctgccagctgttgttctaccgtttctgtccggttcccggcttctttgagcagctgatctgtatacccctccgtgatctgccgggaatacagaattccctctcccggaccggcataatacatcttgtcatttacaatatcatattcgaaaatcagatctccggacatacggatcacagccatcagcttttcccgctcccggtgcagttctctggtggtctcatccagctgtctgtccacatcccctgtctgtttttcctgcaatgcaacctcttttttcaatcccatacatttttcttccatgcagaccctcttttgctttctctatacctcttccacccggctgaaattccagacacggagattgtattccacgatcggcgtgtcacagtaaatacatttcttggctcccagtcccggaagcggtgctccacagttcggacagttcagtcccagaccggcatcctcctgattctcgatcatatcctgatcctggatatagaccagttccacgttatacttggcctgttctttatgctcttcactgcctcttattacttttccgttctcttttaatgcatgaaaatactccactgccgtctgcaggacaatactctgtcttcccctctgcttccggtactggtggatctccgttctgtgaatatggatattttcaaagctctccttctgggactggttctgtagcatttccagccgcagtctgagctgttctttcaattctctggttccctccgacaacagggccggattctgtttcgtaatactctgcagataggaggtcagcacattctccgctctgctcttcatctcatcataatgaaattccgggaaatcccgcataatggacggcatgtacaggttggttgcggaagagaccgacttcggtgtcatttccacttccttttctctctgtttcattccctcgatcatggagtccgttccgaataacatccgggaggtatcccgcagttttttcctgatgttgcaataggcataataaatgattcctgcaagcaccagaagtaataccaatatgacgataattgcaatcagatttccgctcatttatgtttctctctgtttttcattctgttgtaatgtttgtatagcataagttcaggaacgcaggtgccaaagttgcaccacatagctgaactgttaacagttcagcgcgccattcgcaaagccgcactgtcgtactctccgtcacttcgtgactatctttgctcatgaagtggcgctcggcccaggaacatattcgtttgcaaaatcatgcaggcatgatttctgccctcgatatgttcctggctgaactgttacagcaaagtacagcagacgccaaaaggcatccgctgtactgctgttttgtagaaatattctgctgagtatgtattatactctgtcgttctcgtcaaagggatcaccgcactccgggcagaacttgggaggatgtgcaggatcttccggctcccagccacacttgtcgcatttatagatcggtgcgccgtccggcttctttgctccgcattcggaacagaacttgccctggtttactgcaccacagctgcaggtccaacctgcatcggagggcttgggtgcgccacactcggaacagaatttgccccggttatccgcagcaccgcagctacaggtccagcctagtaccggtgcctgcatcttaggagcctgcccctgcacaggtgctgcctgtgcctgctgcatacccataccattctgctgtgcatccatctggtacagttggccggcattaataccacctaccatattcgccatgttcataccggcaaatgccatcataggtcctgtagaagtattagatgctgccatcttcatagcttcggcctgtgcagcagtcatggtagctgcagccattccggtattgcgcagtactgcggttctctgcagatcagcaatagtcttcgcatcctcatcgggaatctttgcagagttgatattgatagtaacgatctcgataccgcgaagcttggtccacagatcggaaagttcatcttttaaagcctccgtcagttcctcagtgtgtgcgggaatctcactgggacggacgccttttgcggagatcttggccagtgcgggctgcaatgcagtcaacagctctgccttcatcttcgctaccagttcacttctggtgtaggactctgttacgttaccacatacattcttgtagaataacagaggatctaccagatggaaggaatattcaccgttacaacgtaaagaagtatccagatccagtccgatattctgatcgatcacacggaaaggaatggggcttgcagtaccaaagagattgttcatgatctccttaatattaaaaaagtagattctctgatcctttgccgcattacctccgaaggtaaaacgcttcccgatattggaaaatgtattcttaacgctctcaccaagatttccgtagaacaggctgggctcggtggaagaatcatatacgaattcacctgcatcggcacagaactctacaattccgccctgatccacgatgatcatacactgtccttcgttgactgccacgatagagccgttggagataatgttctccacacccttggtgttactgttacgtccattggttacacgctgctgtccttttactaccagcacatcattggaaagggaatcacaatagaaatactctctccactggtcagccatcatgctgctgactgcatctttcgctgctctgattaaacccattaccgcacctccgtttttatatgaaaaatctgttctttttcacatctcttatattttagcaaattttacacattccctcaactgcttttcgtaaaatatcgtcatttttcctttacaatgtgccgtttttctactaaactgtgatactagagatgtttgattaaactataatataaaagggttgaaagaaaaatgggtaaaaaagctacaaaagccgctgataatatgtactatctcgcacgttgcgaagccgctgagacgaatgcggacttcagcagccgggaaaaagccgccgaactggtggacatcgaccgtaccagactggccaggatcgaactggacaccattgttccctatcccgaggaagtcaaggccatggccaaggcctacaatacaccggagctttgcaattccttctgtgccagggaatgtcctctgggccgcagcagtgtatcggaagtcgacattgtggactttgaccggctggcattgaaggtactgggttccttaaaagatatcgacaccctgcgggcttccctgattgccatctccgaggacggcatcatctccgaagatgagcgcccggccttccaggatattctggattccctggagaagatcagcaccaacgccaaagctctgaagctctgggccatcaaaaatatacacatcaaggaggaggatgtctgatcctcctccttttttacaactatcctgttttatttatcttgccgccgctttctctgcaaattccgtagttaccagtgtttcgtaaggtactctctctttcagcacatccgaatcctccagaatattctgcaacaggtcaaaggcatctttatggaagatcagatcctctttccaggtatcctgttcctgatatctggcaacaatagctgtcaatgtgtcactttcggtctcggcaaactggggtgcaatacacttggcaatttcctccgcactatgctcctgtacgtaatccatgcctttttgcaaggcatcagtgaatgcctgaatggtctcgggatttttttccaggtaactcttctttgctgagaacgaggtataaggaacataaccggattcttcacccagagaggccaccacataaccgtcacccttttgttccaacaatgtggcatgaggctcgaactcaatggtaaaatctccctgtccaccggaaaaagctgctgccgtggatccaaagtcaatgctctggtcgatggacagatccgttgtcggatccatattatttttctccagaatatattcaaacaccatctccggcattccaccggctctgccacccagaaccttggaccccttcagcatatcccaggaaaaatcatcgatgggttctctggccaccaggaaatttcccgcccgctgggtcagctgggcaaaattcaccacataatcttccgttccgccagcataggtgtaaatggtgctctcgctgcccataaagccgatgtccgcctcactggtcagtactgccgtcatggtcttatccgcgccaaatcccgtcaccagctccagatcgatcccggcatcttcaaaatatccttcttcgattgccacatacatcggtgcataaaaaacagagtgggctacctcattgagcaccactctggtcttctttggtccgttcgtctgctgtgcgctgccgcagcccgtaagtgcagccgctgcaagcactacagacaatactgctaccgttactttccttcttttcataatcattcatcctccctgagattacatatttattctatgtaacctcagggaaaacgttccatataattacagatttgccttgatcttatcgatcatctcctgatactccgcatcggtcagcagagtcttgccggggttcatctcgaaggttccgccccactcgaagccgtccttgtacttcgggcacaggtgcatatgcagatggcagccggtgtcaccgtaagcgccgtagtttaatttatcgggatggaatgctgcatgaatagctttggctgcatgagccacatcctcgaagaataatcttctctcttcctcgctgatgtccacgatctcgctgacatggtccttatatgccacgatacatctgccgggatggctctgctccttgaacaggatcaggctgcttaccttcaggtcacagataaaaataccgaacttgtctaacagttctcctctcatacaatatccacaatttgcgtctttcatttgttctcctatctgccctcttacggggcctgccgtctgcggcttaaattcttgtccggtcttgccggccaggatcagctataatgttatgttgatcagtttacggatgttctccggatcatagttcaacaccagttccttcggaaattccagttcccgcatcagctgctctgcatcatcaaatgctccgatggcaaagcacatatggctgtccgttcccattataacaggctgatcatacttcatgcaagtctttaacagctctgtaatattttctctgcctccttgtctggccgactggggattcagggatgaattgttcacttccaacaccgcctgtgcctgtctggcctctcgcaccagttcgtcataatccaacggaaatctgccgtcatcgggatgcccaagtattttcacataaggattctgaaaagctctgacagatgccagtgtattctccttgcggcttcccgcagtaaaggcaaagggatgaatgctggcaagggcataatccattttctgcagatagtgctcttccagatccagttcaccgtttgtactgcagatatttgcttctacgccgcatagcaggcgcagacttccatctggcttcggtattacccggccggtgttctcttctctgtcatatattctgggaatcactttataattactgaaaaagaaattatgcgggcctcccggggaagtcggtccgtgctcactcattcccaggtactgtaagcccattgccaatgcagcatctatattctccaataaggtactatacgcatgccctgctgccagagtatgcgtatgaagatccatgattgctttcattctattgtccttttactttccaaaacggtctaattctttttcttatgagcttccttctccggttcctgtgctttcatcgtatctgccagatccgctaccagctgttccacaatcatcttcttcatatagacatcaaagctcaacaggcagatcagggcaaatttctgtaaaaactcctgctcttctccggtcacttcggtaaaggaatcctctgctctgcggaatttctccacaacatcctttttcagatcctccagctgttccttctccagcaccaccacttccttgtagacgctctccaggtcaaagacctgtccgttctgaaaatagcggtcagtaaggggcttaagcagcgtctggatctcattcatgggaatgatccctttataatagtagataaaaataagaagcagcacatgctctttggaatatttcttcttcaccggcggcggcagcagatcattcttcgcataattgttgatcatggtcttggtcaggatgcggtcttcggtctgaggccgcactgcggaacgcagcttacgatccataaaggtcagtacctgatccatatacagatcaatattcggaatatcttccgacttgatatattctactttctccagactctgtaagatcatctgaagtaattcttctgttgttgctgccataatgttcctgctgtcctttccgtgaggtagtttccaaaaatattgactcgagaacccgtgcttcgcactctgctgtctgcttcgcagacggttctctcgttaatgcatgcaagaaaacaaatgctcgctctgcgagcgcttgttttcttttgcattcattatatagtattcaaaactacatgtcaacagttgcacatttcctctgttctctgaatttatgaagattttataactattttgtttcactcctttactttacaactttagtatgttaaaatactaatagttgcgttgtattgattacaactatggaaaggtgtgtcgctaatgaataaaaaaatcaaaacggacgctgtagattccctttttgatgcggtgttgtgtctgcagtcccgtgaggaatgctacagtttcttcgaagatctgtgtactgtcaacgaactgttgtctctgtcccaacggttcgaagtggctgccatgctgaaggacggcaagacatatctggagattgccgagaagaccggagcttccaccgccaccatcagccgcgtaaaccgttctctgaattacggcaacgacggttacgagctggtctttggacgtatggagaaaaaggaaacggaacagaattcttaacttaatgaataaaaacaggagcactcaaaaacggcgctcctgtttttattttatcttttattcttcttatgcttcgcttgtattggctgctgttgtttccgcagctggagtttctgtcttctccaccgtctctgctgtctgtgaagtcttctgattttctctcttttcttcctcttccacttccttcagagcttctgcgatggctgccttggcactcttgcgtcctgcccggaccgctttggccgttctggctttaccttttctgtcaggaactgtctggttcatatcgatttttccctggaatacggcatgttcatcaataacgatcacctttgtggcaatgtcccccagcactttggccgaagctgtcagttccgctttctccggtgcagtgatatttccggtcacttccccgccgatcagaacagacgcagcctgtacatctcctgtgactatgcttccggctcccaggatcaggttgcctgtcaccgtcacgttaccaccaatcttaccgtcaattcttgcggaaccgtccaatgtaaaatctccggtcaactccgctccggcaccgatcagtgtgctcatttttgtatctgcattcttttttcctaacatgtatcttccaaacctttctgcaatcaaccactgattgccaacatatccataggattaatatagcttccgtctttctgcatctggtatcccagatccgcgttatcttcgccgatgacaaacaaggtagttccctgtactacggaatcccccacattcactgtggtatctcctttattccgatagatggtgacataaccgttgccatgatccacccacacgctgtgtccgtagatctcgtcatcatttatggcaatgaccgtaccgctggccgccgccacaaccgtagttcccaccgatgcatggaatatgcacatgggatcgccctcacttacttcctccatggatgcagaacccgtcagagggaattccgtaggaaggctctgcttttccagagttgctgataattcgctctcactctgtaccttctggcttacggtgtcgcttaagatctgtatctcttccgcctgttccgtcacctgctcttccagcttactgttctgctcgctcagtgtcttgttctcttcctccagtgccataacctgttcatggctccgtctactggcgttctcccagagctgtccctcgtagacaaaatagccgatcactccgccgaccaatacacacaacagaagtaccacgacttccacgatccatgcacgtacacggaactgctttacattggcatctgctgcgtctgacgtaagaatcagcacatggttcaatcttcgcttatgtttacgtcttttcatagagtcacctccgctaaatatcaacccattttaccacaggaaagctcttacagcaatcatttcttaacatttttgtaatatttttccaagattttcttcatttattcgtatttaaaagggaattgcctataaatttttgtgcaattttacagaatcgtctatttacttttactacctgctgtgctatgatgcacttgctgagacaatgttgtatacattgcaaaaagtaaatgacagcaaagaatttgtggaggtatctattatgaacaaaggtacagttaagtggttcaacaatcagaagggttatggtttcatctccgatgaatccggcaaggatgtattcgtacactacagcggtctgaacatggacggttacaagaccctggaagagggcgcagccgtttcttttgatatcgtagatggagaaaagggacctcaggctgttaacgtaaccaaactttaatcataaacgaaaaataagatccgcaggcgctatcacatgatagttcctgcggatctttctatttttctctgcacactgtcagtacatcttcccatttcatgctgccgccgaagagatccagtgcactcccgatggtcacattcatccggttctgccccagtttttttaacaaatacagatcttccatggagtgaacaccacccgcataggtgattggatttccggtataatttccaataaactttaccagttcctgttccattccccgggccttgccttccacatccacggcatggatcaggaattcatcacaatagacagataattttttaagtagtgcctcatccactgcttcttctgtcagcttctgccagcggtcagtcactaccagatactgctctcccgcacgcttgcagcttacatccagcacaaggtgctcttttccgatggactggaccagtttgtccagtctgtcatagtcgatccgtccctccctgaacacataggacgtcacgatcacatgggaggcccctgctgccagatactctgccgcattctccgccgtaatgcctcctccgacctgcaatcctcccggatatacacgcagggccgacaatgcctgttccttcgttgcctcataataagggctgtccgaggcattcaataaaataatatgtccgccttttaaactgtttttctgatacagttttgcataaaaggcagcgtcctgttctgagacaaagttctcctgcgcccgatcaccgagatcttttaagcttccaccgacaatctgttttacttttccgttatgaatatcaatacaggggcgaaattccatctttttcctcgttttcttccaaatgatttttatttttttgaattattttctaaaatccgcacatactaccctcaagccgaccacctttggttcggactgaatatccctgacgggcatcttgaaatggaggacattatgaaaaataagacaaataacgtaacatcccacatcgggaaaaaattactggttctgggcatcatcacagtctacctgtgtatggcgaccgcctgtggcaccaacaagaacaacaataactccggcagcatggctgcctctccttctccgtccacctctcctgctgctcaggggagcacagaggcgcagaccacagagaccggaactgccgctaccgacagcactatgggtgacatgaacggcaacggtaacaccgtaggagaaaatgattccatgctggataatgcaggcaatgccatcggagaagccggtgataccgtaggcaatatcgtggacgatgccgcaaacggtgtctccgatatcaccaacgacctggtaggcaacggtaatgatactgcaggtaacaacaattctaccactgccaccaccggagccggccagagataagttatacctcttccatgatcgtaccttcccggtaagcctccaggagttcttccagatagaagatattctcctggatctccttgccggtatcggtatcggccaccagttttctgcgggggaaattctccaccaccacggaatccgagaaaatatccgattccttgatgatcgccgcttccgtagattcaaaaggttcatgggctaccagacgcattcctctggaattacataccagcgtatatcccgcaattcccgtctttttctgatatgctttggaaaagccaccgtcgatgatcagcagcttaccgccgcatttgatgggtgattccccatggatctgttccacgggcacatgaccattgacgatatgggcatcggccttgtccagaccgaattcctctaagattctgccgatgacttcctcattttccaacagcttatagtaactgtttttctcttctatatgagtctccttatccttcaggaaataccgctcaaaggtagccatttttgccttgccgaacaccggggaaccggggccagcccagatgtaccagatcatatcctgtcccagagcgcgctctttggcttctttggcataataacctcttctggcgtaatattccagaatgtcgtacagtgcttttccgcaatactcttttccgcagatctccacctgcatgaaactgccgtccggattcaaggggacacagccgtgatacaacagattgccgttgtaaatcttgtacatgccgcccttggaaaacagaaattttacatggcgctgcagtttctcacagcgcatgaacacctgctgcaggcgcagcatgaccttgctctcttcctccgtgagttcgtaaggatgtacaggatccaccgtagggaaatccacgtctttcatgggatattctttgccgtccacacagatcgtctttttctcgaaatcgatccgatgcagcagcatccggtcttccatatggaactccgggtgtctcataatcagctgtccttccagcttgaactgcaagatagcaattgctttatgcatcttggtgtccagcccgagatccttggtattgtaatcggtattgaacttgatggtaaaggcatcgcagttggtattctcataagtttccagtgcaaatgtagccagaggcagcaggttgatgccgtagccatcctccagagtggcgagattaccgtatctggcagacattctgaccacattggcgatacaggccagacttccggccgccgcgcccatccacaccatgtcatggttgccccactggacatccacggaatggtattcgcacaaagtatccataataatatgagggccgggacctctgtcgtaaatatcaccgacgatatgcagatgatcgatgaccagccgctggatcaggtggcttaacgcaataataaactgcggcgctctgccgatgcggatgatagtatggatgatctcattatagtatgcctctttatcctggatttcttccttctccgtgatcagttcttcgatgacataggcgaaatccttcggcaatgcctttctgactttggagcgggtgtatttggaagagacacgtttgatgacctgtaccagacgatgaagggatattttgtaccagtcctccagattgtcctcttctctttccacgatctccagtttgctctctggataatagatcagggttgccaggctttttttgtccttgttgctgatggtgttgccgaattcctcgtcgatcttgcggcgtacggaaccggaaccgtttttcaggacatggttgaactgttcgtattctccgtggatatccgtcaggaaatgttccgtacctttggggaggttcaggatggactggaggttgatgatctctgtggaggctgccgctatatttttgtattggtgtgagagggtctttagaaccttctgttccatttcgctcatgaagttcgcctttctctgtcccctacgcagcttcgcctgagtataagaaacgcggcacgctctcgctctgtcgcagagcgtagcggtacataagcgaggatagtaccctcgctaagtaccgacgtctgcttacggcctgcttattcttacactcattcaagctgctggtttattgaaaattccataaaaatatattacatcgctgcatcgatcacgttggacatgttgtacatgccggcgggcttgcctgccaggaacttggctgcctgtacggcgcctttaccgaagacagctttggagtaggcggtgtgagagaaggttacaacttcgtctgccccggcgaagatcacatcatggtcaccgacgatggtgccgcctctgacagagctgatgccaatttctttcttcggtctctgctctctgcggttgctgcggtcatagacatattcatactcaccgttaaattcctcgttgatggaatctgccagtgccagtgcggtgccgctgggagcgtctaccttcagattgtggtgcttctccacaatctccatatcgaagcctgcgttggccagcactccggcagcttctttcaaaagctttaacatcaggttgatacctaaggacatattggcggattttaagatggccacctttttcgctgcttcgtctactttcgccagctgtgcctcggacagaccagtggtacacagcacgcagggaagctttttctccacgcagtaatccaacagcttgtctactgccacggctgcggagaaatcaatgattgcatctgcagccacatcacatttgtaaatatctgtgaatacagggtagggattgtgtccatcgtctctggcatcgattcccgccaccagttccatatcggggtccgctgcgatcagtccgctgatcacctgtcccattttaccgttacatccatgcatgattatttttaccatttttcttttctcccatctatcatgatttttgtaataacgatctagcagccctcatattcatttgcaaaagcgcactatgaatcgttactttttgaaaaaagatcccgcccatgataaaaatttcacaggcgggattcttccactcttgctctctattttccagcctacaggacaccataatccttcagggctttttcaagcctcttggcattggcctcttccatttcacacagaggcatacggaacgcaccggctcccattcccatcatgttcagtgcggtcttcacagggatcgggttcacttcacagaacagtgcgttacacagatccatggcatctaactgcatctgacggctgcctgccacatctccgtcaaagaacttctggcagatctcgtgggtctgtgtaggtgctacattggaaagtacggagataactccgactccgcccagggccagaatgggtacgatctggtcgtcattaccggaataaatatccacaacgccctgtccgatggctgccaggtgagcgatctggctgatgttgccgctggcttccttgatacctacgatgttctccacgtccttacacagcttcactacggtctccggcagaatattgcatccggtacggctgggtacgttatacagaatagcgggaaccttcacagaatccgcaacggtcttgaaatgacgatacagtcccttctgggttgctttattatagtagggacttaccagcagaatgccgtccacgccgtatttctccgcttcctgagacagatatactgcagtctcggtacaattggaaccggtacctgctactacggggattctctttgcaactttgtccacacagtatttgatagtatccagatgctcctcatgggtcagggtagatgactcacctgtggtaccgcatacgataatagcatctgtgccgtttgcgatctggaattcgatcagttcaccgaatttctcataattgacggatccgtcctcgttcatgggtgtgacgattgccacgcctgctcctttaaaaatagccatatgcttcctccatttgcaaaacgccagcgcacaatggcgccggcgctgattatccaagcttatttgatagcgccccatctgctcacgagatgacagtcatacgcttcttaaacgtatgcccaagataacatatacaggataccttatctttcggcgtgttcccctttcttcttccctcatcggtacctgttacctccgaaaaaatactcttgaaaaacgcaacctctatcttcttaaatatagttttatgatagcatcaacccatgtgactgtcaatcccagaccttgaattttaccgtttcaatcttggacacttcatccgccagaacacagatctcatcgttcagggtgattcccgtcagaatcacatccgtatctccccggcattccagtaatgccttcaggtcatcttccgtaataatatccttctccaccagtcccagcacttcgtccaggatcagcagatcgcattctccagtcgtcagtactttcttggcaaagccgatcccgttacggatgttctggatctcctcctgcttcttttcctccggtaattccacgaaattaccgtccgatttctcgaaacggaacagcttgatctccggctccattctgcgtaaaaaatcggaatcccccagtccctttcccttcaggaactgaataataacgaccctcttgccttctaccgctgcctgtaccgctcttccaatcgctgccggtgatttgcctctgccatcgccggtataaatatagatgcatccttctgccattccacacctcatggtctatctgcgtatctgacgctccctagctgtacacagttactaatatctatgcattcttttataccatatattgtcactttttgcaatcttttgtcgttagacgatggattcctgcacctgtgcctcctccagaagttccagtttgctgacggatacctcgaaagctactcttttctccacatgctcttcatccagttttttcatatattcacggctctggatccgtccccagatcgcacagcgctctcctaccttgaaatgctccgcataacgggcgttacgtccccaacagatacagggaatataatcggattttccgtacggacggtttactgccagcagcagatccgctatttctcttcccaacggtgtcttacgatacaccggttccttacatatatatccatccagataaatctggttcgtcttcgaactttcttccatttcttcaataaatttcacttctctggcaaacacagacaacaccagtctgttcttgcgctcctcatgacgattgtaggaacgaaactgtccgttcacacacaaaagcattccgacatagctggctgtcacgtccagtaatctttctgagaccatcaccggtataatgtcaaaactgtcgctcagtctcgtacatttgatgtccaccatgtagaatccttccccatagatctcatggctgtaggaaaaattgcttaccacttcccccatcaccgttacctgattgttttcaataaccttatctgtcatttttgttctcccttctacatcttctgactcttctacaacaatctttatgtattgcactactatttatactctaaaatccatcgtttgagtactaaaactcatcgcacaaaagggcaaattacgcacaaaagggatttcttttccatactttttcatatagaaaaccaccaaaagcgttgattttccacggttttttcttgcgtacggaaatgataagtgctatactgaaacagtttgaaaaaagattgaatcagttgcacgcatttttagaaaggcaaggatttttatgagacaaaaaagagaagatgtcagaaacgttgcaatcattgctcacgtagaccacggtaaaaccactctggtggatgagctgttaaaacaaagcggtgtattccgtgaaaatcaggaagttgctgagcgtgtcatggactccaacgatatcgagcgtgagcgtggtatcaccattctgtccaagaacactgccgttatgtataagggtaccaagatcaacatcatcgacaccccgggccatgcggacttcggcggcgaggtagagcgtgtcctgaaaatggtaaacggtgttatcctggtggtggatgccttcgagggtgccatgccccagaccaaattcgtgcttcgtaaagcactggaattaaagcttcccgttatcgtatgtatcaataagatcgaccgtcccgaagcaagacccgatgaggtcgtagacgaggtactggaactgttcttagagctggatgcggatgattctcagctggattgtcctttcgtatatgcttccgcaaaggccggtattgcctctctggatgctgacgaaatgggtactgatatggaacctctgtttgagaccattttaaactacatccccgctcccgaaggagatccggatgcggctacccaggtactgatcagtaccattgattataatgaatatgtaggacgtatcggtgtcggtaaagtagacaacggtaccatccgtgtaaaccaggatgtggtcatctgtaaccaccacgatcccgacaagatcatcaagaccaaggtcagcaagctgtacgagttcgacggtctgaataaagtagaagtcaaagaagctggcatcggttccatcgttgcgatctccggcatcagtgagatccacatcggtgacaccctctgctctcccgaaaatgtggttcccattcctttccagaagatcagtgagcctaccattgccatgcagttcatggtaaacgattctcctctggccggtcaggaaggtaaattcgttaccagccgtcacctgcgtgacagactgttccgtgagttgaataccgatgtttccttacgtgtggaagagaccgagtccgccgaccgtttcaaggtatccggccgtggtgagctgcatctgtccgtactgatcgagaatatgcgtcgtgaaggttttgagtttgcagtaagtaaggctgaggttctgtatcataccgatgagaacggcaagaagttagaacctatggagctggcttacatcgatgttcccaatgaatttgccggtgctgttattgagaagcttggtcagagaaaaggtgaacttcgtaacatgggttccatttccggcggcacttacacccgtctggagttctccatccccgcaagaggactgattggttaccgcggtgagttcatgaccgataccaagggtaacggtattctgaacaccgtattcgacgactacggcccttacaagggagatatccagtatcgtaagatgggttccctgatcgcatttgaagccggtgaagctatcacctacggtctgtacaatgcgcaggagcgtggtactctcttcatcggacccggtgaaaaggtatactccggtatggtcatcggtcagaccggacgcagtgaggacatcgagatcaatgtctgcaagaagaagcagctgaccaacacccgttcctccagcgctgacgaagctctgcgtctgacaccgcccaaaatcctgtctctggagcaggctctggacttcatcgataccgacgaactgttggaagtaactcctaccaacctgcgtatccgtaagaagattctggatccgaccatgaggaaacgtgccatgatcaataagaaagcttaagaaactatactattataaaagacctccatctgctgttcgcagcatatggaggtcttttggtaactggagagttagtgaaatatccccatagcccttggcagggtataagaaacgcggcacgcccacggcggacagaatgtccttccgaggatgtttatcggacggtggtgatattttctcgaaaagtgctgaaaatcagggtggagcgaacaggacgttcgcgacaggcggacgttgccatggatggcaactggagccgtgcccgtgcggattagaaccgatatctcacttttcgtcagaaaattcccaccgggagacctgacacctcggaaggatgttctatttgccgcaggcgttcgtgggggtatgacagcactacggttagttccatgttgctgtcaggacatgctccccggtcatctggacgacggtgtctgcggtaataatctggccgctgtactcccatccgccgaaggcactgccctcttttaccggggtaggaagttcaccgtaggtctcgccgaaggtcacctgtttggattccacggtggaaccgtcggcaccggtgccgccgtcataatcgaatttcacggtgaactgtgcgggaacccagtgagcggtcagagtcatatcgccggtgactttctccgactggaaataccacagcactgtctctccttctttttccgtataccacccgtcaaaggtgtagccgggcttataaggggtctcgggctctgtaaggaattcaccgtagcgtaccttccgggctgccacttcacttccgccgtccgtatcgtacacaatgttgaatccaccgcgtaccgcgaagaaaataatcattcccacgatcaccacgatcaggacaccgatcaggccgtccagaatgcggatgggaacatccttgcttccgtaaatgccgcggccgaaccattttcctttcggacggattgcttcctccggctgctgcgtcgtttccgactgcgtggtgacttctgctgccttttcttctgtattctctgttgtcacttgttcctgattcataatttttccttttcctaatctatcataagcaatttctatgtgctgcacactctcgaaattgcaaccaatattcgtattccggactgtcgtccttcatactcatattgttttactcccaacatagaaaacatcctttacctgcaagcagtcacggatgttttctatgggtgagtcttatatcattactttcttaccaggtactttctcatatcgatcgcgcaggcaaccagaatgatgagtcctttgatcacatactgcatgttcatgttgatggacaggaagttcagtgctacgaagatgattcttaagagaaatacaccaagtacgacaccactgatcttaccggtaccacctacgaaagagacaccgccgataacgcaagctgcaatggcatcacactcgtagttcaatccggtatttgctgtgttggaaccgatacgggaagactcgatgaaaccggtcagaccgtacatggcacctgccagtgtatgtactaaaatggtggttttcattacgttaacaccggatacctttgctgcttcgggattggaacctactgcaaacatgttcttaccgaaggtggtcttgttccagatgaaccacatgataacaacgatcaaagctgccagccatacatagttaggaatggcgattctcgcgccgccggcattgaaggagatcacgcttccctttaccacatcgttgaagtgctgatccagaccggacagaggctgaccgttattgccgttgatcatgatgtacattaacagtaggccgtatacgatcaactgggtagccagcgttacgatgaagggatgcaactggaatttcgctacgaagaaaccgttgacccatcccacgataccgccgaccaacagtacgatcaggatcaccagagggatcggaagtaccggaaggttcgggaacatcttggtggcataagtcacggactgcatcagggatgccgtgatacatgcggtcagtcctaccacacgtcctgcggacaagtcggtacctgtcaatacgatacatcctgcaataccacaggcaatgggaaggttcgccgcggacaggctgatgatgttgacaatggaagccgccgacaggaaattggagttctggatgtaagtgtaaataattgctacgatcagcaggatgtataaggcattgttaagtaaaaattctttccaataggtcttcttgtctctgctgtccagcttcttgtagtctgcaaaattttgctttacgccgttaattttattctgaattgctttgccgggattcatacgcatatcctcctatacatattttgcagcaagagacatgatctcttcctgtgtcgtatttttggcatctacttctcctgccagcttaccgccgctcatgacaagaattctgtcacatacacccagcagctccggcatctccgaagataccatcaggacaactttgcccttattggccagatcgatgatcagctggtagatctcgtactttgcacctacgtcgatacctctggtaggctcatccagcatcagcacctccggctctgtgagaagccatctgccgaggataaccttctgctggttaccaccggacagtgaccggatcttcgtcttctgggaaggtgtcttgatatgcatggcatcaatggcccatgcagtgtccttctccatggatttatcactcagataaaatcctgcttttttatgtttcttcagactggagatcaccgtgttctcccggatattcaggattccgaagataccggtggcacgacgttcctccgtcagaagtgcaaaaccgtttttaatggactctctggcattgcggtttctgacctctttgccgtccagtttgatcacaccgtcttttctggtggccacaccgaagatattctccagtgtctccgttctgccgctgccgtccagtccggccagacctacgatctcaccctttcgagccttaaaggatacatcctgcagcaaggaatatctcgcgcttaagtgttctacctccaatgccacttcaccgggcttgttggtcttgggcgggaactggttggtcagttcacggcctaccatcagtttgatgatcttgtctgtagtcaggttctgtgcaggctctgttgcgatccaggtaccgtcacgcatgacggtgacttcatctgcgatccgcaggatctctgccatcttgtgagaaatatagataataccgcatcctctgtcacgaagcatattgatgatcttgaacagatgctccacttcttcttccgtcagggatgaagtaggttcgtcaaatacaatgatcttactgttgtaggataccgctttcgcgatctctaccatctgcctttgtgataccggcatcgtactcatgattctcttggggtctacagcgatccccagttcttcaaaaatcttgttggtgtcttccagcatcttgtgctcgttgaccataatgcctgctgtcatgggataacggcccagccagatattatccatgacatttctcttcagtgcctgattcagttcctggtgaaccatggccactccattattcagtgcttctctggaatttttgaaattgacttccttgccttccagttcgatcttgcctgcatccttactgtagatgccgaacagacacttcattaaggtggatttaccggcgccgttctctcccatgagcgcgtgtaccgttcctttttttacggtaagggatacatgatccagtgcctttacgccggggaattccttgcatatgtctgtcatctgaagtaatacttcctgtcccatacgcatcctcctatacataaagagcggccgccgccagatgcagcagccgcttcttttatttacttgttattcagatcattctccggtgtaagtagcgtaagggatgtagatcttgttgctaaccttctcagagatgttgaagctgtcggtatctgccatcagatccttgccagcctggatgttcttagccaggtaagcaataccgtttgccataccttctgcatcctgcttgatggtaccggtcatcttgccgtctgcgatcagctgcttggctgcgtcagttgcatcaacaccgaatacaggaatggtggtgcagttgccatcgcctaagttgtagcccttgtcattcagagcggagataacgccttcagccataccgtcgttgttgcagataaccagctcgatcatgttaccagcggactcattgtactgagacaggttggtggtcatgtagttgttagctgcggttgcggaccagttaccgtcctggtcaacctgatacttatcggtattggatgcatcgaagtactccagcgcgggcttgcctgctgcggtgatcactgcatctgcatcttctacgccgtactgggtacgatagattgcttctacgttacctaactgacccatgaacattgcgtagctgatcttgccatcgccattcagatcaatagcatcgaagttgtctactacatactgaccaaccatcttaccctgcatatgacctgcttcgggagcatcggttccaacgaatgcacacttgtcatagctgcctaataccttaccttcatcctcatcggattctaccgcacggttgaagaagattacagggattcctgctgcgcttgccttgtcaacgatggcctgggaagcgtctacggaaccggatgttacgatgttgacgatcagaaggttggtaccctgtgcaatagcggtatcgatctgctcgttctgggtggtctggttactgttgccgtcataattctggaacttgatgcctgcttcggtaagcgcattatccagtgcggtacgcacgctggagatgtatgtatcactgtaggtgtaatagaatactcctacattcaactctccctttcctccgccgctctttccgcacgctacgaggctgagcatcataatgccgaccaacagtagtgacatgaactttttcatataaaatacctccttgttttgatgaaaatgtatgtgtttcatctcttgatgaggtaattatatggcatcttgtacataaaagatatacaaaatcttacgcatggggttaaaaattatactattctgtacacattttgttcatgttctgtacataatttgtaactattcagagccgaaaagcattacataatttcgtcgaacgcttgcattcgtaagaattatgtaatgcttattcggcaaagtaaccacatgagcaaaagaatagctctgaaagagcggttttgcgagtggggttctgaatagttactttctctcttcaaaagagaacaatatcttctggctctcccgctcgtacatgttctctctggtcacaatagtggtggctgtgtctatcacgctggggccgccggtctgtccgttgatcaggttcgccgccgtctccactcccagataccccatggcataggggttctgcacgatcagggcatccacctccccggtctccaacattcccacagagaccacattggagtcaaacgccaccacctgcgtcctgtctccccggtccagatcccggatggcccagcccacaccgaggctggtccattcgttaaaggtcaccaccacattgatcctggaatccgacaaaagcatctcttttgctcccgctctggcatcctccgtggtggaaaggacattgatggtggtaatatcctttactctcgggtcctgctccaccgtctgccggaatcccagttcccgttgctgcccgttggcggaattcacatcataattcacgataccgatatacagttcgtcttctcccaccgccagagctgcttccgccgccttcacaccggcctgcaggttattggtcccaatgcggcagcttaccatactgctgttgacatcactgtcaatgacaacgatcttaattcctctctgggctgcctgaccgatgatctccgcattggcattgtaatccaccgcagagaaaacgatcacatccactccgtcctccatggcctgccgcaccatctcattctgggtcacataatcttcttccgattccgggccgttaaacgtaacattcagattgtattccgtagccgccgcccgggcacccgcaaagacacttttaaaaaaggcgctctccgtggacttcacgatcatagccacctgggttttccctgtctcagcttcttttccgcagccactcatgctcataagaagcaggacacccgcagccagcagggacagtattttttttattttctgttttctcatactttctcccatcctgccgctgcattttcttccacctttggcatccgtatgatcacagtagtgccttcatccagttcgctttctatggaaagaccgtactcttttccgaaataaatcttaatcctgtcgttgacgttcttgatgccgatgccagaattatctcccggctccttatgaaggatcgaccgacactgttcctctgacataccgacaccgttatcctccacccggaagaccacatcttccccttcgctgtagatgcggatcagaatccgtccttcatccaccatgcggtccagtccgtgatagatggcattttcgataatgggctgcagggtgatcttgttacagtaatattgcagacagtcctcttccacctgaaactcataggaaaactgattcttatagcggaaattctggatctttaaatagcttctggcatgctctacttctttttcaatggggatcaattcgtgccccttgctgatactgatacgaaacagtttcgccagagcattgaccatctccacggcatcctgacacctttcttcctcgcagagccacccgatggcatccaacgtattatataagaagtggggattgatctgggcctgcagagcctttaactccgttttgcgcagggaaatctcttcctgacgtacctgcttcatcagtttctggatttttcttaccatgtgctcgtaggactgtgacagtgcctcgatctccgtggtgccttccacaggctgataaacatatcccgcagcatccttttcgaactcttccatagcccggatcagacgctgcaccggattggtcaccagtctggataccagaacactgaccaccatggtcgtcagcagaatgattgtcagcatgacacagatgtttcccaccagttccatctctttggccgtcaccagttcactgatatagctgacacccaccaccttccagttacagttatccagcgccaggacactacagatcagttcttcggtctcaaaggaaccgttgtggctcagatccagtccctccgtggcttccgtcttaagacccgaatacagcagctgctgttggggatgatagatgatctctccattactgtctgtgataaagcagtagccatgctgtccgattcccacatcgtccacataatccgatattttggagaaacggatatcaatgactacccgcagcttctgtccgtctgctccgggaatctcctgtaagaccgataccacccagggataatagtcctgcaacagagattccacatggggttccgacagatagagtaccccggggctgtaggaatccagttcgatataagacagatccttcagataatgttccttcagagtatgagttcccgtatgggaatccaccagcttcccctgctcatcatagatatagaccgccaccagatccgaccggacactgcaaagagtctccagtgtctgcccggtacttccgccgctctttgtcagatccttctcgatcagactcatgatctcctgcatatctccgatgtagttagaaatggtattggaagcctgagtcaccgcctgttcactgctggtatgtgccgcctgtttcatacttccgacataaagagaaaaaaagtaaaaagtggaccacaacaaaaacagggtaaccagtcccaccactaatgtcgtaatgataaaagaaagggacgttttttgcttcttcatatcttattctttctcctgtcgcatggcattgggagataccccgcaatactttttaaagcagtagctgaaataatgctgatcgctgtaaccgcagcgctccgcaatctcccgcatcttcatggaactgcccagtaccagttcccttgccgtttcgatcctctttttcgtcaacagatccacgaagcttgacccggtctcttttttgatcagggcactcaggtaattggggctcacatgaatgctgttgctgacgcccaccagagacagggacggatccccatactccttgtcgatgatctgcatggccttttcacacaggatctggctgctctttttcttgcccgcattgaccagttcccatacttccaggcaaagtgccgtgaaacgatccctggattcccgtatcggaccttccagcatggcaaaacgctggagcagggcggaatcttctgtcaccgtataggcaatgcggatcagcgccgaggacatccggaagatcaggaatttgcatttcagggcagcatcctgctgcacctccagtttgccgaatacatccttcagatagttttccagttcctctcgggaaccaccacggatcagattctccatctgagtaacacattccgccgccagctccatgtccatggtgttatcccgctcttcatcggcaatataatggatgccgctctctcccggagtgcaatatcccaatgcactcatagctcctctgtaggcctcgtggcattctcccagatgttctctgatacggctgacaccgatatgacaatgcattttcagaatgcgttccgtactctgtaccatctctcccacggcaatatgcagataccggtcgaaggtcgacgtggtggccgccagcactgcaatgatcctgccgtccatggcaaaagaataatgcttcatatatttttgcagtatcatatccacggaatgtaccagttccggtctcgtacggttcttcccgttggtatcctccaccgtgatggccagcaccgcatactgaaaggcattattacgatccttcaaaaagccgttgccaaccgcctgttcctgtaaaagttcctcccggtcctgcccctcaaagctggcataatcatctagcaaaaggggcagaaaaaactgttgcagatccggattatcatgttttctggcatcaaattccgcaaagattccgtcgatcttaagcttgatcttcttcagttcttccgtcagatccaccatagtgataggtttcaacatataactgatgatattgtactggatggcctgctgggcataagaaaattcatcgaagccgcttaagaaggcgatctgtgtggtaggacgtacctctctgacctgtcttgccagctcgattccggagacaaaaggcatccggatatccgtaagcagcagatccggttccatcctctccaccagttccaaagcttcgatgccgttctccgcttcccccacgacttgaaatccgatgctctcccagtcgatcttccttatgattgctctgcgtaattcctcttcgtcatctgccactacgattgtatacatcgctgtccctctctggtatgtattattttaaggtaagtatcttcccggaaaacgcaatgggaagggatatttttctggtactgttttcgcctgcaaacagaatctgggcaatgccgtcagccgatacggacgcaatcctgccggttccgtatttctgatgctgtacttcccgtccggactcacaggctgcgatgcaggcctccacttcccgtggcggcagcttctgcacctttttgtccggtgtctttagcagcgagcctctgatcccgacagccgtaccggtctttcttacagcgtttaacggcttcgttttctcaaacacttctcctgaaaaagcagaggtcagattcggtccaaaggtaaatacatacagctgttccttcgctctcgtcattcccacataataaagccttctctcttcctcataggcatttgcctccggggaatccggtacacagcccctccccggaatctgggaagggatcactcccgccagcatatccgccagatacactcttgtgtattccagtcccttgctggaatggatcgttgacaggataaaattactcttcggatccccgtagccctctcgcatcatctcctgcagcttctgtaatcttgcagggaaatcaaacaggctgttctcctgatctcccagggcctttaatatctccgccttgccactgtccaacccgtgggtatccatgaattcctgatatcccatataattcaggatccggtagatagcttttcctgctgactcataccgcatattgtccagatgggtagccagtgccttgcactgttttctggtgtaaacggatacctcatccatttccgccaccgtatccaacagtgtcagtcgtctggtattggcatccaccgcctccatggccgcctttttgctgataccggctcccattttgtaatagatccgaagaaatgcctccccatcccatggatccagagacaactgaataaaatcacagatatcgttgaccaccggatgggaaaagaaggtcatatccgaatttttcacccggcaggacaatcctttacgttccaacagatcaatgatgggaagtgcactttcgttattccggtataatactgccgtctcctgttcacagtcctgggctactttcagcagataattgtactgtccctgtctggatactgccttgatctctgtaacgcagccaccaccttctctggccgcggtcatcttcttcggatgtctgtttttattcttctggatcagagtatccgccgcccggacgatctcctgcctgctgcggtaattggtctccatgagaaggatccctgctcccgggtgtctgtcctcaaaggagacaagtgcctgcgggtaagctgcccggaagccgtagatactctggtcttcatctcccaccataaacagattccggctctgcgccgccagcaggtcgatcatatcatgctgtattttcgaagtatcctgcgcttcatccacacagaaataccgatactgctccctgaaatgtgcaagtacctcaggatactgttccagaattctgagggcgtagatcatctgatcatcgtaatcgatcatctgcatctgcctgagtttcgcattataagtacggaatatctccgggaatttctccacatccgtgtccatatcccggattttctccggtgtcagacgcatatttttcgcataggtgatatccagctgggtctctttgatatcattttccgtggcgtatttccccgttacttccagaaaagactgtttgacggccgccgaggcttccttatctgccacctgaaaaggcgttttcccggtacggtaggcaaaatattgcagtaccttctgggagatgccgttgatggtgcgaaactccagccgctctgcatccgcttctccgaacatccccgcaaaccgcctgcgcatatcattcgttgccgccaccgtataggtcactgtcaggatcgactccggtgttattcccaggcaatagatcatatagcccagtctgctgaccagtacggtggtcttaccgcttcctggaaccgcaagaagcagtaccggaccttccgtagcctgtaccgcctgcatctgctgttcgtttaactgtatgtgatagttccgtacaaattccgtaaaattcaattcattgtcccactttccgcctccggcatttttctgccttcctttgtcgctatcggctcaccgtccagtactgcatccagaaggataccattctcatcgtaagacagttttaaggagaaaaaggggcggttctcacgaagcagccggaaaaatatcttgtccccttcccagagatccagttcctccaccttattgatctccacccattccagcgctccttcgtcacactccctcggttcccccgtaaatccatccgccgtatacaggcacatatactcacagacgtcccggtataaaaaggtgatgattccccggaaccggtaggccgccagagtataccctgtctcttcctttacttcccggagcacacagtcctccgggctttcgtccgcctcgaaatgaccacccacgccgatccatttgtctttgttaatgtcattttccttcttcacccggtgaagcatcagatattttccgtcctgctcgatgtagcagagcgtggtcagatttctgagctgctgtatactcattttctttctcctctatatccctatcctctgaaaaatctgcccaaaattattatttcttacaatgttccgcaatggctgcgatcgctttctccatctggaacggttccgccagatgtgcattcattccggcggtcagacatttcttcgcatcttcttcatacgtcagcgcattttccctattcctcacattacaaatccatttttgcatttgaatgcatatttaatttattttaccatattgactgccggacggcaaccttattgctccagcatattctcaataaaaatcccatatcctctggtactgtcctgcacgagaacatgggtgacggcccctacgaatttaccgttctggatgataggtgcaccgctcattccctggacgattcctccggtcagggcgatcaggtcagaatctgtgactttcagttcgattccccggttcacgttgtcatgatcaagatgaatgtcggtgatctcgatatcatagtatctggtggtgccatctacggtacacaaaatctgcgccggtccctttcggatctcctgttttaatccaatgggcatcgcctcttccgttcccattgccagtgctttgtcattgcacttgccgaagattccccggacactgttgccggtaatatcccccagaatcctgtcatcagaatagacgatcattcccgtcatttcccccggatgcccggccgttcccttctgaatggagatgatctccgtctggtacagggttccgtcattcatttccatcaggttgctggtgtccacatcattgattccatgccccagtgctccgaaatttccctgactgtcaatgtaggtcatggttcccacaccctgggcattgtccctgacccagacaccaatcttatatttcttcgtctgatcctgtaccggatcgattttaacatcaaaatattcttcgccccgccggatcgtcaaaatcgctgcttctccattaccgttttcgatccgggtgatcagatcatccttgtccgccacttccgtgccgttcagtttcaccacataatcgccgcttttcaaaatatgttccgccggagccaccttctccccgttgacagaacggaactctccggtacctatgaccattaccccttcggtcttgacatagattccgatgggaacacctaccgggatcagctgctgatcctcgatcacccggatccccacctgcttaaaaggcaggatcccgaacagcttcacctgcatctcaaggctgtccgtcattccggtcttcatagtcaccggctgactcagatccagtgtcacggcaccttggggaatattactggttccctgttcactgacacttaaaatctcaccttttgcgggaatatccagtgccagtgattcctccgattccgcccgcatataaataacagaaggaatactgctgtccaccagataatagctgtagccaaagagtcccataccggccaggataagggcagcacaaaggcaggcccggtaaatccgcagtctgcgcaccttctgtttccagagctgcaaaatgatgactgcatcttctcctgcctgcctttttactttttccgtttccgtaatccatagcttcatacacattcccccactgaacttctgtcattgctgtatagggtatagtgtacgtcacattcctatttttaatctgtgatcaccgggatttgcggtttacagttttctccagtttaaccacaaatgaccacattcccactgcttttatattcctccgggcagtcgtccgtcagaatcgttccgctctgaaacgccccgaaggtcacagagctgacatttccgaacttagaatgatctgccagaataaaacattctctgcattgtcccatggcagtctttttcaccatggcctcattcatatccggtgtggtcaggccactctgcctgctgatcccgttggttccaaaaaagcctttggtaaaatgatagctctgtaaattcatcagtgcctgattgcctaccacagcctccgtggagccttttaattcaccgccgaccagatacacgcggaatcctgccgctgccagtgtcttggcatgcgctaccgcattggtcacaaaggtggcacttttctctgtcagataagaaagcatacttgctgtggtcgtacctgcatccagatagataaaatcctccggctggatcagtgctgccgctttggcagccaccagctgtttggcttccacattgacttctgccttctgttccaccgtgggttcatgtgttatcaccgtccggtcacatgccacagcacctccaaagacctttaccagcttcccggcattatgcaatgctgtgatgtcccggcgtaccgtggattccgacgtatttaacagatcttttacctcggccaccgtaatgctgtttttttcttccaataatttcagaatgatctcataacgttgttctgtcagcataaattgttattttctctttcctttgtcacatctgtctccagtatgatcttacgcacgggaagaatacttccgggagacatggataattcatccacacccattgcaaggaaacgtctggtcaacgatgtatctgcacccagttctccgcagatgccagcccagattccggccttatgcgcattttccacgaccatctgtatcatacgcagcactgcgggatgatgcggatcataaaatgcatccagcttcggattctgcctgtcgatggccagtgtgtactgggtcagatcgttagtaccgatactgaagaaatccacttccttcgccagctctgcactcatcatgacagcagccggtgtctcgatcataataccctgcttcggttctccgaaagccacaccctgttctgtcagttcctgctttacctctgccacgatttccttgatctgatgtacttcctccacacttataatcataggatacataatggagatattaccaaatgcactggcacggaacaatgcacggagctgtgtcttgaagatctccggtctggtcagacagatacggatggcacggcatcccatggccggattttcctccggctccatttcgaagtaatcgcacttcttgtctgcaccgatgtccagtgtacggatgatcacaggctttcccgccatggtctccgccacagtgcggtagatctgaaactgttcttcctcggtagggaaggtttctctctccagatataaaaactcactgcggaacaggccgatgccgccggcatcgttctgcaatacggccgccagatccttgctgttacctatattagcatagagcatgatcttcttaccatcaatagtgatattttcacgtccctttaaggtctggagcagttctttcttctcctgctcctcctgctttagttgctgcattttcgacagagtatcttcatcgggatccacatagatgcagccgtttcgtccgtccacgataccaagttttccgtctatggcatcggtcagagggatatcggtgccgatcagtgccggaatgctcatggtgcgggccaggatcgccgtatgggaattcacagatccatgtaccgttacaaaggataataccagatccttgttcaactgtaccgtctcggagggtgccaggtcgtctgccacaatgatcatgggttcttccgatgccgccatgcctgccgttctgccacccagcacgcttaatacgcgctcggaaatgtctttgacatccgcagatctggctctcatgtagtcatcctccatggaggcaaacatctgtgcaaaattgtctccggtggaagccaccgcatactctgcattcacctgctgcatatgaatgatgttctcaatggattcattgtaatcatcatcctccagcatcatctgatgaatctcgaaaatagctgcattggcttctcccacttctttcaaggctttctggtacagattccgcagctgctccatggcggtttgtctggcctgtctgtaacgggcgatctcccggtcgggattctcgatcttcacacgctttacctgctgctcatccttcttatgaacactgatcctgccaatggcaattccgccgaatacactttttccctggtagacttccatgacttttctcctctcctgacgataatattatgattacttagaggtttgctttgacaaattccgtaacagctgcataagctgcttcctcatcctcaccgtcgaaggtcagggtgatctcgttgccggccttaacagccagacccatgatgccgaagattctcttgcagtctccggtcttgccgtccttggtcagagtgatggcactctggaattcctttgttgcctttaccagttctcctgctgggcgagcatggataccttcgggatctgtgataacatatttaaattctttcattttcttatctccttttctgattttttatattacggtaactattcagcacccacattcgcaaaaccgctctttcagagcttcccttttgctcatgtggttacttttttcttcaatacacccaacagcagtgcggacactaccgtacctgccaccagtgccaccagatacatcactgcgttacctactacagggaatacgaaaattccgccgtgaggtgccatcagtgtgcagtggaatgccatggacagggcgcctgccagtgccgaaccgatgatgcaggaaggaagcacatgcagaggatcggatgctgcaaaaggaatcgcaccttcggtgatgaacgccaggcccatgatgaagttggtgggacctgcgtctctctcttccttggtgaatttattcttgaataacagggttgccagtgcaatggcacagggaggagtcatacctccgatcataacagctgccatgatgtcgtagttgcctgcggtaattgctgcggttccgaatacataagctgccttgttgaaggggccacccatatcgatagccatcatgccgcccaggatcaaccccagtacaactcggctggaatcacccattccgcttaagaaattgttcaatccggtattgataccgcccatgatcggttctaccacgaagttcattgccagtcccatgatcaggatacccactaccgggtagatcagtaccggtgccagcttttcaatggcatcgggaagcttatcgcagatcttgcgaagtcccaggatcagatagcctgccaggaaacctgctaccagtgcacccaggaatccggactttccgttggctgccagcataccgcctacaaagccaagcgccagcgccggtctgtcgccgattgccataccgatgaagcccgccagtaccggaagcatcagaccgaatgccacgccgccgatattcttgaacattgcggctatgggagtaatcgtaccaaagttacttctctgatctgcgggaagtgcattgatatcaacgttcagtccgtcgatcaggaaggcaatggcgatcaggataccaccgccgactacgaaaggaagcatatgggatacaccgttcatcagctgggtatagatcttatgagctgcgctttccttaccggttacggctgtagttgtttcactgctttccccgtggaaaacttccacgtttccactcattgcctgttttaccagctggtctgccttgccaataccgtcggatacctgacagctgatgactttcttgccgttaaagcggtccatgggtactttggcatcagccgccacgatgatgcagtccgccgcttcaatctcttctgcagtcaatacatttttcgctcctgcagagcctctggtctcaatcttaatctgacagtctgctgctctggctgccttttccaatgcttctgctgccatataggtatgagcgattccggtcggacaggaggtcactgccaacagcttaaagcctttcttcttctcggtggtaataccggtatcacttaatctgtcatcaatgctcttggcactttcatctgctgcatcaatgatctgtaaaaactcatctacgctttttgcgtttctcagggaagtggtaaaattttcatccatcagcatcacggacagtttgctcagcacatccagatgtacattatcctttgtattcggtgctgcaatcaggaacagtaaggtcaccggttccccgtccagagattcatactccacaccgtttttgatcaccatggctgccagtccgggggcttttaccgcatcacattttccgtgagggatcgcaattccctctccgattcccgtggtactctcttcctctcttgcatagacctgttcacgatacttctccacatcagacagctttccgctttttgccatcagttccactgccagatccagtgtttcctttttgtcagccggtgccgcatttagggaaatactatttttgtccaaaagatctgtaattctcatgttgtgacccatcctctctttttatatttatcattgttattgttctacctgctgtaatacctgcaagacttcttctctggtggccagattctcggaaaatgcactggcgcttcctgcagcaattcccatatggaacgcatgtacataatctttcttttccatccatcctgtcaggaaacctgccaccatggaatcgcctgcacccacaccattgaccagtgttcccttcggtgccggagctcccatgctctgtccgtccgctgcgatcaatactgctccttcgcctgccatggagatcagtacattctgtgctcccatctcctgcagtttcttaccgtaaggaaccacttcttcccttgtggagagcttcacaccgaagatttctcccaattcataattgtttggtttcaccagaaatggatgatacggcaataccttgaccagcaggtctctggtggcatccaccactgtcaggactcctctgccttgaatccgctccaggatccgctgatacatgtcatccggcatggtataaggaatacttcctgccaataccaggacatctccgtctcccagtctgtcaatcttttccatcagctgttccaaagcttttgcatcaatatccgggccacagccattgatctctgttccgtcaatacttttcagcttcagattgattctggtcattccgtgatcgattttgatgaaatcagcatttacgccaaactcgttcaatcttcggatcagttcctctccggtgaatcccgccgcatatcccagggctgtggaatccagtcccagattcttcagtacgatagatacattgattccctttcctcccggaagaatcagctctgatgaggttctgttcgtcatccccagctgaaagtcatccacggacacaatgtaatccagtgacggattgaaggtcacggtacaaatcatttctatccctcctgtctgtcatctttcttgttcttatgatgatattatatcttcatattcagtcaaattcaatcaatttaattcacaaatatggtgctttattttggttgaatttgcacaaaataaaaggatgaaatacttcttcatcctttttcaatgtttctttcactatagcatttcccttatctggcttctttaaacccgtttgcctgttctttcatttcctttgcattggaaagcgccgcttccgtcagtgcatcactgcctaacagtcttgccagctccgccagactttcctcttctgccaccttgtgaatgtccgtaatggtcatatcatcggtactgctcttttcaataatgaaatgcacatccgccatggctgcgatctgaggcagatgagtgatacagatgacctgatgggctcctgccagaatactcagctgctccgctactttccatgcggttctgccgctgataccggtatcgatctcatcaaagatcaatgtatcaatggcatctttccctgccagtaccgttttgatcgccagcatcacccgggacagttcaccgccactggccacctggttcaaaggtttcagactttctccgggattggtggaaatcaggaattccacatcatcatagccttttgttgtaatggcctgaccgggtctgactgcgatgtcaaattccaccgtcaggaaattgagacctatcagcgcatctttcaatttctgcgtcagtaccgctgcgttttttctgcggatctcagacagttcttcacaggctttcttcagtaacgcctgcttttcctcccactcggcgttcaatttctgcatataggcatcataatccgccagtttttccagataagcttctttttcctctttgtaccgcaggatctcttcgatcgtgttgccgtattttcccttgaggtgattgatggtattcagacgatcctctgtactgcgaaaatcctcttcatcaaattccagatccgacatatattcggagacatcatgattgtaatctgacaaaagactttccacctctgccagctgttcctccatctgttccagtgcaggatcatacatggtcacactacgcaatgtccgcagtgccctgctcaaagaattcccggcaccgtcttccgcgtcattgccactgagttgatagctctccgccaggctttccgcaatttttcggctgttggacattttgcggtacgcctgttccagttcctcatcttctccgggctgcagggaagcatccgcgatctccttttgttcaaattccgccagagactgttctctgcttctggaggtatcatccagagtttcctctgtgatctttttctccagggcagtacactcatgataaagtgcagccacccgccctgcgcattctgcaaattccgctcccgcataggcatccaggatctccatatgttttttcttgtttagcagagactggtgctcatgttgtccgtgaatatcgatcagcagctccgaaagttccttcacctgctttgccgtcacggtctctccattgatacggcagatgcttttcccggaggaaagttttcgactcaggatcacggttccgtcttccgaaggttccagatccatgctctttaatttttccgccagcctttcttcctcgcagtcgaagaccagttccaccagaccgttctcttctccccgtctgagcatgtctttctcgaactttcctcccagtgccagattcactgatccaatgagtaatgatttaccggcaccggtctcaccggtcagtatattcagtccttctccgaactctacctctgtctcccggataagagccagatttttcacgcgtaaactacgaagcatgtatttccccctgtcttacctttctatcatcagatggatcttgtccataaggatctgggtatcttccacggtccgcactgccaccatgatcgtatcatctccggcgatacatcccaccacttcggagaatttcagggcatccagtgccgccgccactgccatggccatgccggatacggtcttgatcaccagaatattctgtgccatgtccatggaaataaaaccgtctctgaggacgcggatgtatttatctcccatatgactgtcatcctgttttaaaatgacgtatttctgtttgccgccaccggtgggtactttggacagcttcagttctctgatatctctggatacggtagcctgtgtcacagcaaaaccggcttccttcagatagcccgccagttcctcctgggtctccacatctcttttttctataatctccacgatcttgcgatgtcttgttttcttcatcttgacctcatgcctttctcacaacaattcgtcaggaatctctcattttccgatgcaatacatccaggaagcttacctgattcagctgaataaactcggtgatcttctccgactgcacaatacggatccggtctccggtacacatggtcactttgtggctgccgtcataattggcttccacggtctggcttttgccctctctgccaccgggaatctctataacgatctcatcttccggggacaggataatgcttctctggttcaggctgtgggggcagatcggtgtcagggtgatcagtttcgccttgggctccaccagcggcccgcccgccgacagattatatcccgtggatcctgtcggtgtagtcacgatcattccatctgccttgtaatgattcagaagctgtccgttgacatagatgttgaattctatgatctgcagggatccgcttcgggaaatgacgatgtcattcaaagcccagccttccgacacggttccatccgcacagcagactttaccatttaacatcattctgcgttctttcttaaaatcatcccagatcaggcggtccagggattcctctaatccagacagttcgatctccgtcatataacctacggttcccagattcactccgatgatggggacaaggatcttcttcgtctctctggctgcctgcagcaccgtgccgtcgccgcccaatacgatcatgcagtccacatctaacggaatgtccgttgcttcctcttccgccacggaatccgcttcttccttccagtcggattccttgacctttaatttcaccgtacagcctttggtttccagataattctggatccgtttcgtggtcgcaagcttctgatccttatgcttgttggtatatatcagaaaatgcttcatagcttcgcactccttgtctgttacagggtatgagagttgtctacgatacctttgattacggcatcccattcaggggtataggacagtccggtcttttcctctataatagtctgtaaggcgctctccgcttcatgctcggtcagcgccagcttttcttcggagatctcctccggcttacggatatgcagcagatattcgatattgccctccggtcccttgatgggggaatattccagatgcagtacttcgaaaccgatgctgtccgcatagtcgatgatcttgcggatcacttcctcgtggatctgaggctctctcaccacaccgttcttgcccaccttgcctctgccggcctcgaactggggcttgatcagacacaccatctgtccgccggtctttaacagatttctcgccgggatcaaaatcttggtcagagaaataaaggacacatccacgctggcgaaatccagtgcatccgggatatcctccggggtcacataacggaaattggtctgttccatgcataccacccgctcatcattccgcagtttccaggctaactgcccctgtcccacgtccacggaatacaccttcgtggctccgttctggagcatgcagtccgtgaagcctccggtagatgcaccgatatccatgcagatcatgccgtccagcagaaatccccactgttccattgccttttccagcttcaggcctccgcggctgacatatttcatggtatgatttctgacttccagcttgatcttgctgacatcaaatccggtgccggccttgtcttccttctgtccgttgacatagacattgccggacattatgatggcttttgccttttctctggaaggagcatacccctgctctaccagaatcacatccagtcgttctttcatcttcgtctcctaattatttataatctttccagaattttctccgtgatgctttccgcatccaatccgatctcctttttcaaaagctctacatttccatgttccacataagcatcgggaatagctgccatgacacatttgatccgtttctcgtggtcattcagacaatccaacaccttttctccgaatcctccgctttggacattttcttccatggtcacgatcatctcatgatcttcacaggccgaaagtactgcctcttcgtcaatgggcttgataaatctggcattgatgatacttgccttgtaacccttttcatgcagaagcttctggacttcctccgctgtctttaccatactgcctacggcaaacaatgcgataccgccctctcttgcgatccactccgccttgcccagttcaatgggggcacggtgttcggcaagtccggcataagccgttcctctgggatatcgcaccgcaatgggcgcatccagtgccacggcaaacttcatcatatccgataattcccatttgttcttcggcgcacagatatgcatattgggaattcccgacagataggtataatcaaaaataccctgatgggtctcaccgtcactccccaccagccctgcacgatctatagcaaacactaccggcagattctgaatacacacatcatgcaggatctgatcgtaggctctctgtaaaaatgaagaatacaccgcaacaataggcctcatgcctcctgctgccagtcctgctgcgaaggtcaccgcatgttcctccgcaattcccacatcaaagaaccggtccgggtacatattccggaagcgctttaagccggtgccgtccggcatggctgccgtaatagccactacccgttcgtcccgctggcccagcttgcacataacagtggaaaacacatccgtataattggccacggtgcggggatgggaaggaattcccgtctcgatgtcaaaaggctctgccccgtggaatctggcgggatgtttctccgccggtccatagcccttgcccttctgggtaatcacatgcaccagcacagctcccttgactctcttggcttcctcaatgaccttgatcaggccttcgatatcatgtccgtctaccgggcctaaataagtcactcccatatcctcaaaaaacatcccggggatcaccagctgtttgaagctgctcttggcccggcggatactgttgacaataccgtcgccaccgggttttctcttgagcgcgttgtatatgccctctttcagatccagatagccggtcgccgtacggatattgttcagatatttggaaacaccgcccacattttcggagatggacatattgttgtcgtttaataccacaataaagttcgtctccagtttggctgcattgttcaaggcctcgtaagccatgcctcctgtcagagagccgtctccgatcacggatacaatggtggtcttctcccctttgagatctcttgccttcaccagtcccagtcctgcggatatggaggtagaactgtgtccggtatcaaatgcgtcataatcactttcttttctcttggggaacccactcatgccatggaactggcgtaagacatcgaaaccgtccttgcggcccgttaatattttgtgggtataagactgatgacctacatcccagatgatcttgtcctccgggagattcagagcaagatgaagtgccatggtcagttccaccgctcccaggttcgaacccagatgccccccggtcacactgatcttttcgatcaggaactgccgaatctcctccgccagttccccatagtctgatttatctatttttttgatatcgtttgctttctcgatcttatccagtaacattggcttttcctctgctatttcgttctatggaccaggtgcagcaacagctccttcaggaattcatgttctcccgaaaagctatccagaatcgctaccgcttccccggtcagccgttccacttctctgccggattcttccagtccgtgtaaagtcacataggtctgcttatgattctgtgcatcacttccggtagcttttcccagctccttgctgtcccctatcacatccagaatgtcatcctggatctggaatgcaatgccgacattgtaggcacacagttccaatgccgcaatctcttcatcggttgcccctgccagcgtagctccgatagtcatggccgactggatcagggctgccgtcttgttggcatggatgaacaggatctgttctgtggtcagaggttctgcctgttcctccgcttcaatgtctgcgttctggccgccgatcatcccatagattcctgccttgcgggctaaaatattcagtgccgccgccactctggggtaattcggatctaccggttctcccgaggtgcatgccggaaaagcacgaaatgcagtctcaaaggcataattgagcagtccgtctcctgccagaactcccattccgtctccgtacacagaccaggtggtcttgcggcctctgcggtactcgtcattatccatggccggcagatcatcgtgtaccagagaatatgtatggatcatctcgatcgccaccataaaaggctctataatatcaccgtcgccgccgaacatcttataggtctcctgcatcagcatgggacgcagacgctttccgcctgccataaggctgtaattcatagcttcaataacggtcttctggtatccttcctccgccggaagatattccttaagcaattcttcgattgctgccgttctcttctgcaattcctgtctgaataatgtttcttccatgtctgatgccaaccttcctctacctgccggtatacttgtatgcttactggggatccagcggttccagtccgccctcttcgttcagcttcatgacctgtttttccacccggtcgatctgttcgctgcactgtttcagcagactcatgcccttactgtatgcggtaaaagcctcctccagggaaatatcctctgcttccagctgtccgatcagttcttccagtgcggaaaaattctcttccaggctctgtggttcctgtgcttccgttttcttttttcctgccaaaatagcacctccgtctgctgcccgcatctatctgcatccccccggataccggtaaatgctatccgggaagtctttcttccttctgtatctgttccacccgggtatcgatcacgccgtcactcacccggatccgcaggcgctcccctgcttccacctgggtcacggaacggatatttttcccatcggtatcctccacataggaaaaaccactgtttaacttttccaaaggagagaccgctttcattctctcaatatacaatgccagattatgtctgcgttcccgcaggattgcctgcagccggttctgcagccggtcttccagctgtatgctgtaagtcctcttctcccgtatccggctggcggggcttaaatatttcaggcgcatttccatctgatccgcctgctgcctcttatgctgaagcactcgtcccatccgctgatacagcctgtcctgtctgtccagaatctcattctcaatatcactgacctgtgtcactgccaattctgccgctgccgacggggtcggtgcccgcagatccgccacataatcaatgatcgtggtatccgtctcgtgtccaaccgccgaaataatgggaacagagcagtcgaatactgcctgtgccaccattctctcgttgaacgcccacagatcctcaatggagccgccgccgcgtcccacgatcatgacatccacgccctgtctctccagtgcatggattccgttcacaatggaaggagccgccgaagccccctgtaccagcgccggatacaaaataatctgcacataaggattccgtctggaggcgatctgtatgatatcccggacagcagcgccggtatctgccgtgactaccccaagggtatggatatacttcggaatctgctgcttatactccggagcaaacatgccctcttccgccagttcccgttttagctgttcgtatttttcatagagggctccggcgccgtcctgcgtcacttccttcacatacagctgatatctgccgtcacgctcaaatacactcacactgcccttcgcaattacctgctgcccttccgtcagccggaatcccagacctctccggtctccggcgaacataatgcagttcagggcactggcagaatcctttaacgtaaaataaatatgtccagagggatggtatttacagttgcttacctcaccctttacagataccatctgtaaaaagtaatcctgcgtgaacatatttttgatataagtattcagttgtcgtacgctgattacgttctgtatcctactcaccggatttcatgatcttggcaaggatcgcattgacgaatccgccagagctttcctgtccgtactttttggcaatctcgattgcctcattaatagcaacgccattcgggatatcgtcatcatagcgcagctcatatgcaccaaggcgcagtactgcaagctccaccttgcccatacgggtggtatcccagccttcggtattctcattcaacagcctgtcaagctcggggattttctccctgatcttctcaaaacgggccgcaatggcatctgcatcctgccaggaaggaacttcctcattattctcgcggaacaatgcgatctgttccggcatatcctccggtgcatgaaactccacgcggtataaaagtttgaaaacctgttctctctgctcgtgtcttcccataatatcttcctgtaattcctcttatttatccttcttcatgttcacaccggcaatacggatgttcacatcagagcaggtcagtcctgtcatattctcaatggcatttttcaccttctgctgtactgcctgacaggtagcgggaatattgtaaccgtactccatggtcacagtcagatccacggtcacattcttgtccagcacctctactttgacacccttggtcaggctcttaacgcctaccttgctcatgagttcgttggtaacattaccagccatggcgctgacaccgtctacctcggtagctgctaaagatgcgatcatagccactacatcatcggcgatctgtacggtaccgatgctctcgtcttcccttaataccaggttcttcttatctatttctttttccatgatagctgatcctcctaataataactaattagttacagtataccaaatccttattcatttgtcacccaaaaagtcaaggataattgtttcccgttctgggcataagtgacggtattgctgttcccctgtatctgcatataggaaaaaatctcctgctcatcgatcaatgcatgacagatttcctgataacagagttcatctgcacattttatcgtcacttccgttctgccgccctctatggctctgtcgaagaccgcctgcatctgttcatggtcataggaagtaaagtaggaaccttcccgcacataataatttgcttccgtcgccgtacattccggcatggggatcaccgcttcgatacgatgcgtccgtagcagatcctctgtagtcacgcacagataatcataattgatctccggcaggctcctctgctcgctgccattctccatgcggtaagaggcatctccccaggtggtatctacataataatagtccccgtccacctgtaccagattccaggcatgagcttctccggtatccaccgttccctgcaccagggtgcacatcacccccagatgattcaacagatactgggtggctttggcatatccctggcagacagaggctcctcctaagaataccgaggcaatgttctgattatccgccgcactcagatcataatttgttgaaaagatgaccgcctcatacaccgcttttaccttatcgtactcagaagccgcctcttccataccggacagccattccgccgtcacactgcgaatggcctccgcccgcgctacggcctcttccttcgtctgatcgtaagtgcctgcgaagtcgattcctacggttttctcccctctggaatatttggtataagtatatcctgtggtgtaaaaaatctccggatgatctatcagcacgcactgaaatactttgtcaatgtcctgttcatccattccctgttccaacggttccgtggacagtttgatcgtgtcatccatagacccaatcgcctgctcgatctcctgataccagatctgttcctgcgcatccagactctcatatgcaaaacgagagcctccctcctctaaaagggaaaagctctctgtattgtcattttccgcagccgccgtctcctgcacaggcatagtatctatctgtgactcgggcagcacgatggtctggggtacttcctgcagaacctcctgtgaggagcatcctgtcaaaagcagtaacatcagaattccggcacataactttttcttattccgcattctatccccctacacactttttgtttccatataattactaattgcgtccgaactccgtcagcaccagtcccttattacggtccagagtcatgccgatgctccaggaattcacaaacagcaataaaggattacccttcatgtccttgaccttcttcatatcggaagtaccggacagcttggccaggtcgatctcatccttattctcgatccagcggatatgctcataaggcaggttctccagacggatctccacgttatattcgttctccagacggtatttcagtacatcgaactgcagcacacctaccacaccgacgatgatctcttccagaccggtattgaactcctgaaagatctggatagcaccttcctgagcgatctgctctacgcccttgacgaactgttttctcttcatggtatccacctggcgcactctggcaaaatgctccggtgcgaaggtcggaataccttcatactggaacttctccctgggcatgcacagtgtatctccaatggagaaaatgccgggatcgaagacaccgataatatcacccgcataagcctcgtttaagatcttacgttcatccgccatgatctgctggggctgggataatctcataaccttattgccctgcacatgacgcacttccatgttggcatcgaatttaccggagcagatacgcatgaatgcgatacggtctctgtgagccttgttcatgttagcctggattttgaaaacaaaggcactgaactcatgctccgtcgggttgatcatgccgatgtctgcttttcttggcagcggcgtggtagtcatattcaggaaatgctttaagaagatctccacaccgaagttggtcaaagcagatccgaagcataccggggtcaggttacccttctgcacttcctccagatcaaactctgcgctggcaccgtccaacagttccacctcgccaagcagcttgtccgctgcatcctctccgatcagttccttcagatgttcttcgtcctgaatggggatctcggtggaagttccttccttcgttcccttctccgtatcggaatatgcgatcacacactttttctcacggtcgtagacaccctggaattccttaccggaaccgatgggccagttgatggggcaggtggcaatgccaagctccttctcgatatcatccagcagttcaaaggtatctcttgcctcacggtccatcttgttgatgaaggtgaaaatagggatcttgcgcatcacgcagaccttgaacagctttctcgtctgggcctcgacacccttggaagcatcgatgaccataactgcggagtccgctgccatcagggtacggtaggtatcctcagagaaatcctgatgtcccggggtatccagaatattgatgcagtaaccgtcatattcaaactgcaatacggaagaggtaacggaaatacctctgtctttctcaatctgcatccagtcggataccgcatgtctggccgttgccttaccctttacgcttcctgccaggttgatggctcctccgtagagcaggaacttctcggtcagggtcgtcttgccggcatccgggtgggaaataatggcaaacgtccggcggcggttgatctcttctgtataattattactcactactatagtcctccaaatatatctcttatatctctaaaaatctattttcgcagttcttcgggatctgctatctatgatggatctgcctttaaaacagagcttccttcaaactccggttggattccgaaataatccaataccgtagctccgatatcggaaaaagtcggtctggttccgcgattccccggcgtcacaggcgcaccgtacataagaaacggagtatattctctggtgtgatccgtggtggctgtgtaagcgggatcacagccgtggtctgcggtgatcatcagaatatcatccggcttcatgtgtgcctggatctccggcagcttctcatcaaaataagccagtgccttcgcatagccgtccacatctcttctatggccgtagagcatgtcgtaatccaccagattgataaagcagagtccttcgaaatccttgtccagatattccagtgtccgctcaatgccttccgcattgccggaagtgtatacatgctcggtaatgcccttgcctacgaaaatatcctggatcttacccacagcaatgacatccttaccggcagccttcagctgatccagcatggtcactgcgggaggcagcagggaaaaatcgtgtcttctgggggtacgggtataatgtccgctctcaccgataaaaggtctcgcaatgacacggcccacgccgtgttctccctgtaaaatctgtctggcgatacggcaataatcatataactgctccacaggaaccacatcctcatgggcagcgatctgaaacacactatctgcggaagtatatacgatcagtttgccggtgcgcacatgctcgtccccgtaatccgcaatgacctgtgtgccggagtacggcttattgcacagcacatctctgccggtgcggatccggaactcttccagcacatcctcggggaagccgtccggataggtaggcagtggcttgggagaatagatacctgcgatctcccagtgtccgatggtcgtgtcctttccacgggaacgctccgtcatgcgggtataagctgccgtgggatggtctgttttctctcccacttccacgccgtcaatattaaacaaacccatgtttttcatattttccatatgaaaataagggctctttgacacgctccccagtgtatttacattgatgtcaccgtaagctgcggcatccggcatctgtccgataccgaagctgtccaatacaattaaaaagactctcttcattgtttcttccttttgtcaagttttccaggttaagttatgataccatccagattgttccgtgcttcgcactctcacaatctggaccgcattcgtaatccgctcatttttccgcgaaaaatggctccttactcatgtggtacggctctcgaatctccggatgctcccgcaagcgagcttgcatcgcaccgtcgtctctcgacccttggtatcataacataatttttcccctatgtacacaaaaatatcactgtgcaatggtgctgatgacgatattttccgccgcaatatccgtctttctttttacgatatcttcgatctgtgcccgctgcacatccgtcagttctgcggcattgaccaccacatccacggcatccccgttgatgctgaccacagcttcactgaaacctttcgcctgcaaaagcacctcggccgccgcttccttttccgcgatatcagtcatgcgcaccatactgtccaccgcttcctgtttctgggcatcgctgagctcagtactgttgataatctccaataacgtctctttattccgggctctggtctgctccttggaaagtcttgcagcagacagtacctccacaccgttcgttccggtcaacactgcttccccgggaatctccccttcgtccggcgtagcctctgccacctgcatatcttcatccagataatcttccatgacgatctccacatccgaatccaggctttccatatctgtgacaatgtctgtggaatccactgcactgagatcttctgtattatccgacgccagatactccttttccaggttggtccccgcaaactgcagataacctgcaatggctatcatgatggcaagtgcggtaatcataagctgattcttcttaattaagtttttcactgcgttccccttttccaaaggcctgtatctgccttcttgattttatactctattgtatgtacccgtctgtgcggatatgtttcctgtgactcatttttccaacaccttgactttgtgggcttccacaccgaaaagtgcctgtgcgatctgcgtgatttcactggtcatattgccttttccggctccttccgccaccaccagcaccccctccactttgggtgtgatcgtcttcgctacaaacggtgtgccctgactgccgtcctgatagacggtctggtatccggtattggaagaactcacggtgcgggttcctccggcggagtcctgttcttctgtctgggaacgatccgcggtcatgtctttttccacaattctttcctccgaggattccaatgtaatcatgacttccacctctcccagtccccggacggattccagcattttcttcagttttccctccagataggcggtatattcctccgcgcttcccgctgccaccgcccgggtttcggtatctgccgccgtctcctgttccccggttgtctgcgaaggagaagtgaaaattccggcattgtactgttctgcagtctctgtgccgacggaagctgcctgtggctcctcctttttcaccggcagggcgatgataaacaataggacacccaacaataccagaatcaacaggttgtcccgacggaaccatttcggagggccggaaccgcctgcaccgttacctgtaccaatgctgcctgtgatcttttcccagaattcacccattgcttctcacctctttttcttccctggctccggtttttctaccgtcattttccttagctctccggcagacttctccatcattccagccggattggtgcaatgtccacatggattccctccgtttctgcattttccctatccgttttcttctgatccgatacttccccactgttttctcctgtaacagctccctgtgcagaatcttgctcccacacatttgccgggtcatatccttccccggcttcctgcgccacagcagctgccgtattcccgatctcttcctgcgactgttctgcctgttcggaggcccgggtcagcacggtctgcaattcttgcataaatcctgtcacctgttcttctgcattccagccgtctccgccaccgaacatggtcagaacaggctgtaacaactgcagcaacagcataacggataataacagtttcaaatatttatcgtaggactccttcggtctgaaatgcactacggtctgtgcacagatcaggaagatcccggcctgtccgatcacccggtataaccattgcatcctcttacctccccctgcttccgatagctaatagtgccaatgtgatcagaaacaacagcatggctgtgcccgcagtacgaaacagaagcatccctgcatttcccatatgatccgtacagttggtcactcttttatcgctgacgatccccataaaagctgccgcacacttgatcaaaaacgcagtaaacaaaatctccagaagcggagccgcacacaccgccagaagcagtaacagcaaaagtacgccgatgctgttgcggatgacaacggctgaacccaccgccagctccagaagcccgtctgccgcatttccgatccccggcagtgccgaaagtgccttttccacggcggaggtcttgacggaatccaataccggtgtgatcaatgactggaacacgctgatccccgtgaccactcccagagaagccttgagaatccagcccaccgccttttccagaagttccgtcaaaagtgtcagcttttcctccacccagatcccgttgatcatggtcaacaggccatagcagtaaatcagtggtagtaccacacccaacagtattttttccgtaccatagatcagaagcagcatcagctgatacccggctcccactgtagccggccccgaggccactcccaccgcaagaagatacgtaggtaccatcagccttacaaacaacacgatattttccaccgtctctcttgcggttcccagaatcccggaaaaacattgcagcaggatcactcccatgagcagatagataaagtaaaagcttaaatccgcaatctgatgtttgtcgaaaacctccacgaaatgaatcagcagtgcagaaaggatccccagtacgatcagccagatcagaatatttttcctgcccgcagcagatgctcccattccctgtatcacttcctgcaacagggttcccgctgcccccagcacatctccctgcagcagctgtcccatcaattccgccacggagatccgggaggccggaaacagcttctgcatccctttttccagttcttccatgccatattcctgccacattgcatccattgctccctcactcttataaaataccatagatctgtcggatcaccgtaagcagaatcggcagtcccgcaaacagtaccgaaagttttcccagaatctcgatctgatccgataccgctgcgaatccggcatccttgcagattccggcgctgaattcacacaggtaggtgatccccaccactttcatcaaaataccgagatacccttttgcatccccgaggtactgctgtaatcccgcaaactcctccagcaactgtcccgtcagccccagcacataggaaaataccagcacactcagggcaaatccgatcagcagcgtatattccggccgctgttgcctaaattgtatggcaaaaagaactccggcgattccaagcaatgcaatcttaatgatctcggacatatttcctcctattaaaacgaaaacagagtctgtacagtatcaaacagatcatagatatacggaacgatccagctaagaaccaggatcagtcccgcaaggctgacgagaaaagcatgttcctccctgccgctgtgttttaagacctggctgagtatcgttacaaggattcctaccgcagctattttaaagatcagtcctattcccatctttccccgtccttttctcttctctctgtggtctccggaaccggcatcagactaacaataacagtatcagcagaccgctcatggctcccagtcctacggagagcctgcatttctgtgtaatttcccgctgctgcatatccgccgtatgttccagtccctgtctggacaattcgatactttttatctgcatcgtttcatccgcatagccctctttttccgcaaaacgcaaaaactcttcaatgtcttcttttttcagaggaagcatccgcagctgtctgcgaaagcttttctccgccagttccagaaaaccagcatcctccgtctccgcatattctcggtatacttcggtgcagatctctcccagcctgtctttccgttgtctgccggtctgtcggcagcattccggaagtgttgacccgttgtaccggatctcactgatccactgttccagaatgcggatgagttcccggatcgtatataatcttcctaagaattgctgccgataccacagtcccattccaaagcatcccaacagaatcagaaatcctccgagcatctgcattccatccgtccccttccttttaagatcactatgcggtcaaatatctgtcgcaggcaggattcacccaggcgctttgctgcgtccgtctcgtccgttccatgcagagtggccagcagaccacagccgcaggccgctgctttttgtaaggcccgcctgtccgtttcctcccccagttcatccactgcaatgacttgaggtgacatggaacgcaaaagtaataacatcccctgagccttgggacagccatcaagcacatccgtccgcatccccagatcattctgaggtcttcccagatagcttcccgccagctccgagcgctcgtccaccactcccacccgaagtcccgcaccatacgtattaccatcggaaatctggcggatcagatccctgagcagagtggttttgccgaatcccggaggcgatacaatcagggtattctgaaattttcctttcttatataattttggcaggataccgtcagctgctccccggatctcatgggcgacccggatattgataaacgcaatatttttcagagtgcggatcactgtttcattttccaacacagcctgtccgcacaatccgatccggtgtccgccttccacagtcaaaaagccctgtctgatctcatcggcataagcatacaccgaatcctgacacagccaggcgatcaactcccgtatctccgcttccgtcaccagatgcgctccgtaaggatgctcctgccattccccgccgttatttaagaaataatcttctctcgatgtttccacgatcaccggcctgtccacacgtagacggatctcgcagattttttccccattatccgctgtcttctgccagaatgctcttctcttttgcggaaaaatacgaagcaggctgtccatgtttctcctcccgtaactattcagaacctcatgcgcaaaatcgttccttcggaacttctcctttgcgaatgcaggcattcatcaagacttagctgatatttaatgctctgaatagttacaatatatgtctccgtggacaggatattcctttcaatcttctctttttttctatagtgtggtataataagcgataactgtttttatgacttttgttttggaggtttttatgaacataatcattgtgggctgtggcaaggttggctacaccctggtagagcaattaggcggtgagaatcacaatatcaccgtgatcgataccaatgaggaaaaggtgaattccatcacggatgatctggatgccatgggcatcgtgggcaatggtgtcagcttccagacactgtctgaggccggcattgaccatgcggatctgctgatcgccgtgaccggatccgatgagcagaatcttctgtgctgtgtcattgcgaaaaaggcgggacattgtaagaccatcgcccgtgtccgcaatcctatctacaataatgagattgcttttctgcgggaagaactggggcttgccatgatcatcaacccggagctgtccagtgccgccgagattgcccggatcttccagtttccttctgcagttaagatcgatactttttccaagggaaggatcgagcttctgcatttccgcgtgacccatgactgtctcttaaataattatgaactgatccatatccgtaccaccttaaaatgcgatgtactggtatgtatggtcaccagagataatcaggtgctgattccccggggtgattttgtcttccgggaaggcgatgtggtagctattgtgtccactcctcccaaggccaatgatttcttcaaaaagatcggtatcggcgccggcagggcacgtactgccatgatcgtcggtggcggaaccattgcttattatctggcaagaagacttttagaagtcggcatccataccaagatcatcgatcaggatcccgctcgctgcgagcatctgagtgaactgctgcccaaggcttccattatctgcggtgacggtacggatgaacgtcttctgatacaggaggggctggagaacgtggatgcttttgctgcactgaccggactggatgaggaaaatatcctcctgtcactgtatgcgaaacggacttcccgcgcaaaggtagtcaccaagatcaaccgtatcaacttcagtggtgtcttaagtgatatcaagctggatacgatctcctatccgcgcctggtaactgcagatatgatcattaaatatgcacgatccatgaatgaatctctcaacagtaatgtggagaatctgtataagctggaagacggtcatgcagaggcactggaattctacatcaaagaggattctgccgttaccaatatacctctgaaccgtctgcacatccggaaaaatatcctggtctgttccatcgtccgcggaggacaggctattattcccagtggtcaggacgagcttcatgtaggcgattatgtggtcgtagtactgacacatgcacggctgaatgatattaaagatattattgaagggtaattttgtagaaggacactatcatgaattttgcgatattgagttttattatcggatttattttacaatttgaagctttattcttactgcttccctggatcgtgggtatgatctacggagaatatcatgtggcactgatctatctggtgaccgcagctgtttgtttcattttaggaaaattgttaagtttcaggcacacaggacgttttaaggaattgtacgtcagggaaggtttcactgccgttgccctgggatggtttgtcatgtctgttttcggtgctattcccttcgttctcaccggagagattcctttttatattgatgctctcttcgagacgatctccggctttacgaccacaggttccagtatcctgtccgatgtggaagcactcagctatgccagcctgttctggcgcagcttcactcactggatcggcggtatgggcgtatttgtatttattatggcgatcctgccgatgatgggtggctccaccatgaacctgatgcgtgcggagagccccggtccttccgtcagcaagctggtaccgagagtacgggatactgcgaaaatcctctatggactttatatggcgatcactgttctgggcgtgatcatgctatgcctgtgcggtatgccgttgtttgattccctgtgtacgaccttcggcagtgtcggcaccggtggtttcggtgtcaagaacagcagtatcggcggttactctccactgatacagaatgcagtaacgatacttatgatcttaagcggtgtcaattatacggtatatttctgtctgttaagcaggcagtttaaggaagctttttccatcgaagaagttcgttggtattttttgatcattttcgccagtgctctgacgatcgcctggaatatccgcccgctctatgcaactttgggagagacactgcggcactcctttttccaggtaggaacgatcatcaccaccaccggatttgccaccacggatttcaatatgtggccgcaattgtcgaagacgatccttctgcttctgatgatgatcggagcctgtgccggcagtaccggtggcggtataaaggtatcccgtgtgctgatcctcttcaaggcgatccgcaaggagctgtccatgatgatccatccccggatggtgaaaaagatcaagatggacggacacaatctgtcccacgagacgcttcgttccaccaatgtctatatgacggcttattttatcgtactcttcgtttccctgctgatcgtctgtctggacgaatatgacctgagcacaaactttaccgcagtactggccaccctgaacaatatcggtcccggcctggagttagtcggtcccacccagaacttcgcattgttcagtcctctgtccaaatgcgtgctgatgttcgatatgctggccggacgactggaactcttccccatgctcgtgatcctgctgccgtcctgctggaagaaatattaattccttaatcacaaaaatgagtctgtgatgacatttttaatcgtcacacagactcattttttcatgcatacctctaatcaaatgttgaccgaaatgagaacgctacatatcattacaatcattatatgatgtcggggtcaaaagcccccgactttgatgcctacggattgttccgtgctacgcactcc

SEQ ID NO: 5766 - DNA, 715 bp, Unknown
  gut microbiota DNA sequence
ccttcgtccgttcatccggctgtccaaagccaacataaatatctgctcccctaccggtatgtacaaatttaccttcttcatctacaacggtaaatgccctcctcggaatttccagtgtcaccatcttttcttctcccggtgcaagttccacgcgcttaaacacggcaagtttaggattgggcacttcgttgatatcctcaacctgtacatagacctgcaatacatcctctgtaaaaacatctccgtgatttgcaacggttacttcaacacctacactctgttcttccgtttgtgcatataccacatcttccgtcaattccgccctcataactaatgtatcagcataattcagcccataaccgaatggataaagtggagctttttccacaaagcgatatgtcctgttcttcatggaatagtcatcaaaatccggcatcccctgtaaattgcggtaaatggtaaccggcaatttacccgaaggtgatatttctccaaagagtatatctgcaactgcctttccacctcttgctcccggataccatgtctgaagaactgcattcgccctgtcatctgccaggttcaaatccatagcacttcctgccatcatacatacaataaacggaactcccatttctgccacgatttccaaaagcctctgctgtgaaggcggaagcatcagcccctgcttgtctccggatgcatatgcattgcctgt

SEQ ID NO: 5767 - DNA, 9557 bp, Unknown
  gut microbiota DNA sequence
aactgtcattgcctcagagatacggtcatcctctcttgccagtttttctacctgatctaaaaacaaatggcagccttctgaataaagtaccctgacatcatcgcctacatagtcctgaataccttccagtacagtaacataccttgaagccgtcccatgataattgccgatcagggcttctctggaattggcattgggaccaatgactccgattgttttaagtttctttttatttaagggtaaaatgccatcattttttaacaatacgacactcttgcatgctgcctctatggaaagctcaatatgttccctacattcaacaacttcatacggaatattatcatattctgtctcatcaaacattcccagcaagaatctggtcgtaaataaacgaatggctgatttctgcagtagttctttggaaataagcccctcttcataggcattcaggattttctgataagtacatccgcaattaacatcgcagcccatctccagagccagtctgacgctttcctccggtctgtctgtcaccttatggtgttcatgaaaatcacggatagcccagcagtctgaaacatagtgtccctgaaatccccactgttttctcaaaacctccaccatcagataactatgagcacagcatggttcaccattggttctgttatatgcgcccataaccgcttcgacttttccttccctgacacaggcctcaaactgcggaagatacgtttcccaaagttctttcatgctaacctttgcatcaaaatagtgacgtttttcctccgggccggaatgtactgcaaaatgcttggcacacgctgccgtgcgcagatattctccctctccctgcagacctttgatatatgcaacacccagtattgcaatcagtgtcgggtcttctccataagtctcatgtccacgcccccagcggggatcccggaagagattgacattgggcgaccaaagtgtaattcctttataaatatcacggtcttcatgtttttcattttcattatatttggctctcgcctccgtagaaacggcaactcctatccgctccagcagttcttcatcaaaagttgctccaagcccgattgcctgtggaaaaacagttgctgtacccgctcttgcaacaccatgcaggccctcattccaccagttatactccggaatatccagatgtggaatttcatctgcgtcaaagcgtagctgtgaagccagttcctctacgctcatctgctccaccaattcagtagctcgtctgactgcctcttgtctgttcataaattcctccataagttttttctgattattagctatataggcttaataatcttgcctctgccacacaggtatcataatctgccgagtaaggaactttctgcttggatctgaatcattagaaaagctgcgctgtcattttctttttgtcttctctgatactctgttggcagaataccgtatttctcccggaacagtctggaaaaagcctgactgttggggaaaccgttctttaatgcaatttcgcctatggtcagatccgtttcctccagttcccgcaatgcatgttcaaaccggatgctccgcagataatctttatagttgattctgccatactgacggaacattttcgacaagtaagtagggcaatatccaaatgttgctgccagagtttccagtgaaatttcttctgcataatgttcccgaaggtatccagtaattctttcaagatgtcctgaatgagtattccccggataataatccttcttttcctcaggtatccgataagcggttaccagaagatatttcagctgataaaagatactctgcatcaacagttcatagccgtactcttttctgatctgctgtctgtacattttctcaagtaatgcaaaaagttttccatcctcttcctttttttcaccggaaaaccgcattatctgtttttccattgggatctgtaaaacaattgcctcatttcgtcccgatgtatgaatggaatgcacttcattgctgttcacaattataaactttcctgccggaaggacatattttttatcgccgagataaaaatctacctttccctcccgcaaggcaaatatttcaacactgctatgttgatgcgcctcacgcatatattttccgtctgcaccctcgaaacggaatagcttaaagggcagtccccgatccggcaccactgcttcctgccggtatatcttctcttctttcataatcatccctaatcttccacaccggaagattttctgttccatgataaaatctcaccggcagtttcccggagggggaaaattctccaaacagcatttcggcaattaccttaccacctctggctcccggataccaacaatccacaatggctttcacattcgggttgtgttccgcccatggcagatctatggcgcttcctgccattaacagaaccgccaccggttttcccatcgctgcaacggtttccagaagttcttcctgaagttccggcagatttaatcccagtttgtctccgctggcatattcattcccagcatcgccctgtttatggttgcatccagtccaaggcacattactgccacatcggcatgttccacggacagctttacttgctccgtggtacgcactcccacttctccgctgcggtccgtgctaatcatgtgccactctctttatttgtaaattctgtaatttcccgaaagtgccagcatggcaaacaggtacaggaaattatcataatatcgtctgtccccggtgcggagcggagtattccagaagcggtctacgcattcctttatatgaggaccgtctgctgccagtgatgcctgtgcattgactgctacaatggcaaccggatgcagtgccttctcttccagtcttgttccatcaatcaggaacacaccgtcccagtgttctctctgctcttcacagtaaaatctctgcagccggtttgcgatctccgtctgccacggatctttgtcataccagagatgatccatagcaatgttggctatggtgcggtatgcatcactgtagtaccagtcatgctttccgaagatctcctgatgcccagcatggggtgtcccgtcatagtctgcgtattctgcgctgagaccggtttgtggatgacatgccttatgcagatattctctgctggctgccgcagcctgtctccagaattcccggtcttcttcctccaccttctccgcaaacatctcataaaaatgaggcagatgatatgaggggtcagaaaaatccatgtttgtgacaaatttgatcagatgattggaaggctcccacataggttctcccggatgtccaggctcccctttgtggatacattcccgcaggattgcctttgcctctttgctgtaggcaaaaattccttccccatccccccaacgggcggaggcgaaaaacaatgccatggcaaaatactcttctccgtccggtgccggtccctctgcattgtgcgttccatccgtgctgcaggaccaggcaaaatagttgcggcagggtcctgccggaatatacatataagtccgcacccacttccagagacggtcaaattccgctttcttatctagctgtacgcagaccatcatgccataggacattccctccgtgcgtacatcatgattgccggtatcctccagatacgccatatcatctcctgcctcatgataaaaacgttctgcctccgttccgtaaaatatggtttcaaaggtctgttccagtctttctgtaatagcggtctcttcatatccgcactctttaaatacatttcgataaataccagtctgatatgctcctgccatttgctcgttctccaatttttattctttgacgccacccaaagtaagtcctgctacaaagtacttctgtaagaaaggataaatacagataatgggcagcatggtaatgatcgttgccgctgcacgcacggaagtcggtgttacggttcctgcggcattcttcattgcctccgctgaagttccctgattggttacggaggataacagcttcatcaattcatactgcaatgtggtcagattactgctcatgcgattgtaaagcatggcatcaaaccaggagttccactggcctaccgccacaaacagggctactgtggcataaaccggcttacacagcggagaatagatcttaagaaaaatagtgctgtaaccggcaccgtccagctgtgcggattcttccagactgtctggaattccgttcatataagtacggatcaccagcatattaaacgcacttaccattccggggatcacatatacccagaaactgttggtaagccccagccccttatataagaggaatgttgggatcagtccaccgtttacatacatggtgatgacccagaacagggaaacctctctctggaacaggaatcttttgcggctgacaataaaagcaaggattgcattggctgccaaagacagcagggttccgatcagggttctggctactgtgatataagcgcctgtgatcagattatctttatgtaaaaccgtcgtatagtttttccaggtgaattttctcggccacaggtagattcctccccgcagggcatccgtaccgtcattcaaagagattgccaaggtattcagcaccggatataatgttatgatcacaaacaggatcatgatgacactgtttatgaacggaaaaatgtcgaattttttggacttgatcttatattgtgtatctatcattgtaattaccatctctttctgttttagaataactgctcttcaccattatgttttgcaatctgattggccagaacgatcaggatgatacttaccaggctcttgaagatacctgcggctgtacctattgcataatctccctggctgataccccatttcaatacataaatatcaatcgtctgggagaacttctgtaccaatccgtttcctaacagatactgaatttcaaatcctgcatttaatacattccccacattcatcagcagtaaaattacgatggtcggtttgattcccggaagggtaacgtatttgattttattccatcttcctgcgccatcaatggcagcagcttcatacagggaaggatcaatggatgtgatggccgccagatagataatggcattccatcctgtctccttccagacatttgcaaatgctacgatcggccagaaatacccgggatgggcaaagaaattgatcggctggctgatcacatgcagatttaccaatacttcatttacaattccggtaccggacaacatatcatgcaggataccggttacgatgatccaggaaaggaaatgtggaagataagatatcgtctgcactgtcttttttccgcccctactcttgatctcattcaatagaatagcaaatacaattgcggtaacgaaagttgccacaaggttgatcacacccatggccaatgtgttacgaatgacccgaaggaatgtcacatccgagaataacatccgaaacttctgaagtcccacgaattcggagtgcaggattcccagctgcggcttataattctgaaatgccatcgcccatccggctaagggaagatagtaaaaaatcactccatagatcatcattactcctgcccagaaaagcagaactttttgccttttgatttctttccatgtgataggtgttctggtttgttttactttttgtttcgattttgttctcgttaacgacatatcctcgctccttaaaaaacgggcagatgaaattttacctgcatctgcccattctcaaatttcatttatatgtttttatttgaactttgctgccagttccattctgctgtccagttctgcctgtaattcactgataaaatcttccggcttgcaggcattatatgcatccatataatctgcccatgctttgtcgaaatcagctgccataactacctgaggaagctgctcatgctttacttcaccgatcttggtccatgccataccaccgggtgtgctggtattgaagttattggagaaggaccacataggataccattcaccgggggcttcgttagtgcccagcatttccacataagtctcgacgccatatgcctggaatgcttctttcacatcgtcgtttaatccatcgaagaattccctcgcctggccatctggcttgtttgcattgataccatcatcactggttccgttgtactgagggaaataggaataagagcacatatgggatgccttatactctgtatcggaagcctgcattctctgctccggtgttctgtagaattcaccgttctcatctacttcatagtcaacaccttccacaccccagaaacgaaggttatggatatcctgatccagcagatcattgatcagcttcagtgcgccgggaacatccttacagcttacagtaattgcaagtccgcttccggaattgaatgcaccaccggcattatgccactggttttttacactttcatcaattgttataggcagtggaatatagtcgcatccctgtgcatccagtcctgcctgcttgatggcatcgcctgctgtgtaagcgaaatcccaccactgatcgatcatacccaggacacgtcctgtagaaagcttggaaatatactcatcataagactgggtaaaggactcggggtctacaatgcctttcttgtattcttcatttaattttctaaaatactttactgcggtatcggaagtgttgtaatccagtaccgtcagcgtctcaggatctaccatacagcttccgtcattgggataaccatccaagaactgaggtgcgttctccagacagaagtatctccaatcatcacagagaatggtataaggaatattggctgttccgtcttccatagtaggatttgctgcattatacgcttcgatcagatcaaaatactgatccatggtccggatctcgggatagtctgcccatttcagaactcttgcctgaatccaaaatgcttcatcattatgtgcacataccttctcttcgttcttgatgcagctgaactgcgggatccagtaaatgtggccgtcttcctgacgaagcttctcccactccagatcagtaaacagattcttgatattaggataatcatccagataatcatccagtgctaccaatgctcctgcctcatacagctgtgtggttccagtctgtccctcaatgaagtccggatactcaccaccggcgatcatggtacccacagcttcatctgcagtctgtccggtcagccaggtctcttttactttggcgcctaccttctctgcgatcagctgctgcacttcattgtcgtcattgatctcagatccagctaccccaaaaaatgcggtgaactctttgatacctgcttcttctgtggtactgttggttcctgcgctcgttgtaccatctccggatgtctggttgccatcactgccacatccggtgaacagtgccgctgtcattgctgacacaagtaacatgcttacaagtctctttttgttcatgttgtaactacctccctttcgataaatctattttacctttttgagaggaactaacaatcagaggaactatagcaaaagacaggggaaattataggtggttctgtaatttcccctgtcttttattctcttactctccctgttgcatctttttacggaatcttgcgggagtgcagcccttgatctgaataaaacggttcgtaaaataatccagatcatggtagcccacatcttctgcgatctgaacgatctttttatcggtacgcaacaaggcatccgcagcctgctccatccggtaattgttcaggtagtctttaaaggattgtccgtactttttccggaaaagctgacccagataagcactgttgacataatatttctcactcaggcttttcagtgtaatatttgaagcgtaattttcccggatctctttttccaccatacccagaattcctctggatacattcttccgcagctgtgacagataatccgcatattcgcaggcaaatctggtcagatgtgccttacttccgcgctttaccccggtctcaaagctgctctcactgatgacccttaagatttcctcctggttcacgtcatcatcctgttcacaggctaagtggatcagctgaaacaacagataattaatattcagggtcatcgtctccccgcaaataccgcgtttacacatttcttcataaaagaaagccaccgcctcccggatttccagatgattgttctgttcgattgccttcagcaggccatccaggctctgcttacacaggatcagtccttccggagatacctggacctcctcctcatagaaatagatatccttctttgtccgaaacccctgaaaagaacgaagcatacaggtattgccgtaagactttgctatgctgctgatatcctgcactttttttcctgccagcatcaccacatttgtctgtaaatttgatgcaagatattcccggaatcgttccagataccgttttacatccatcccacttttttccggaacataatcaaacaaaatcagtccgatatcgtagattttttcattgacagaaacatcaaacacactcagatctgcatcttctttcagatattccctgctgtattcatacagccgcctctgtaatgtccgcatttctcgatctgtcgttccctcatcatcataggatccttccgtctggatctccacataacgcacaccggttccacatcgcatgtgttcatgtatatatctgacattcaggtcatcaaacttcccttggatcaatgcaatcatatgtcttgccagataagcctgctccagcttccggttcttttcatgatccagctcctctctgttgcgcagagcaagtaccttattcagtactttgcacagaatctcgctgtctaccggctttagcagataatccgtgcagtcattctgcattgcctgttgtgcaaaactaaattccgcatatccgctcagtataacaaaataggcatctgaaattttctctttacggatgtgttccagcagttccagtcctgtcatctgaggcattttaatatcggcaataaccaaatctaccttttccttcttcaaaaaagccagtgcttccatcccatttgctgctgttcccgcaatccgaaagccttccttctcccaatctactaaaagtttcaatccctgtaaaataaacggctcgtcatctaccagcaatactttcagcatctgttttaccctcctgcaaacagggaatccgtatcgtaaccgtggttcccactccttcttctccttctacacggaattccactctgttttccgttaccattttcaatctgacacaggcgttgataatccctactcttccgccgcccttgagcatctcaatgctggcattgcacatgttgttctgtagctctgtaagtttggcctccgccataccgcttccggtatcttcaatttctatctccagcccttcttcctgacggcctatccttacaaatatccatcccgggctggatttgctttcaatgccatgcacacaggcattttcta

SEQ ID NO: 5768 - DNA, 235 bp, Unknown
  gut microbiota DNA sequence
cccgccctgtgcaatgtggactatgcgtccatggagctgctccacgcaaggctggtgcggacgaccacctgcgtggacggctgccgatgcgactataccatctgcggcgataaggatccatatgtaaaggaacatcccgaataccgggatgaaaacggatacaggaagaataagtaatgcttttacaggtgattctggaaggtcttgggctgggggcactgctggttctggtctg

SEQ ID NO: 5769 - DNA, 171 bp, Unknown
  gut microbiota DNA sequence
agcagtcacgtctgttcttcattgaccttacaaaacatatacgttttctccgtgctacgcactctcgaaatcgtaacaaacattcgtattccggactatcgtcctgcatactcatgtttgtccgctcctctcataggaaacatccgctgcctgctagcagtcacgtctgtt

SEQ ID NO: 5770 - DNA, 218 bp, Unknown
  gut microbiota DNA sequence
aatgatctccccttcgtcaccatcgccacgggtagccgcctccagaagttctccattctcataggtcaactttacagtcaagccatccagtttgagcatcagcatcacctgctgctcacccatgaaattcagaagatccatactgctcttcgtcttatccaaagacagcagcgggatctcatgtctggttttctccagcctgcttaccgcaggatagc

SEQ ID NO: 5771 - DNA, 603 bp, Unknown
  gut microbiota DNA sequence
actctttcaactcgtcaaagagtctgtcatagacctcatctgacacactgggagcgttgcggttataatactcatcccgataacggttgagccggtcattcaagtctctctgcttttccaaaatattctgttccattatgctgcctccttttcaagtacccggaaggacataaccagttcttcttccgtatgcttctgttcactgtcgaaaacactgcaaacaccgtctgcaaactgccagtgggcggctctgccccaccaaaggatcgggccgcggccgccgttgcctctgttggtagacgcatctggctgattcgctacggtactataaaagccctgcgtgtttaccagcgtaatgttccgtatctgcccaatacattccggccggcagtgatccaatatctccaactgtgtcccttcccgaagtgtcctgcgcagctgattcaggtttttgatcatgcgattttctcctttccccgccccacagggcaattctgctgtgcggtatgcagcccatttctgccggctgcatacttgccaaaattcaattcatggacaatacgctgaatggcgtcatcatcgtcccacgctgcgtgaagcgta

SEQ ID NO: 5772 - DNA, 139 bp, Unknown
  gut microbiota DNA sequence
ttaggacccgccccgatatgagcataaaagtgggatgataatcccacgatatgcgaatattgggtaggattgtgggagtgcgtagcacggaacaatccgtaggcatcaaagtcgggggcttttgaccccgacatcatat

SEQ ID NO: 5773 - DNA, 1792 bp, Unknown
  gut microbiota DNA sequence
tttttattcgtactcagcgatatcgtagatcagacgctcactgtcttcccagcccagacagggatcggtgatggacttgccgtagcagccggcacccaccttctggttgccttcctcgatgtagctctcgatcatgacgcccttgaccagcttgtgcagatcggggctgagtttacggctgtgcatgacttctttggtgattcggatctgttccctgaactgcttgttggagttggaatggttcgcatcgatcacgcaggcaggattcttcagatccattttttcatacatatcccacagacggatcagatcctcgtaatggtagttggggatattggcaccgtgcttgttggtagcaccgcgcagtacggtgtgtgccagatcgttgccgtgggtattcacctcccatccggtatagatgaaggagtgggggtgctgtgccgcatatacggagttcagcattacggagaaatctccgctggtaggattcttcataccggcagctacatcgaagccgctgacggtcagacgatgctgctgatcctctacggaacgggcaccgatggccacataggagaggatatcggatacataaccccagttctccgggtataacatttcatctgcggcagtgagaccggtctctttgatagcgcggatgtgcattttacgcatggccatcagacctgccaggaaatccggtttcttctcgggatcgggctggctggtgatacccttgtagccttcgccggtggtgcggggcttgttggtgtagattctgggcaccaggatcagcttgtccttaactttctcattcactttggcaagacgattgacgtaatcacatacggaatcttcgttatcggcggagcagggcccgataatcaccagaaacttattgcttttgccggtgagaacgtcacggatctctgcgtctcttgcttccttgatcctgactaattctgccggaaggggcagctccttgcggatctccgcaggagtgggcagttttttgataaattcgaaactcatggtattccatcgtgcgcagggcacgtcctttctgctaaatgtcattgctcattatagcccagatcgtgcgaggatgcaagagaatttagcgatttaaagcgaaaaagagaaatggaacggataaattgctgtgctaaagcgttaatttggaaaattatattgacaggtatacgggtttgccataaagtaaaaatgtatctgaaatgttacaaaaaaagtacgagagagggcaaaattatgtacggaacaatttgggcattgctgccgcctgtggtggcaatcgtattggcactgatcacaaaagaagtatattcgtcactgtttatcggcattgttacgggagctttgatttataccggattttctcctattgcaacgctggatacggtgatcaatgaaggatttatcaattccgtggcggatgcatggaatatcggtattttcatgttcctgatcctgttgggtaccatggtagcactgatgaacaaggcaggaggctctgcagccttcggcgaatgggcgaaaaagcatgtaaagaccagagcgggagcgctgctttccacctttttattaggtgttctgattttcgtggatgactattttaactgtctgactgtaggctctgttatgatgccggtaacagacggacataagatttcccgagcaaagctggcatacattattgatgccaccgcagcacccatatgtatgatcgcaccgatctcttcctgggcggccgcagtatccggtatggtggatg

SEQ ID NO: 5774 - DNA, 4770 bp, Unknown
  gut microbiota DNA sequence
gtattgaactgttcgtaagagctattccttataactattattctctgttgaccatcgtattcgtcatcggtatggcgctgatgggcttcgactacggccccatggtaaagcatgagcgcaatgccagagaaaagggtgacctgttcaccgagggagagcgcgtggtcaatgcagacaatgcacccaaaggttccaccagaggcaaggtctacgatctgttgatcccggtaatcgtactgattgtctgctgtgtcatcggcatgatctatgtcggcggcttctttgaaggcgtgggctttatcgatgcattcagcgcaacggatgcttccgtgggacttccctggggatctttgattgcattattatttgccattgtatactatatgtgcagaagactggtatccttcaaggaggccatgaactgtctgacgcagggcttcattgccatggtacctgcaatgctgatcctgacctttgctgttaccctgaagaccatgaccggtctgctgggtgcggatgtctatgtggctggtctgatgcagggagcatcagcagggcttaccaatatgcttccggccatcattttccttgtagcatgtttcttagcctttgcttccggtaccagctggggaaccttcggtattctgatccctatcgttaccggcgtatttaccgatcccacgaccggagctattgtacccggagccgagcatctgatcatcatcggcgtggctgcatgtctggcaggtgccgttatgggtgaccattgctcccccatctccgatacgaccattatggcttctgcgggagcgcagtgtaatcatatcaaccatgtatccacccaggtgccttatgtgctgactgtggcggcaatctcttttgtgacttatatcattgccggttttgtacagaatgtggtgatctgtctggtgatcggtattctgctgacactggctacgctggtggttctgaaacgtgtcttcggtgagaaggctgtcgtacggaaataacgtaggcgcaggaacgcgactgtgagaaaggaaatatatagaaatgaaatacgactatctggtggtcggctccggattgtacggagcggtgttcgcaaaagaagcgactgacagagggaaaaaggttctggtcatcgataaacgccctaatgtggcgggaaacatttatacggaaaccgtggaaggaattcatgtccataaatacggtgcccatatttttcacaccaatgatacaaaggtgtggaaatacattacgcgatttgcggagttcaaccgtttcaccaattctccggtggccaattatcacggagagttgtactcactgccttttaacatgtacacttttaataaaatgtggggcgtggtgactcccgaagaagctgcggccaagattgaagagcagcggcaaactgccgggatcacggaaccgaaaaatctggaggaacaggccatctctctggtgggtaaggatatttttgaaaaactggtaaagggctacaccgagaagcagtggggacgtgactgtaaagatcttccggccttcattatcaaacgtctgccggtgcgtctgacttttgacaacaactatttcaatgcgttgtatcagggcattcccattggcggttacacgaagctggtggaacatctgttagagggcattgaggtacgcctgaacacagattatctggagcagaaagaggaactggataaactggcagagactgttgtctataccggccccatcgatgcctatttcggctactctctgggagcactggaatatcgttccgtcaggttcgagacagaggtgctggatattcccaacttccagggaaatgctgcggtgaattacacggatcgtgagactccctggacccggatcatcgagcacaaatggttcgagtttggcaaggacgaacagggacaggatctcccgaagacggtcatcagcagagagtacagttccgaatggaagccgggagatgagccttattatccggtcaatgatgaaaagaacggcgctttgtatgcagagtataaaaggctggcagatacggaaaagaacgtgatcttcggcggaagactggcggaataccgctactatgatatggatgcggtcattgcctcggcattgaagaagagcgaagaagtattgtaatgtaacagatcataaatgagggcaaaagaaatgcagtggcgtgggtaacgtcactgcattttttatagctgcgccgtcggcgcacgttttgaaacaacctttagccgatctgcggttttgcttttctcttatttcggaactctctgacagcgatcagcagatcataacgatataccagtgtgtacatcacagccgccatgacgaatgcggtaagcacatcaaatacggaatgctgtttgatgaacatggttgccataataatggagacagccaggatcagggaaccgatgcggatgccctttttcttctcaaagcatttgctgcggataatggcaaagtgtgcacccagagaattatatacatgaatgctgggccacaggttggtaggagtgtctgtccgatacagagcggctaccatacgggtgaagatattgtctctcggcataacagcgggacgaaggtgctgtccgttgggccacagggtggatacgatcaggaaaatcgtcatgcccgtgaagaggaagatacaggtgcggtaataatcctctttgttcttgaaaaagaaataaatgaccacagccgatacataggcaaaccacaaaaagtaagggatgacgaacacttcacaaaaaggaatataatcatccgccgccatatgtatgatccggtaatgtccggtagtatttttctccagccaggcgaaccaggccatgtaaataatgccatatataataagaggaatggcatgtttatatttcaaatagaagatccgtaatttttccataaaaacctcatttctctaaaaacctatgttctaaaatcaattttagtatagctatcggaacaaaaaaatcaaggcttttttggaatacttaagcattcttaagaaaatctttagagtgtgttaaatctgtttaaggtgtgatcatccggatggcaccggggagacattccacccggaaaccgcggctctttcttgtcacttctccgtctgtatgcacccacagaggagcggaagctgttatggacatctgtgtggcggtatgggcattgatgcctttgacaaaataatgtttgccgaaaaaggcagtgggcagggccagcagaaccaatcccttggaaatattgcctacggaacagagatccaataccccgtcatgatcgacagcgggagggcagaacatgaaaccgccgccctcgtaacggtgactcatacaggtcacgaacagaaaacgggggagttctacggattcctttttgtcatgtaccttgtcctccagtgtcagcgtgcaggagaccttgcgggcagtgatcagctgttttaaggcgatacccagataggtcagctttcctaagccgatccggttcatggtatccttgatccgggaactcatggcttccgcacagacagcggcatcaaagccgatcccgcagctgacggcaaaaagcctggattcttccggctggtcttcgtccagataggtcagtctccccagatccatggctctgggagtattattatgaaggatcagattgagagcagcctttggatccttggaaattcccagatctcgggccagatcattgctggagccggtgggaatgtagccgaggatgactttggaaggatctgcaatgccctgaagggcctcgtttatcgtgccgtcaccccccagaacgatgagcgttaagtcaggctctgcagcatgctctgcggtgatctgtgcggccagctgtcggacttctccggctttcccggaaaaataggtctgatattcggtattgcctgctttcagagccggctccacctgttcggcccagatctttgcccctcttccggagcgggaggcgggattgataataatatgatacatgaggattcctcatctttcgtaaagttgtaactattcagagccgggaaaatttgcataaatttgcgaatcatgcttgcatgaatgagcataattttgaaaatttttatggcgaatgaggctctgaatagttatgttaaagtttattctaacacaccagggggcttctgccaacattgttcattttccatctttgcaattaaaaggttctatgctatactaaaccataagtttagcgaattaacgtaacataaggaggaatgaggcatgtattcattggatgaagtaaaaaaagtagatcccgaagtggcacaggccattattgacgaggagaatcgtcagaacagtcacatcgagctgatcgcatctgaaaactgggtaagtaaggctgttatggcagctatgggaagtcccctgaccaataaatatgcggaaggatatcccggcaagagatattacggtggttgtgagtgcgtggatgtcatcgagaatctggcgatcgaacgtgccaagaagctgtttggatgtgattatgccaatgtacagccccattccggagcacaggcaaatatggcagtgcagttcgctgtgctgaagcccggcgataccattatgggtatgaatctggatcacggcggacatctgacccatggttcacccgttaatatgtccggcaaatatttccatgtagtaccttacggcgtggatgacaacggtttcctggattatg

SEQ ID NO: 5775 - DNA, 2743 bp, Unknown
  gut microbiota DNA sequence
gaatgagagagctggccctggaatgcagacccaagatgatcattgcaggtgcttctgcatatgcacgcaccattgatttcaaaaagttccgtgaagtagcggatgaagtcggtgcggtactgatggtagatatggcacatatcgcaggccttgtggcagcaggccttcatccaagtcccattccctatgcggatgtagtgaccaccaccacccacaagacactgcgcggacccagaggcggtatgatcctctgcaacaaggaagccaacgagaaattcaattttaataaagctattttccccggcattcagggcggcccgctgatgcatgtcatcgcagccaaggctgtctgcttcgaggaagcattaagcgacgactttaaggtatatcagaagaacattgtggacaacgcacaggcattgtgcaagggcctgatgagccgtgacatcaagattgtctccggcggtaccgacaatcatctgatgctggtagacctgaccccttacggtctgaccggtaaggcagtggagaagctgttggatgcagctcacatcaccgccaacaagaacaccatccccaacgatccccagtctccgttcgtgaccagtggtatccgcctgggaacccctgcggtaacttccagaggtctgaacaccgaggatatggatcaggtggcagaggccattgccatggtcatcaagggcggcgaggaacaggttcccgcagccagagccatcattcagaaattaacagacaaatatcctctgatctaggcagaagctgtttgcaaaggtcagcccgtacatgtaaatgtgcaggctggcctttatttatgttggagttgagtttatacagtcgtcgtgttaaaatgttggacggaatacaaaagaacagcagatagagggaacagatgaaaaaagagaaatggaaaacctttgtgacggacaggtggaaggtggcagcgccgggactgctggcagcttttgctgtctgttttattttttttatttatgcaccgttggaattgtatgttacgaaccagacagaattctggtttgatttttataaaatattaaaagcggttctgcagaattttgcacttttttttggactgaatgtgttgggaatccttttggcagcctgtatctccaaagttttttgccggttcgttacggcagcggaactggtggttttgcttactttatatgtgcagggcaattttctggtgaatcatatgccgcctttcgacggcacggaaatcgtatgggaggactaccggggagaaaatataaagacagcgatagtgtgtattctcatagcggcagcggtcgtgaccgtggcaaagctgcttggtgcaaagagatttcagggaatctgtatggctgtgagtgcgggactttcgggaatcctcatgataacgcttgtgacgatgactgtgaccacaggggcttaccgggagagaagcacttattatgcactggagaacggacagtaccgtctgtcacaggatcagaatttcctggtattgctgttggatgcggtggatgcgaagacttttgaagaagtgatggattcggatccggcctatacagagacatttgctgattttacttattatccggatatggtgggagcatatccctggacggcgttttctgttccgtatatcttatcgggcaaatggtatgaaggagaagaatattatctggattacgcggcggcagctgtggatgaatcaggattgttccgggaactgtctgagagggattatgacatcgcattgtatgagtctgatccgtgggtaacttcgtatacctatcagttttccaatatggtggaactgcagcatgaggcgtatgtctggaagtatttcaggcgggcaatctgcaagctgggcggcatccgctacgcaccgtttttcctaaaggaatactgttatcgggccattgtacagacgcaggggcagcacaatgcctttgtggacgagagcaatcctctgtatacctgggatctcaaagaatttgccacacatatgcaggaagaagaggtgacgtatcaggagggaaagtgtttccggtattatcatttgcagggagggcatgttcctttcctgtatgatgcggatctgaatgcggtaggagattcttcgtatacggagacgctggaggccaatatcagggtgatcggtcagtttcttgataagctgaaacagtcagatctgtatgacaattcggttattatcgttatggcagatcatggctttgatcctcagaatgaggtctcggcatatgacagacagaatccgctgttcctggtaaaaggtgtgggagagagccatccgttacagacatcgcttgttcctgcagcttacgaggatcttcaggatgcatatgtgagactgatggacggagcggcgggagatgcgattttcccatatcaggagggcgaaaaaagagaacgccggtacattttttataagaatacagaacacgtcatgtatgaatggttacagacgggaccggcatgggattttaacgcatatcgggagacggggaacaaatatccccgcaagaattagagacaacccctgttttgaactttttggaatttacagcaaaaggttaaaaatgggggttgtctttcatactttactgtgctagaatatccctcagtgaaaaacaagtgtccgcactacagatacgaactggaagaaaggataacatatgggagaaacgaccaagta

SEQ ID NO: 5776 - DNA, 1528 bp, Unknown
  gut microbiota DNA sequence
agggaacgaccatcacttttacctttcagatggatgatgaaccggggatattgtcggatgtgctgaagatcatcgcagagtaccgggccaatatcctgacgatccatcagagtattcccatcaacggaatcgcttctctgacattgagtattcaggtattgcagaccacgggggacatttcccggatgattgagcagctggagggacagcccagtgtacatcatgtaaaaatactggcaaaagaataaaatttttcacacgcaatttgtgcctgcgcaaggtactaaagtacctgaaggtttgcaggctatgagaaaggcaagggttatgatatgatcaacgttgcagtattaggctacggcaccgtgggcagcggtgtggtggaagttatcgagaaaaacaaggacatggtgaacaagaagtccgcacaggaactgaaggtaaaatacatcctggatctgagagatttccccggagatccttacgaggacaaagtcattcatgattttaatacgatcttacatgacgacagtgtgaccattgtctgtgagaccatgggcggtgtcggagccgcttatcagttcacgaagcaggctctggaacggggcaagagcgtctgcacctccaacaaggagctggtagccaagcacggtcccgaactgctgcagatcgccagagaacataattgcaactatctgttcgaagccagtgtgggcggcggtattcccattatccgtccgttgaattattccctgacagcagagaagatcgaggctatcaacggtatcttaaacggtactacgaattatatcttaagtaaaatggaaaaagagggtgcggactttgctgcggttctgaaggaagcgcaggacaaaggctatgcggagcgcaatccggaagcggatgtggaaggttatgatgcctgccgtaagattgcaattctgtcttccctgatgttcagtaaaaatgtggattccgagaaggttcccaccgaaggtatcactaagatcacagcagcggatttcgaatatgccaatgccacagatcataccatcaagctattgggcagaagcagggccattgatgataataccgcagaggttatggtagcaccgtttttactttccaaagaacatccgcttgccatggtacatggtgtattcaatgctgtatttgtcaccggcaacatgctgggagattccatgtattacggacggggcgcaggtaagcttcccaccgccagcgcggtagtatcggatgtcatcgactgtgcaagacatcagggcaaggtgatcatgtgcttctgggacaaagaggaagtaaagctggcagacatcggcgaggccgagagaagtttcttcatccgggcaaaggccggagcggaagatgcggttacagcagcgttccccggaggccgggtggtacatcttaaggaccggaaggaagacttcggatacttcacacagagtatgaaggaaaaagattttcaggcaaaatacgaggcactgggcgagcagatgctcggcag

SEQ ID NO: 5777 - DNA, 920 bp, Unknown
  gut microbiota DNA sequence
agtgaaattcggtggaagttctctggcgagcgcagagcagttcaaaaaagtaggaaacatcatccgggcagataaggagagaaaatatgtggtaccttccgcaccggggaaaagattttccgatgacaccaaggtaacggatatgttgtatgcctgctatgatctggcagatcagggcaagagcttcaaggcagagctggatgctatcaaagcccgttatcaggagatcatcgacggactgcagctggatctggatcttgtcgatgagttcaagactattgagaagaattttaaggcaaaggccggcagcaattacgcggcttcccgtggtgaatatctgaacggtattatcatggcaaattatctgggctatgatttcattgatgcggcaaccgtcatcttcttcgatgagaacggcgaatttgacgcagcaaagaccaatgaagtactgcgtgccagactggcagagagcaaggaagcagttgtacccggcttctacggtgccatgcccgacggaacggtgaagactttctccagaggcggttccgacatcaccggttccatcgtggccaaggctgccaaagcggatgtctatgagaactggaccgatgtatccggtttcctgattgcggatccccgcatcattgatcatcccgaggctattgagactatcacctatcgtgaacttcgcgagctggcctatatgggtgctaccgttcttcatgaggatgccattttcccggtacgtcaggaaggtatccctatcaatatccgcaatacaaacgctcccgaggacaatggtacctggatcgtgggaagcacctgtcagaagtccaaatacgtgatcaccggtatcgccggaaagaagggcttctgctccgtcaatattgaaaaagatatgatgaactccgagatcggtt

SEQ ID NO: 5778 - DNA, 2027 bp, Unknown
  gut microbiota DNA sequence
gtattgcaggcatttgaagaaaatggtatttctttcgagcatgttccctccggcattgataccatgacggtattcgtacatcaggatgagttcatgcacaaggaacagaaggtagtggcaggcatccacagactggccaatcccgacgccattgacatcgaatccgacctggcattgatcgctgtcgtaggccgtggcatgaagtccacccgcggcactgcaggcagaatcttctccgcactggcacacaaaaatatcaatgtcaagatgatcgaccagggatcttccgagctgaacatcatcatcggtgtggcaaatgaagattttgagactgcaattcaggcaatctatgatatctttgtgatcacaagattataagtttatcagatataaaaagacaggtcagttcgacctgtctttttatggttccggatattggatcatatccagtatcggagttcgtataatatattggtaggcctcaaaaattttctccgcagggacttctttcggagaggagagccataactttagaatttcaattaataagagggcattataatgtgccagtgactgcggtgtgataagttcgcagggcattttcctcataggatgtctggacagaatccggaaaaaggtctgttcacagtagtgtgaaaaaaattctccgaagcaattctggcctgtggtttcaaaaagtcgatgataatattccttatttttttcaaaacagataaacatcagcttgatggcttcctgttccatatcgttttcgatcatgacttcgactttgctgccgatgtcctggtcgaacagaaactcaatcacttcgtatttatcctgaaaatagttatagaaagtagggcggatcacatgtgcaccatccgtgatcattttgatggaaatcttctgaaaaggcatggtaagcacaagagaacgaaaactgtctgccaataattcttttgtcttcatcacaggactccttttcctataaaagaaccgagatagaaatattataaccaaaaaactttcttttctcaactttaaacgacacttttgccaaaatgtcgcggaatatttacagttatcgaaaaaatgtaagagcaggaaaaacgctgtgcaagggttgtatcttaccatatgccggaaaattgtttaaagtaaaaaatgaaaagagataaaaacattataacgggagaaaggggctgcatggatggcatggtatgaaattttcattgtatcggtgggactatccctggatgtctttacctatgcattatacaaaggcgctatgctttccagactggacaaaaagcagatcctgaaaatgatcctgctgttcacaggatggcagagcggtgcaatgcttttaggaagcctgatttcggaacttccgtacattgcaatgaactatcagcggacagaaagactgttcagggcggcatcggcagttatttttttcctgatcgggatatggctgatcgtccgggcactacatatgcgggacccgctggaacgaagggaagatgccttcgcctggagacagctatgcatttgggccatgcttaccagtgtggacagttttctgacgggaattggcatgggctttttagacaccagagtaacggtgcagatcattcagctggcaattatggctgcgctggcggtcatcgtcggcatctatgcgggatatcggatcgggtgtcatggaagaaaccgtgtactgatcagtggagcgctgatcttcctgcttgccggcgtggatgtattgtttcgatattacatctgaaataccgtgattcatagaataaatagacaaaagtgaggtaaatcgtatggcagacgcaaaacacaaagttgagagagctgcatttggcgcagcaatcgacggaattctgaagtatgtgaataaggacgaagcagacagagaaaaggcgttcttaaagctggtagatctgtcggaaaaatttatgggagataccttccgcaaggaaagctatgatgcggtaagacgtatgatccaggat

SEQ ID NO: 5779 - DNA, 1274 bp, Unknown
  gut microbiota DNA sequence
gatccccatgtcatcaaaatgtccgcactggactatggttttgaggcggcattctgcggtaaaaaagagattaacgagatgcgtgtgaaacatcagtgcaatatcccctggctgatcctgatggatcccaccagtgcctgcaacctgcattgtaccggctgctgggcggcagagtacggcaatcgtctgaacttaagctttgaagatatggatcgcatcgttacccagggtaaggaacttggtatctatctgtatttcttcaccggtggcgaacctctggtcagaaaggatgacatcatccgtttgtgcgagaaacacgatgactgtggcttccatgcatttaccaacggcacgctgatcgatgagaaattctgccaggagatgaagcgggtaggcaacttctccgtagctatcagtctggaaggcttcgatgaagtgaacgacttacgccgcggcaagggcgtgtttgataaagtaatgcatgccatggatctgatgaagcagtacggtctgatcttcggaacttccatctgctataccagcaagaactataaagtagtcaccagtgatgaattcctggatatgatcattgaaaaaggtgccagattcagctggtatttccattatatgcccgtaggcaatgatgcatctaccgaattgctcttagatccggaccagagagaatatatgtatcaccgtattcgtgaaatccgtgccatgaagggcggaaaacctatctttgccttcgatttccagaacgatggagaatatgtgggcggatgtatcgcaggcggcagaaactactgccatatcaatccaaacggcgatgtggagccctgtgtattcatccattattccggtgccaatatcaaggaagtagatctgctgactgcgttgaagcagccactgtttatggcataccgtgcgaaccagcctttcaactgcaatcacttaaagccctgcccgatgctggaaaatccggaaatcttacagcgtatggtgcatgagaccggagcacattccactgatttacagtcaccggagtctgtggagcatctgtgcggaaagtgcgcagaatacgcgaaaaactgggatgaacgggcccaggaactgtggaataaataatagttcttttacaaaagtttatacttagttaattgctttttgcctttcggcataccataatgtaggtaacattcagaggagacttcgcgaaggagactctgaaagatttggataatgtgtcccctgtattgtggcggacgaaaggtggt

SEQ ID NO: 5780 - DNA, 155 bp, Unknown
  gut microbiota DNA sequence
tcagcacttttctagaaaatatcaacatcctccgacaaacatcttcgacatggcaccgcatacgccggaagttctgcgttttggaaagctttcaaaaaaaccagtagccccggcagggtataagaataagcagtgccgtaagcagacgtcggtac

SEQ ID NO: 5781 - DNA, 5652 bp, Unknown
  gut microbiota DNA sequence
cacatccggagaccttacatcgagacatgtgtatcgcatgctccgggagttcgtggattttgccaatgcatttcactaactctcaatttacagcattccaagtgccgatagcaacgcaccgatgataatgcagaaatctgagcagttgaatacgatcttgcggaacgcctgccatttcaccgggaagctcacataatccaccacataacctctgcgaaggcggtcataggtattgctgaaggcaccaccaagcagcagcgatagtcccagtcgcagcaaattgttgcctcgatgtcccagactcacgataaagacaacggtcaatatcagtgtaaacgccagtgaaacaacagccaccagacgccttctcttctgtccggcattgagcatcatgcctttgttgtgatgcttgcggatcagaaattcccccctgcagatctctcgttcttcccgctcatccacatgcgactctatataattttttaagaaaaaatctccccagaaaattcctgccagtatcacaaggcataccactgtcatataatattccgctcctttttcacgccgtccgtatttccccttgaaatccgcttattcgtgctctgctttccgattctttatcttcagaaacgccagaagtgccccatacaatactccagccacaggccatacaacccaggtaatgtcccaacgcatcgtcggcaggctgatggccagataaagcgctgtccagacacaccagtaaattgctgtcacatgctcatacttccggttgactgccttattctccacagtataatccccctcctgaagcaatttctgaaaaccgccccagataataccggaccacacgaacagccatacagcgatcgccactacaatgagcaaagcatccgtagcaaggattaccgcataaccattattcccgaaaaaaatagatactgccagcaacggtaccactcccagaatacacaatacaacacccagggttatgcagatccggtaggttcccgcaaatgtttcttttgctttctccacgattccggacaccccatattgcagtgtcagcttttctttttccagatattcatatttattatacgggattccggtgagaagaaataccgctaccgcaactaccaccatcagtaacagtacgatgagaccgattcctcctgcgacattttctgtaaccgctcctcttttggcacctgccattcccaacaaccacaacaatacaacaggagagagcacacataaggataccgccggagcaatccgggcagcatattttttcgtagcttccagaaaagtattagcttcctccaccgtgatcactttgccctctgtgatctccggtgtcattccatcggtgaattccgtctcttccatttcatcttttaataagtaatccgtagtaactccgaacaactggctcatactgacaatgcgttccagatccgggattgaggctccgctctcccatttggatacagactgtctggaaatgtccaggcgttctgccagttcctcctgggaccacccatatttcttacgcaacattattattttttctgacaggatcattttcattctctccttcttttattaatgttttcttgtgcacacatagatcgtcgacataggaaaatcataacaaaagagccggttgacaactaccaagtgcccttgaaattttgtcaaccggcagttgcgtttccggatttttctgaaattttcagcaatattactgtacttcacggatcagacagtattgctttaacggaaaattcttctccatcacaccatatactttgaatccgaacttttcatagaattccacgttttttggattatgtgtttcgagggagatcatcagtttgtgcttctgggcatagccaatggcttcctccagaagctccgctgcaattccgtgatgctgcatggatggatccaccgccagataaatgatatgcagacgctgattctgatgcagttgatccgtccagctggaattcagataatcctcacccttcataaaattccgaaatgtctttaacgaaggatcctccttgatcagataggaatccgtctgtaaagcagccatggcctctgtaaaatagaactgaaatacattgtacggctccgcttcatccgataccaccaatacactgttcagatccgcgctgtctgcgaagatctcacaggtcgcataaaattcatccatgtcacatttaaacagctccggcatcagatttttacggacttccggatccggaatcagcgtctcgtacaacggatcgtgtgcaaagcactgattcagcattttctccactttcggaaggtcttccttctgcacacgatataacttatcactttccataattgtatttactgttatctccttattatgatgatgtcattccccggctttgttgtctgtggatcgttccgtgctctgctctcgccatccttacagttcgaatatctctgtcacagatttctccatttgttgcacgatattcatcaggctgaccacaagcttgctgcatgcatgctccaggctggtaatttcttcccggtagtccatttccttcataccggatcctgtcaacgtctccagttgtttttctttttggagaagctgcttgaccgttccatatagattttcatgctccggcagccttccgtaaccccatttcaggcgatccttcggctgatggaatacataatccgtaaaatgcctatatacttcttcatcaaaattaaaggcataggcattgttgtctacctgatacagcttacgaagtgcggaggaaagtctctgttccttcagatttctcaccgctccgcccagaagtctcagatttgcactgcatatctcatgaggatacaacacatttccgtaccagtcaatccgcacaaaagcgtcctgctcctgttggaaccttgcgagcagcttctgttccagcggtctgatctgccggaaaagtttctccgcctcgtcgtattttccatctctaagcaactgtttgtagttacggttgtattcctctaccgcttcatattcctcccggcatcttctaagtgcccggtcacttaaaatctccagttcctcaattttttcaagcaaaattcgctttttctctcccagctgccccgccacatcggcgcggtagcagatttcccgacactgttccaagcccttgcggatccgctgcaccaccggtgaaaactgcaacggtaccgctgccgtttcatcgagcgccagaatcagcagggcaaacagctcgtgatgcagacgatatacctgttcatcataaaactcatcgttgtcaaactgggaatggtagtgggtctccataaagcttccgccggtgaaatcatttaccatggacggtacacctgcgatcgccatggaaaaatcatccgaccaggtctcgatcggagatgtcactgctgtctcttccggataggctatcgtcagattcggcagatccgcaagatattcctccaggaagctgacgtattcatagcagctgcggatcctcgctctggtaccatgcgctaaagcaggaagctcaaagttcagatctgcgatcaccttgcccacccattcgggatgtgcggtgaatatctgctcataagctcctgtggaccagtcaaaattagaatccaccacgccccattcctcggatgccatggcacagatcacaatggtattgttcggttgaaaaccactgtcccgcaatgcctttgcaataccaaacatcaaggcgaccgctgtattgtcatcctggaatccgtcaaaataggaatcatagtgtgcagacaaaaggaccatgcggtccggatgtttcccgggaatcttacccacaatattataagtcgtgcagttcctggtcaccctggattccgcatcaaaggtgaccgttatttcctcctgatcacgcaacagctccagcaggccggccgcatcttttctggaaatggaaaaagcgggagcatcctccggtccggcgatatcctgtgcattcagagcttcatcgtcgatttcgccgtagccgccgctctgcactgcgatcagggctgcagctcctttcagatgtgcctggtataccggataattgatccaccactcatccctctggttaatctccaccaataccagcttatccctgacatcttttccctgatagtccgtctccgttccttttcccagatacatcatggaaaattccttggggccatcggtgacaaaggttgtctgataggctcccagctctgctgacacggtctccccggccgcattcgtgtagcttaacgctgccttatgaaattcccagccgtctactgtcacggcatcctttgtaacctcagacagcccgatttttcccatttctgtcttcagcatctctccggtctcaaattctgccttagaacctgccgggcgataccccagtgtcggatgtgaccggtattgttccattcgttttgccagttcatacgaatacggtatatccaaattctgtaacacccttttctgtaaagtcaccccgttgtcatgcatattctgtcactcctgtttctatcctgtccgttctgtcacaggaaccgttacttattttttaccatagaattcatattttcagtaattttctgcagaatctctctgtttctctcttccgcttccagtgtctcactggcatgggcagacacttcttccgtagtcgctgagattgtctgaatggaatccacgatctcctggttggctgttttcagagcttctactgtctgaagcatctcacccagattatccacgatcgtatagctgctgtcttcaattgccgtgaaactgtccgccgcgcgcatcgttccttccctttggctgccgataccgtctatcatctgacggatgaccgtcaccacttctccaatcgctccggatacattttggatcaactccgcgatgttgccggtagcatcctttgtctgggtggccattcctgaaatctccgtcgccactacggagaaaccgcggccggcttcaccggctctggctgcttctatgctggcattcagcgccagaagactggtctgattcgctattttgctgatgatttccacgatggaatgcatctcctgcatataatgatccagcgtttccagcttctgtgccgccagttcactgtttcttgcagaatcctctgcctgctccttcagacctgtcatctcttcttttccggcatccagtatttctatcgtatgttccatattgcttccgatcgtctctgccacttcacccacagtatttactttttcctgaatagcctccgtctgggacgtctgctgctgaatcgccgctgcagactccccggaacctgcagacacctcctccatggctgttttggtactgtcaaaagcagtttccagtttattcaattccgctgtgatatcagctactgaagtctccatccggctgctcatttccatgacttcacgcaaggttgcttccgcgcggtcctgcgcagctgtaatgctctctatattttcatcggtgttcttctggttggatatggtagcatagatggatgtaatgcacagcagaatcattaccgaaatctgtataaatcctgcgtcctgccccagata

SEQ ID NO: 5782 - DNA, 4325 bp, Unknown
  gut microbiota DNA sequence
ctgtcttattttatatttgtcgctcggggagttgggggtgaatatggaagatgtgatgcgggcgaaagcgacggaaatggctgtaagtccgcggcaattgtcgatgagtgagatgatggcgatggcttcggaagcaggtaataatatttccgaaggcgtgaaaaaaagtgagggaggaatgaaaatgccggccggaattccgaaagtcggtaagatgccggattgggtgaaaaaaaggattgaagcccggaaaaaggcggaagcggaagggaaaaaagcggagatgccggaagttccggcggaagaaaaagaatttgcacaggcggttggggagattgagcggacagctgaaaatatacaacagtatgtacaggaattgcgtgagtctccggaacgggaaatgcgttcgttgttgaatgcgttgaacggtggatttatagctccgtcgccgggaggggatgctgtgcgtaatccgaatacactgccgaccgggcgtaatctcttcggtattaatgccgaagcgacacccggtgtgagggcctgggacgaagggaaggcgttggccaagtccacgctcgaccggtattatcgtaagcatggtgaatatccgcgtaaagtcagttacactttttgggcgggggagtttatcgaaactgagggagcgactttggctcaggctttgtatatgttgggggttgcccctgttcgtgacggaatgaatcgtgtgacagacctgcgtttgattccatcggctgaactgggtcggccgaggatagacgttgtggttcagacctccggacaattacgtgatgtggctgcttcccgtttggaattattgactaaggctgtgaaaatggtggctcagtcggaaaatgacacttgcgggaattatgtgtcggaaggaacggtagaatcagaaagaattttgttggaaaaaggtttctctccgaaagaagcccgtgaactgtcgacagtacgtgttttcggtggagccggttatggaacgggaatcacgggattggtggaaaaaggggatgcctgggaaaaggaatccgagattgctgcccgttatctttcgaatatggggatgatgtacagtgacggtaaagcctggggtaagtatggtaaagaggtttttgaagcggctctacatgatgcggatgtggtcgttcaaccccgtcagagtaatacatggggagctttgagtttggatcatgtttatgagtttatgggtggtctgaatcttacgataaggcaggttacgggtaaggatccggaaacttatttgagtgactaccgaaacaggaaccacatgcgcgtgcaggacctgaaagaggcaatcggggtagaaggacgtactactctttttaatcctgagtatattcgtgaaaaaatgaaaggaggagcttcgtcggccgctctttttggtgaaacgatccggaatactttcggatggaatgtgatgaagccttcggtgataggaaacgatatttgggatcgtatctatcaagtgtatgtaaaagatgagttcaatctggggatacaccgtttttttgaagcggaaaatccggcagcgttgcaggagattacagcagtgatgttagaaacagcacggaaaggatactggaaagcaacggaggagcaattgaaggaaatatccggcttgcatgtccggtttatcagtgagcatggaccggcctgttccggatttgtatgcgataatcagaaattgcagaaatttgtaatttctcatatacctgaaaatggtcgtgaagtatatcaggaacaattggacaggacccgggaagtgcaaaccgaacataggcagaatgcggtggtgttgaaaaaagaggcttcttatcagccggcgcaagaaaaccggaataccttaatcggtctgaaacctgtatttaccgggatgctgatcgttgggatactattggttttagtggtaatctggaggcggaaaaaaagataaatgagaatttagcagttggtttgaccatctagtttagcttctatctctttgattttcagcttgcccgacattagtttcggaagaagtgtgtcacgaaggcaaataggcctgtcattttcttgtaacacctttgccatttgctcaaaatggcaaaggtgtcgttcatcgttcttgcctcatattcggagggtattctgatttcaaattcgggcaatgcttttttattaaggtgaagtacggtagttccattcacatatccgagacaatgtcccttaaattgtattttgatataaagggcaaagagattggctattttatcttatttatcagttattatccattctcctattttacctccctttctagtcagcctttcatctgctcgtaattgccccattatcttacgaacttgccgttcacttaaatcaagccttcttgcaagttctgcccttgatatagaaggattattctttatcagtccaataaggtcttcgacttcttttggatcactttggatcatctttggatcatctttggatcgctttggatcgctttgctcttctgtcctccaaatgactactctgaaatcttcctcctggtaaaactccggtgtcttcaacccataatcgcgacatttctcaataatatcttctgtaccagtaccaaccttctcgatataccccttccaatacatcggatcggctatcaatggattagtcggcagagacttatgaggtccttgaagtttctgcaccgtgagtccatacggtagttgtcctggattccaaatctccagcctattccggaatagcatcacctgaacacttgcattactcgtataatctctatgacaaatggcattgacaatcgcttctttaactgcatcaataggcaattcaggatgagttggaacagatgctgtttctccttcatcacgagtacccacccaattattcacacgactcattacaaaactcgttgattgatccaccaattcaaatacatctccacgataaatctgatatgctggcataggctttctcaccacattaccataaaactgaacgcatttaacttctgaaggtatgaaatatttctgaggtttcttgccgaaaagcagaattgcagcattggcaatcctatcgttttcatcaatcaaatccaaatgagtaagcaactcttttatgggagtatctaccgaaagtggaaaatttcgttttgaacgggcaacttgaagaaaactacgtattttatcctcatccaaatcatcaagtgtagctccattgtcgtatgaggcatcgaacggtcgccatcttatatattctttttcctcaagataacgaatcaatgatgcatatacagatgtacgtaatccttctaaatccacgaatgtcttgcgaacaatatcacgctccactttctttatcagagcagtctcttttggatgcctatcgtcttcattaatgctcttgatatagattaaacggctcttatgtaattccgcagctaaatcgtattctcgttctgtcggtgaaacaccctctgcatcttcatatccgtacaaattaccatacaagcccaagtatatatcacatagtttcacctcattcaaatatacatgacttatcggatactcattcgctggaacctcctcaaaaatgaaaggttcaaaaaatttccccaacaatacatctgttcggatataatgacaaagcatagctcgctctttcgagaactcactctgtacactgcttatgaatattttaattcgtctcataaatgcggtaaattcagtatatatacttataacttttctattgtaggacttgcccataaccaattgtcctcaattttattctcatcagggaaataagacttctcaataataagtttcgctaatttaatgttactctttaagttactaatatctgtttcagttagtgaaaacttaaaattatagataaatggagacttattgcctgctatataaactttgcatgatgccgtataacttcctttcttccatattatagagtcatcacacaatcgcattaaatcgatgtattcacttgattgttttatagtatccacatttatatttcctgtatatttttgattttcaatcagctgattaattttattgatcaactcttttttcttctctctaaaatataccgagtggaatcctacaagtttttcaaccaacgcatccctatatgaaacaaaagctatagctttctgctgtttacccatcgttgcagatgcaaatggtgcttttagctcataataggtttctccataccaagcccaattaagattatacgtagaattattattatccttgatt

SEQ ID NO: 5783 - DNA, 1026 bp, Unknown
  gut microbiota DNA sequence
gacggggccgaaggtgatgcccttctccttgatgacgcggaggtcgccgaggtactcggcgttttcaatcagccggagagctgtgtccacaaaattccatgcgtcacgccagccctctccgttcttcacgaagtaggaggccgccgcctcgttgtattgctggatgtaggtgccgctgccgtcgcccttcggcttgaagatgtcgggcccgtggtagccgggatcccacgctgagaagcagagccggatcttgatgtctcgggcactctggagcaggtcatcgtcgccctgaacgatctgcacgcagaccgacgggatcggcgcggcgatgttcgggggcgtcctgtccttcgatggtacgaaaagcgagaacgcggccgggtttaccagcttgtatgggtaggaggcgtccgttgcgttgtcgtcggggagcttcagcttgaccagagggcagacctcggcggtcagccagtcccggacggtttcgatgctgttgacgatggacatgggacacctcctacatggtgacagtctggccgagggccacggtggcgatccccatgtcctcgctccagtcgttgacgatgtactcgcggccgtcgacgttgagcccttcgcccgccgggcgccgagcgggcagatcctcgaccgccgcgtaaagcagcagagaggactccgcgacgctcagctcttgccccccttggcgttctttcagggcgttgtcgtccagcacggcggcgatggctctgccttcgacggtgtgcttctcaccgaactcgtcgagattgagaaacgtgcgccgacggtcagcctcgaccatcgccttgaagctgaaggccatcagacgggatcggcggcgccgatctgagggggctcctcgtcgtcggcaccgtcatcaggctgctcggccttggtggcctcgatggcagcgatgacgtcggccttcttgcgcatagcagaggcgtccacgccatagcgcgtggccacttccttcagctcgtcgagcttcatgtcctcgttgtactc

SEQ ID NO: 5784 - DNA, 24717 bp, Unknown
  gut microbiota DNA sequence
gtacgtcttgtatgtataggattttttcaacttgccaaacatgaaaaatggaacagggtgagatggtaaagcatgtcccaatacatccccaagtaaaccacggggattaagcatggcagatgggattttttcgctgcacaagacaaaaaaggcggccccacctgccgcctgtagattgataaagagagaattccatcctacgcgagatgatcaaagccatatggatccagcttccacatcccccgcctggtaggtataggagatgaactcctcaagcgcctccttccatgtaagattgaaggttttcatgatggagtgtagcgtgcggttgctgtcttcatccaagctatcctccccgattaggttcacatctgcctccgggtccacatcaacaaactcctcgcggctccaaaataccactaccgggatgctcaggttaatatcccatgttccacgctggatcaataccccggagggcttgtagaacgggtcaaagccgtttgtctgcgggttctttttagaattgtagccgtgatacaggcggagttttaggtcaaactccttgcggtccttcaggaaccggataactccttttaatcctaccgggttagtgcctcccgtaatttccgcctcgttgtcatgtttggtcttgtcccagggcgtggtatccacgtagagataatccaccagtgcctccggatcattgtcgtcagcttccggtttcccgtcaaaggtaggtctcacgttctccggggtgaagaaatgctggtggatattctcctgcccgttctccacgaactggccgttcatcaactctcctttggaattgtagtaatagataaacatcaggtaaaccggggccggggtaaagttgtttccatttttatattcgccgtttttctgaacgtaaaacttgccctggcttccttcagcaagggtccatccactgccggccttcagttcataagtgatctcctggacacgtttcatatatctggccggggattccggattttggtggggacctccggccttctgtatctcgttccagtcagcgtgcaggtggcattcaacgaggcggacggtcatttttgccgggtcctcatgcagtttgttcttcgtctcgtcttctggtattacaggatccttgctgcaagagttcagtgacaggacaagggacactcctaccagaagtgcccacacggttttacatgcaattgttctcattttttctttttatttattagtgttgattatagttgttataaattaaaaaatccagtttacaccgcaacgcacatcacgtcccatatcatgcgcataataacgcgagcggttggtgtattccttgtactcacggttcaggaggttgtctgccgacagcatgaaccggacctggcgtccccgtttcacgggaagttcaagaccagcgtcgaacccgaggagatggtacgccgggggagtatacgggataagatccgtgtccggatcaaactgcctctgttttgcggtgaaacggtgcctgatgttcaggcgcagcctgagatgcgatttcgtctcgtggatccacgcaagttcatggctgaaacggaaggagggaatataaggaagataattaccctttgtccgttcgtttgcccgtataaaggagacgacggcatggtagtcccatgaaccgcccggagtgaaacgcaggtcaaagtccataccgcggaagaaagccggggtctgcctgtactggaagaccgggtatgtccccgaaatcacggtgactgtctctttctccggcccgtcatagatatagccgtccacccattgcaggtaaccgtccagacagacgctgaacatcccgtcgccgtaacggagggaagatatccatttgtagcttctttccgagtgcatcgcagagtctcccctgacaaacatcccagacccgagctcgttcccgttgctgtacagttcatacacgtgaggggcacgccaagccagaccgaagttggaggtgagcctccagcgtctggaaagttgatagtgtcctcccaggctgtaggacacgttgttaaactttcttgtcccgccataggggcttcccgtccagtcataaccactggcacgggtttcctgcatatccaggcggaggcctgcttcaacgcctcccctggccaggtgatatttcccgattccgtatatccctgcctgtgtctccgtgtagttcgggataacgggcacgaatccggtacccgcgcggctgtggttctcgatgaatatgacctgacctcccgcctcgacctgccaggagcggtaatcccgcttccagcgcagaagatgctggaatgaattcaggtacagggaaaccgccggaatgttagaatccagccgccggacacggttttcctgcctatcgtccttctgccaggtactctgccagtgaatacttccccccttcttcatgccgagccgcatcctgccgaatgcgatctgatgggtgacctcttggcagggaggcctgataccacgggagaagggatccgtgtgcagggggcgaccaagccggatacgttccgccagcaggtcctcgctacccatctgagcgctgagcatcacccctgtccggctgtagaagcggctgtagaaaccttccactctcagacgtccgcggtcatagcccagagaggcggaagcgtgatactctctggttcccgtgttgttcagaagatagtgcgcagtggaacggtccccggaatttgaccaggttccctgcagacgccaggcgaaatcaccgggaaaagcaccttcgagctgtccggtagccacgtagcgacgcccgttacttccgtaaagtgcggagattccccctcgaagggagcgttttctgaaaggaagcggagactgctccatgacgataatccctccaagggcatccgaaccgtatcttaccgcatcggagcccttaattaccgaaacagaggagctgccgttcatgtccacttcgggagcgtggtcggccccccattgctgcccggtctggcgggcaccgttatggatgattagtatccggttcccgtacattccttggataacgggtttggatacagtggttcccgtgctgatggaacttaccccgctgacacgttcgagcagggtggcaagcgaggttcccagtgcgttcctgatttcgggagatgaaaggcgccggctcaccacgttgggtgacaccccggcatgttcaccggtcacgaccacttccccgagtttttgtatgtccagggagagacatacggtatgtatgctgctttctttgaatacctcgttcaaaggcacacgccgggaaccgtaacccaggcactgcacgaggaccgtatccatgaaacacgttccatggccgaaaacaatcattccacggggggagctgacaagtaaccgttccccggtcaggatataggccccttcaatgggaagcccgctttcctggtcaatgaccagcagagtatcgcgtgtgcccgtcgattgccggtcagcctgtacccgtgcttccatgggagaagggagggtacataggcagacaacaagcaggcacacatactggagatatgcatgaaatgtcatacttgaaaaaatataaacgggttataatctgttaagacgggacatgaaaagcccctgcacgcaatcacagtgatggcatgcgaatccctcaagggagttatgacaaacacacagggggtgcacggaggaaatgcgggaaaagagtgacgatgacatctgtttccccggagataagatacctgacaggtctgccagtcggaatataatcgtatataaaaatccctgcctcgataaacggagagagcgtaaagagacagatggtacaattttcaggagaatcgtgacgggagtgcccctgttcgttatgggatacgcacgaatgttccccgtgaacatgaaaagctttcacgaggaaaaagggcatcaatgtcagcaacaacatgcatgctatgacagcccgctgtctctgtctttttttcgtacgatccattagtttgcaaaattaacggttttaatcatcactcgcaatacctacaaataatgatttgcaagcataaacaccatgtatatttgctacggataccaggacagaccgttttggtgcaaggtgtagcaatgaataatatactaaaaatcaatgatttacatttttagtaacaagaataggtgcaaattcttttttgcacttattctgttacttacacttttcttgtttttccgtttacacagaaaactaaaaatctcctatttttttctttttcggtcaaaatccctatatttgtatcagttctaaaagtgaagcaaagcaatgcgctgaaattagcaccgctaccaaatcgctaccaattaccaggcttatcgttctttacgctttatcaatcagccgattaaaagaaaatcttagttttttatgaaaaaacggcgttttatttatatttgcaacccgaaacagatcaggtcgatggaaaacaggaaaaggctttggatattcaatccggattgtgagatggcgattgccaatggaagtaaatactatatgcctccggctaatgtggtgaccatggctgaagatttggcggttttacctgtatttctgggagaatcggaagattgggtcttagtcaggaatttaccggatccggtatttatggcatcggtttatgagcctttgcatttgaaggccggttttattcaggaggcagaagccgggattttgggagaggtgaaaggggaaccgtggggatggagtccgaaaatgtgccattggctggccgaacgggggatgggtgaggagtggaagacggaacgaaaagagtggtatagccgcaggaaagcccgggaagggttgattcgtttgttcggtttgattcctgatctggaaaaggaagtgattccggagacaggttattctatcgaagagatcgaacagaaaatgaaaaccggaaaatacctggtgaaagcgccctggtcttcttcggggaaaggtattctggtactcggaaaacctattgctgtgaaagagaaagaacgattacacgggatattgaaacggcaggggtatgttatgttggaaaaaaaattgaataaggtactggattttgccatggagttttgtgcaggaaggcaaggggtggaatttatcggatggtcggtattttctaccggcctgaacggtgaatatcgcgggaattatctgggagctcaagcgtatattgagcaattactgggaagtaaattaggagaagaaaagttgcagtcgctgaaacaggaattgccggatatgattgccgggattttgcccgattaccggggatatttagggatagatatgatgatttattccgactctgcgggaaagtatagagtgcaaccttgcctggaaatcaatctgcgttataatatgggaatagtcgcccttatgttgagccggcgatatttggacgaacatgcggaaggagagttcacggttcgttattatgccaaagcgggggaggcctggcaggagcacaggcatttgcaacagctctatccggccgtatataaaaataaccggataaaatccggttatttaaatctgactccagtcaatgaagccacccattttgtggcatccctgatctgttattgaatcttggtatctttcagaattacgtcgtgtgctcctccttcgacaatagaagtagaggataccaaggtgatttttgctctttcctgtaattgaggaatcgtaacggaaccacagctacacatggtcgatttgattttgcccagggtgatttccagattgtctttcatttttccggcgtatggaacataactgtcgaccccttcttcgaatttcagggcagctttactgtttcctcccatatcgtagcgttgccagttttgagcacggttggatccttctccccaatattctttcacatagctattaccgatagccagttttttactcggactctcgtcgaagcgggcaaagtagcgtcccatcatcaggaagtcggcgcccatggccaatgctaaggtcatgtgatagtcatgtacaagtcctccgtcggaacagatcggaatataaataccggtttgttcgaaatattcctgacgagcctggcatacttcgatcagagcagtcgcctgtccccggccgatccctttttgctcacgagtgatacagatagaaccaccgccgatccctacttttacaaaatcggctccggctttcaccagatataagaatccttctttatccaccacattaccaccgcctaccttgacttcttcgttatacgtttctttaatccagcggatcgtttcgtattgccattccgaaaaaccgtcggaagaatctactaccagcacatctactccggcatctaccaaagcaggtacccgttctttaaagtcgcggctgttaattccggctccgaccatcagttttttatggctgtcgagcaattcattgggattttctatatgattgtcgtagtctttgcggaagacaaaatattgaagtctttgattgtcgtctataatcggaaggcaattcaacttatgatcccagatgatcgtattggcttcacttaaagtcagccccaactttcctacaatcagattttcgaaaggagtcatgaaatcaactaccggtttatctaacggatctgttttcaaccgataatcccggcttgtaatcatacctaataattttccattaggggttccgtcatccgtaatggcgacactggcgtgtccggtttgttcctttaagcgaacaacatcctgtagggtacaatcgggacgtaaattagaatcactcactacaaatccggctttgaatttctttacccgccttaccatctcggcctgactttcgataggttgagaaccgaaaataaacgacaaacctccgttacgggctaaggcaatagccagaccgtcgtcggagactgcctgcatcactgcagatacaaacggaatgttcaattgtattttcgaggtttccccttgacggaatttgacaaccggcgttttcaaggaaacattgtcaggagtacactctttggtggtgagtgacggaattaacagatattctccaaatgtacgtgatacttctttaatgtaatgagccatatgctgtggatttttaaaaattgagcgaaattactcaattcccgcttaaatcccaagcccgatctgttattttttacttaattttagaggtagtcctggaatttttcggacttagaatgaatctttcgatttcaatatttgatcgatgaccggtgtgatatcctgatttttgtgaatacgtaacggtttaactccggcatcttcagcacattttacatcctttgagctatccccgataaaccaggatcgcttcttatcgatatggaattcttcgatggccaggttgaccatataaggagaaggtttccggcaaacacaggtttttatgctttcatggtggggacaataatagatcttagtcagggtcactccatgcttttccaattcggcacacatcttttcgtgtactttgaacatatcttcccgggtatatatccctttagcgattcctccctgattggtgatgacgatcaaaagataaccggctttctgaagacgtttcaagccttcgatgactcccggattgaatacaaagtcctccggtttgtatatataataatgtccttcgtccgaattgatcgtgccgtcccggtccaaaaatacggctttattcaaaggttgggtcgatattgaagtagttgttcttttcatatggtttaatacgttcttgggatgattatagttacttgtccgggaatattaatgcatgattttgaatatcagctctttcagtaattctccgtccgaaatattcgcattacctacccctttggatttcatgtcgtattcccgcagcaaggagatcgtggttgcacatttcatggcattatagattttacctccgtcgatatagtctttcataaaaaaaggatgtacacctaataacctggccatttcctgagtattgggcgtcgtttttttctgatagtgataggtcagcaggttcaggaaatacctgaaaagggtggtgatggtcaataccaggggattgtttttcgggttggcttcaaagtagttcacaatctgattggcttttaggaaatccttacgaattatggcactcaggagctcgaaactattgaagtctttactgattcctgtatgttcctcgaccagagattcctgtatttcacctccctgaggtaaaagcagtaccagcttatcgatttcattcgctacccggctcagatcggttcccaagctttcggccaggataccggctgctttagtcgtgattccatatgatttttctttacaataaccgatgatccattccggaatcttgttgtcataaagtttggccgattcgaaataaatacaatggggagtattcccgagttttttaaatactcccttacgtttgtccggtttcttatttttatacgccaggaccagaatggtcgaattttggtaatgatcgatataaggtaatagattgtcgaagtcccggatattctgagcttcccggacaatgaccacctgtcgttcggacatcattggaaaacggcgggcggtatcggtgatcgtactcatcgatacatcgttcccatataaaacagtttggttaaatgccttttcatcctcggtcagcacggtattttcgagtaatgcagtcaaccggtcgataaaaaaaggttcctcaccgcatagaaaatagataggtttatatttccgggccttgatatctttcctgatctcttcgaatgtcatcgttttacaatttgttaatgcgccgataattgggctgaacaatctatgcaaagttagaaaaactttttaccttttggattctgacaggattttttgtacaatttcctcgatttcggcatcttcgccttgcggatcataggctgctttcaggttatttccgaagattaaagcgatcgattgccagaagtaggcatttaccgtcccccggtattcccggatgtgcgcgaaagaagtgtggctggtttcccggtagattaatcggatcaaaatccgtccctgggtaatgctgagtttcatcaggggggccttgaacgttttcatcagctggttgtattcttccttgatgatctttttgcggtcggcttcccgggtgacggccgacagtttctgttcgatctcattgactttaccggcagctatccgggcatagggatatactttccggacattatattccaaccgggtttgccgccggtgctgacgctgaaaccagccggcatttttatttttctgccggacactgacttcttccagccaaacatgagggagggtatcacctttccagaagatggaacggacgacttctttttgttgggccgacagacaatttatgcaaaatataaaaagtatgaccgtgaatattctcggcatcacaaaataatttgttatttttggctcgtaaaaatacgaattattgtggacgaacaatttcaggatttatttaaaataagaaggaatcgtaaaaaagtggagattggcaatattttgattgccgaaccatttctgcaagggaaatatttttcccggtccgttatttttatggtagaacatgacgaaaagggaagtatcggttttgttttgaataagccgatggcttacaccacttcggatctggttacggaattagccggattggaatatcctgtctatatcggtggccctgtcgaacaaaatcaactgtattatcttcataatcatgcagaagttgaagatgctttgcaaattgtgccgggtatctattgggggggcgatttctcgaaactgactcgtttgttgcaggaggggaaaatacagccgggggaagttcgcttttttgccggatatagtggctgggatgccggtcaactggatcgggagttggatgagaattcgtggatggtaggggatattactcctgcgcgttttttcgaaattcctaacgataatttatgggaagcttcgatgagcggattgggaggacgttaccggatttgggctaattttcccaaagatccgattatgaattaattcgtgaaaaacgaatcagataaaatagcaggccgttctatcgctgtcccttcggggaaagaggaaagtccgggcaacacagggcatcgtgcttcttaacgggaagatgttcgtgagggcatagtaacgtaacagaaaaaaaccgtttcacgaagattcgttttcgcttgaaataagggtgaaaaggtggggtaagagcccaccggtactgcaggtaactgtggtagccgtacgtctcacgagttgcaaggccatgtataccggcgcattcgattagcccgatcgatgccggggggtaggctgctagagctgcaaagtgatttgcagagtagataaatgatagaaaccgtaaggtacagaacccggcttacaggcctgctatttttttattttacactaaacaggaaagctgttgccgaactgtttaaaatatagtttgattaaaccagattgaaatgaaatcgatacgtgagatttacaatatcggatacggaccgtcttccagtcatacgatgggaccgagccgtgctgccggattatttttggaaaagaaccccggagcagaaaagttcagggtcacactttacggaagtttggcgctgacggggaaaggccatggtacagacagtgctattctgaaggttatagaccgtcccgatgctgtagagatcgtttggaaaccggatatcagtctgccccgccatcccaatgggatgttgttcgaggcttttgtacaagggaatacggttgatagttgggaggtatatagtgtgggtggaggcgcattgtgggacgagttgggtactttcgacgacggaaatctctacccggagacaagtatggccgaggtgatgaaatggtgtctggacgaaggatgtacttttgtagattatgtagaaaaatacgagggaagtgagatattcacttatctggaagaggtgtggaaacagatgcaggagacggtagagaaaggcctggtgacggagggggtactgcccggagccttgaaattggcccggaaagcaagttcctataatattaaagctctgcaatcgtccgggtcttcccggccgatgggtatgcttttcgcggcagctttagctgtctcggaagaaaatgccggtggtggccgggtggtaactgctcctacttgtggggcttccggagttttgccggctttgatgtatttcatgaaatacgatcaggagatgccggattaccggattatccggggattggcaactgccgggttgatcggtaatattgtgaaaagtaacggttcgatttcaggagccgaagtgggatgccagggcgagttggggactgcctgtgcaatggcagccggagcagctacccagatttggggaggtactccccggcagatcgaatatgctgccgaaatgggattcgagcataatttgggactgacttgcgatcctgtgatgggatacgtacagatcccctgtatcgaacggaatgcttttgtagctcaaaaggctcgggaagctgctttgtacgccctgttttccgacggtcggcacatggtttctttcgacgatgtggtgaagacgatgatggaaaccgggagggatatgcaggccaaataccgggaaaccagtttgggcggattagctcatgtatgcttgagggagctaagccatatgccccggaaaaataagaagtaaaacgcaactaaaacgattaaccgacgttaatccaatagattttaaaacagataaagatggataggataagactgaaagttttaggtctgtcgtatagtatgtcgcaggccggtgcatacgctctgattttagccgatgagcaggatatgcatcggattccgatcgttatcgggatgcctgaagcacagtcgatagctattcagcttgaaaagatgcagactcagcggccgttgactcacgacctgatcaagaagttggcggatgcgttgcaagtcactttaaaagaagcttttatctatcgtctggattccggaattttttattcggaattgctatttgagaaagatactcaacaaatcaaaatagattcccggacatcggatgccattgctttggctttgcgttatgattgtcctatttattctacgcctgaaattgtggaaaaggccggtattgcggtcggtcaggaaacaggacagaccgaatcccccgaaaaagaagaggtcgtgcaacaaccctattccgttcaggaattgacccggatgctggacgaggctgtccggaatgaagagtatgaaaaggcatcgaagatcagggatctgctaaaagagatggggaaataaaatatcaggatgacttatctggggtcaccttttttgtaaatttgtgattcggaaattaaactacacagtaatataatgaattatggacagtattaagtttgattacagtaaaatctgtaatttcgtcactaaagaagaaatgattgccctgtatcctgaggcccggcaggcattgaaaagcctgaaagagggaaccggtaaagggagtgattttttaggatggttgaacctgcctgtagaaatcacctctgaacagttggcagatatcgagaaaacggcagccgaacttagagcacgtactcaggtaatggtcgttatcggtatcggaggctcttatctgggggcacgggctgtcatcgaggctttggcagatagtttccacaactatgaaaataccggtatgaaagtgatttttgcaggtcataatatcggtgaagattattaccatgaattgattcactaccttcagaataaagagttcggtatctgcgtgatttcgaaatcaggaacgacaaccgaaccggccatcgcttttcgtttattgaaagaattgctggaagctaaagtaggtaaagaagaagctggaaagcgaattgtggcgattacggatgcttcgaagggagctttacgtacattagccgatcaggaaggatataaaactttcgttatcccggataatgtaggaggacgtttctccgttctgacaccggtgggattattgcctatcgctatcgctgggttcgacatcaaagaattggttcagggagctatagaaatgcgtaaggcttgcatcgatgacgaaaaaagtatcgccctggaatatgccgtggcccggacagctctttaccggaaaggatatgccgtggaattgttagctaactttaatccgaaactgcactatatcaccgagtggtggaaacagctttacggcgagagtgaagggaaagcaaacaaaggtatcttcccggcaggtgttgattttacaaccgatttgcattccatggggcagtatatccagcaaggggtgcgcatgttgatggaaaccgtaatctctgtcgggaaaccccactatcaggtgcagattccttcggatgccgctaatctggataagctgaattttctggccgggaaacgggtagacgaagtgaacaaaatggccgaactgggtacccaaattgcacacgttgacggcggagtgccgaatatgaaggtttgtatgccggctttaaccgctcagtatatcgggcaactgttttatttcttcgaattggcttgtggtatctccggaagtatgttgggcgtgaatccattcgaccaaccaggagtggaagcctataaaaacaatatgtttgccctgctggacaaacccggatatgaagaagcttccaaagcgattaaagcgaaaatctagaaaacaggatttttatccgatagaatgtatgcagtctgaaacattcaggctgcatttattatttcatagaaaagtgatataaacttaaaccgctgtaactattaaatggcaggtataattttttctttctattctgatccccgaagacgaataagtataaaaataatgctggaattaaatcggttagtaaagtccgtcgactttatgaactaattatacttacgtttcgatacttcatttttcggcgtttttatttatttttgctgtgcacaataacaataaaataagactatgagaactatcgcaatcctgtgtggcggaggaccggcaccgggtattaatacagttgtggcaactgtaaccaaagtgtttttgaaagatggattccgggttttggctatccacgaagggtataaaggattatttgctgtacatcccgaggtggaggaactgacttatgaaaaagccgatcaaatctacagccgtggaggctctgccataaagatgagccgttttaaaccggaagaccaggatttcacgacagctttgtttgtaaaagaaggtattgaattgctggtgactatcggaggagacgataccgcttcgacggctaaccgactgacgaaatatctggcagctcatcaggtaaatatccggaatatccatgtccctaagacaatagacaatgacctgcctctgccggaaggtataccgactttcgggtttacttccgccaaagaaatgggggtgactatcggtaaagtgataaaagcagaggcatctacgacccaaaactggtatctactgatgtctatgggaagggaagccggccacctggctttcgagatcggtaaggggatacatgcttccatgatcattatcccggaaatgttcaataagacacaaattacgatcgataaaattgttcgcctgatcatatcttccatgatcaaacgccggatcgtggggcagaaattcggtgtcgttgtagtaggtgaaggaatttttcattttctacaggatgaagatattgcttcttccggaatcactttcgattatgacgctcacggacatcctgaattgtcggaagtgagtaaagcccatgtgatcagtaaaatacttaaaaaccggttgaaagaactgaatctggatattatttgccgtccggtagaagtggggtattctttgaggtgtgtggatccttcggcttttgatttgacttattgcaccactttgggaatcggagtgaaaaaactttatgacgaaggacattccggttgtatggttgcggtaaatctcgaagaagaagtaatccctgtgtatctgaaggatgtagaagacgagcatggcaaaatccgtacccgtttggtgaatatcgataaagaagtagtacgacaaaccctggctgaaaatatttactaccttactgctcaggatcgctctctggcgcgtaaatggctggccgatccggaaccgttcgagtatgagagaatattaggatgataattacgttttcattatgctggcatacacctatattgaacaagggaaattcgaattactggaaaagcagagaccgcaaataaaagattcgcgtgatgctattgtacgtgtaacgcttagcagtatttgtaccagtgatctgcacataaaacacggcagtgtcccccgggctctacccggaataacagtcgggcacgaaatggtgggtatcgtagaagagatcggtattgatgtcggttcggtcaagcccggagacagggtcactgtaaatgtcgagacattttgcggggaatgttttttttgcaaacggggatatgtaaataattgcaccgatccggacggaggatgggctttagggtgtcgtatcgatggagggcaggccgaatatgtgcgggttccttatgccgaccggggattgaaccgtattcccgataccgttagtgacgaacaggctttgtttgtcggcgatgtgctggctacgggtttttgggcttcccgcatttcggagatttcccgggaggataccgtccttattatcggtgccggtcctaccggagtctgtaccttactttgtactctgctaaaacatccaaaacgtattatcgtttgtgaaaaatctcctgagcgaatccgttttattcaggaatattatccggaggtagaggtaactacaccggaagactgcaaaaatttcgtacttcaaaacagtgagcatggtggagccgatgtggtgttggaggtggcgggaggggcggacaccttccgtttggcatgggattgtgcccgtcccaatgccattatcactatcgtagctctttacgataaaccccaacttcttcctttacccgatatgtatggtaagaacctgatctttaaaaccggtggagttgacggttgtgattgtgccgagatcctccggttaatcgaggaagggaaaatagatacgactcctctcattactcatagattcccgctgaaggatatcggaaaagcttaccatatctttgaaaacaaactggatggggtaatcaaggtggccataatttcaaaagtgggccatttatagaataggaattttataaatcagccccagggagaaggtttgaggatgttcgtccaaagcctgaaaattttttcccaaagccgtataggtgtatcgtttcccccggtaggctgcgaagaaatggagattttctttcatcggataatattcgataccaccctgatatccccaggtggttctgtattttccggatagtaggagcccgttgctttttctgacttcagccgtttcatacatccctttggcaaacaggttgagtttcgggaaaatacggtaattgatacgactcaccagagatagatagccgctgtgttgtgcacgcacaggttgatcttcccggtaggtaatgccggaaataatacccagtttgtctatatcttctgccgaatacatcacatcgaaatacaggttgaatctttcctgtacccaggctgctgccaaagccagaaaatagacattttgcttttcgccttcgtggaataaagaaaaagaacagcgggtgagtaaatgttcgttcagaaaattgccgttccagtttagggtatagccgaggggggctttggctgctttgactttttcagggagaggaccgtaagtgtcgtcggcttttccggaatgtccgtcgacgatctggaaacggatttcctgggtcggtgtcagccaccagcaaagattggcgccgaccagaaagcaggtgatctcatttcccaggtccgaatattcataaacttctgccggattggcatcgtattcgaaacctccgaaatcggcgtattgtttaccgataaaagtcgatacggtaggagtgatccggaatccgacaccgagacaatcgatagaagagggcatattgtcgagctgtccgggggtattgctccggttcagatgctgcaaccatttgtaatagatccggtcggtgacgtcaccactgacttccagacgcagataatctacccgaaaagccgatttttcggtagactggctggataaggcggtatgataagcgatccgggtatttaaatcgacatgcggcaaacgattgcgtttggaaaggccggaaagcttttcaaaaagggtttgtcctttgagggaatctacccataaagaggccggcgcagcatagcacaacaaaataaaaagccccaggaggctaaagtatcggatctgattcatattttttatattcacggtttacaggccgcaaaaataatcatttcacgataataattgtgcggagaacaggatgattatttctccgcacaatttgatcagaatacaggaagctggtatactaatcctaattcaatacgttgtggattactattaccgactccgaatactttagctttgtcggtatattggaaagagcggccgatgtaattcagaaagaaatggaggttctcttccatcggataatattcgattccggccagatatccccaggaagtccggtattttcccttggcaagtaagtctgaggctttctctactgaagcggtttcatacattccctttgcaaagagattcagcttgggaagaacccggtagttgaggtgaagcaccagagataggtaacgggtgtccagggcccgggtgtcatatccgtcattagcggtaatttccgaaatgatacctgtacggtcgaggtcttcggaggaatacataaagtcgagaaaaccgataaaacggtttaaattgacttcggttcccaaagcataataataccaattctgtttttttgcttcgtggaagatagaggcagaccaacgtgttttcaacttatcttccagcatgctgccgttccagtttaacgtataaccgagcggggctttcgaagcttcgatgttgtccggaacttttccgtacatctctttaaacgaaccgttccgtgaatcgacgacctgaaaatgaaaatcgtgtcgatcgttgagccgatatgaaaaatcgactccggtcaaaaaattactcatgtattccagcatatcacagtattgatacacttcgatcgggttcaggtcgaattcgaatcctccgaatgcagtacattgttttccggcaaatacggaaaattgatcggtaacatgaaaaccgacggctgcataatcgatcgacgtgggtaggttgtccaaggattgggcattattcgcccggtttaaacgctgacgataacggtaataaatccggtcggtgatgttacctttggcttcgatccggagctgattcatccggaaagaagtttgttcttcattgccattattaaagtatacattgaaactaccctgcatattcaggtacaggttaaaggcatccgtttttttttcgagacgggttactcgttcgaataaagcggggcctccggcatccgtggaagattgcatgtccaggtgttgggcatacaaggccggaaaggagagtgtacataatccgcataacaatatccattttttcatagagagtcggtttaataagcattaaaataattctgaatgacttgtggatcttttgtttttgtcaaagccagcatcaagagtatccgggctttttgaggattcaattcctgtgaagccacaaaaccgtatttggcatcgtctacctcggcatcgagtgttgtcggtccggtcggaacgcggctggaacgtaccaccagtataccttgtttactggcatttaccaatttgtcgaacaaattcttatggatattaccgtttccgactccggcatggacgataccttggtaactgttggtgatcaatgcatccaaagcttcgggttcgacattggaataactgtaaacaatacctactttaggtaatttatccagatgagtgacatcgaataccgattggagcgtatggagtttatcggtcgattggttataatgtacttttccattgaatacataccctaaagctccggaattgggggcttggaaagcttgtacgttgatggtattcatcttggtggcggcatgggcacccaggatgctgccgttcatcacgatcatcactccgcgaccgaccgactcggaagcaccggcggtaacgacggcattatagagattcagcggaccgtcggcactcaatgaggttgccggacgcatcgctccgacaagtactaccggtttattgctttttacggtcaggtttaagaaaaaggccgtttcctccatggtatctgtgccgtgggtgatcactacaccgtccacctcttttctttgtagcagttcgttcagataatgagccagtttcaaccaaacttcgtcggacatatcctgggaaccgatttttacaatctgctctccggtgatgttagcgatttctttcaattcgggtaccgccgaaattaattcgttgatcgcaacctgaccggcccggtaactgcttccggtagtactggtccctgtgccggcaatggttcctcccgtagccagaatgtgaatgttaggcagtttttgtgcgaaacttcctgcctgtaaaaacagaaagagtgtggcaaataagaaaataaatctaagtgttttcatatcattcggtttaaaagtcaataaaatgcttagaaaataaattgtaccaaaatcagtccggtcacgacggaggtgatggtagcgatcagtcccggcatcataaaagagtggttcaggacatattttccgatacgggtggtccctgtccggtcgaaattaatggccgcgacaactgtcgggtagttgggaataaagaaataaccgtttacagccggaaacatggcgatcaacaaaaaaggtgaaatacccagggcaatccccaagggcataaaagcccggacggtagcggcctggctgtataacaggatagacatgatgaacagggcgatcccgaacaaccaaggcatttgtgtgactattccctcgatagatcctttcagttcggtcatatttccttgtaagaaagtatcacccatccaagcgataccgaagatcgcgacaacggcctgcattccggccgaaaagacactaccctgagctgctttgattccgttggctttcgtgaataataaaatcaaagctgcagccgataacatcaggatctcgataatagaagccatatcgacagtgaccggtttcccatcgataatatgagagggacggaggttgtcgaaagacccgaagataacgatgaaaacagtggcaatcacaaagataagaacagaaagtaaagccttatgtttattacctatatccttgagttcataatggctgttgtctaataaaccttccttcagacgtctttggtattcgggatcgtcgactaattctttacctacccttagcgaatacaaagctccgagaaagacgccgcatagcgtggatggaattgtaatgatcaggatatcgagcaaagagatattgaatccggttaaaagtcccaaaagggcgacagtagctgcagagatcggactggccgtaatggcttgctgggaagcgatgacagctattcctaaaggacgttcggggcgtattttggtttcccgggctacttcggcaatgaccggaagaacagaataagcgacatggcctgttccggctacaaaagaaaagaaataggtcaccaggggacttaggaaggtgatttgggcgggacgtttccgtaagaggtgctcggctccgcgtaccatcaggtccaatcctccggctgcctgcatacaagcagcggcagtaataacagcaactatcatcagcatcacatcgataggaggggctgtcggttgtaaaccgaaaacaaaagtcaaaattcccagaccgatacctcccataacccccaaaccgatacctcctaaacgggcaccgacgatgatcgctgttaaaacaaaagcaaattgtagtatcataccctttttttatactctaacaaattgtacacaaataattcaaaaatgtttcatttacatggagatatctatctattttcttgtaagattaaaaaaaaatctacatcttcgcgggcgaatttatcatatcgggaaaagattttattattatcaaaaaacaattaagaatgagaacattaggaaaattgaaattaatagcagtttctgctgctttagtattgggaatgagttcctgtttaaagaacgataagaaattcgccatttatgcatcaccggcttatattcttcaggaagggaacaggtatcagctgcaaattcaagtgcagggaaatgaacaaataaagtcggcttcagcttctttgaatggtaaaaactattctttttctgctgtggaaggctcccaaaattttttgatgcagatcaatgcttattcagcaccgacattggatacgatcaaggaaggtttatgcaccgttactgcttttaatgccgaaggcaattcggcagtcagccaactccagttttatggtacggataaaaaaatcggaaatgttacgctgacaaaattttcttattccggagctgatggtaaagtaactgcagaatggaataaagtcgaaaatgcagaagcctattatttattgtatcggatcaaaagttcttctatgatgttcggagataatatgtggcttccgtatgttcagttgtctgtcaccgataaagagaacccctctgcaacgacaaatattccttttactaaagacgatgaatatgaaattgcaatcggagctacctataagacagctttgagagtatcctaccctactttgcgtgttaccggcggaaaagatgcttctatcaactaagcttttttagaaaaatcatatcggaaaacgggattttatcgatcccgtttttcttttgtctgtatttttgccgattccgtgtctgagttgaattcggtcctgaatgataccggaaaatgagatgggaatcggcggcaaaagaatatattaaaatgaaccccccgagccgataagcaagaggggtaaaaacggtatgtaccgaaggattagctcaatcttactgtatccatagcgatcacaagctcttcatctgtagtaaccgtcatcaccgtggtagtcgattgttctgtgctgataatcgtatcttttccccggacttcgttcttttgtttgtcgacctggatgccaaggtagtccatattcttacaggtttcccagcgtaccagattgtcgttttcgccgatacctcccgtgaagataatcaagtctacaccgttcagtactgcggcgtaagctccgatatatttcttcacattgtaacagaagacatcgagagccaaggccgctttttcgttgcctttttccatggctgcctgcaattcgcggaagtcagaagaaacaccggagattccctgaacccctgatttcttattaatcaaattgttggctttgggaaggtccagcccttctttttcacagatatagagtagggcacccaaatccagatctccggcccgcgttcccatcactagtccggctacaggagtaaatcccatcgaggtatcgaccgatttacctttatcgatcgccgtaatcgaagctccgttacccaaatggcaagtgatgattttcttttcggtaatatcccaacctaagatccggcatgctttctctgctacaaatttatgggaagtaccgtggaagccatatcttctgactccgtattcttcataatattcgtaaggaataccataaatgaaagcttttttaggcagagtctgatggaaagaagtatcgaaaacggccacctgaggtacggaaggaagcaatttttccatcgtttcgatccctttcaggtttgccggattgtgcagaggagcgatttcacctaaagctttgattttagctttggcttcatcgtcgattttcacgctctcggagaaatattcacctccgtgtgcaacacgatggccgacagcatcgatttcgttcagagatttcaatactccatggtcaggatgaaccaatgctttcaggatcagatccataccgacactatggtccataatcggttgctcggcgactactttgtctttaccttccggtttataagtaaaactaccgtaagtcaaaccgattttttctacaatacctttggcgagcacgacaggtactgcatccatattcagtaattgatacttgatggacgaactaccgcagtttaatactaaaacattcatttctattttattaaacgtttttattccgttaatttattccggcggcctgatttactgtgatcgctaccagattgacgatatcactgacagaacaacctctggacaggtcgttgataggagcggccatcccctgaagtacaggacctacagcttcgataccggcgatacgttgtactaatttataactgatatttccaacttccagactagggaaaatcaaaacattggctttgccggcgacagggctacccggagctttgcttgcccctacggaaggaaccagcgctgcatcggcctgcatttctccgtcgatcataacgtccggagccatttgtttggccagttctgttgcttttaccactttgtcgaccaattcatttttggcagaaccttttgtcgagaaactcaacatagctacccggggctcgattttggcaatggcacgggctgttccggctgtagataccgcaatttgtgccagttcttctgctgtcggattaggaagtactgcacagtcagcacaaacaattaaaccgttttcaccatattcgggtttgttggtcagcaacaagaaggcacctgaaacgacggaaatccccggtaaagtctttacaatttgcagagcaggacgtaaaacatcgcccgttgcatttttagcaccggcaacttctccgtctgcatctccgctcttaatcatcaaagtagccaggtaaaggggatctgtaaccagttttaaagcttgttctctggtcattcctttacttttacgcagctctaccaataaatcggcatattgttcttttttggcatgtgattccggatcgataacggtagctttgccgatgtttttcagattgtgtttttgagctaaagcctgtatttcggccggattaccgatcaggataatcttagcgatcccttctccgataatctggtctgctgcctgaatcgtccgttcttctgtaccttccgggagaacaattgttttacactgttttttggcattttctttgatttgttctaaaagttccattgtattgtattttttatccagtttcttttaaacgtttgcaaaagtaggaataaaataactaaaaaagaaaaagagttgccgacagggcacacccttt

SEQ ID NO: 5785 - DNA, 18926 bp, Unknown
  gut microbiota DNA sequence
tttaaaaacatacaataattatggattcggattatccgttatttcaagtgatgaagggggtggttttataaaatcgaacagtatcggactatcctactcctggagagggtatttcaacaaagaaaaaaatatctactttcaattaggagtgaaaggttcttattatgacgaaaggctgaatccgaacaaatacatttattccgggaatcttcatgaaatatacggtaacattctaccgttaccggctttggacattgtcaatgaaaaacaaaattattgggatttcagtacaggttttatgatctatgttccctgggaacgtcattaccgtgaatttatgcataatttcatcggattttccgtcaatcatttcacccgccctaaagacaattttatcgaagaaaatgcccggattccgatcaaactgagtttacaatggaatagttttatcagaacctccctttatagcctcgacaaaaaaagtagtttatatgtttgtccgggattattatatgaaaaccgaggagatcgattattatcttcctcctcattcgataactttatcgtcggttcggatatcaccaccgatcccttattcggtggagtatggtatagttctcagctcctgaacagcgataaagaaaattataaagcgatcattttcaaacttggactcaagttgaattctgccaataaaaaatttgaatatcgtctggcttattcctacgatatgtctcttggaaatttagtaaaatcaacagaaggatcccatgaaatcagtttcaacatcacctacagattcaatgccaaataccgatataacatattttcattctgaacaagatagcctgtctattctaccattacatcaaactgaaacagacacatttgaaatctatatgcctgctggtcgatttttaccttcgacacagttggaacacaataaagatctgttcggaaacgtactattcacagtcggtttcctgattatttttgcatttgtaagattaagaggtaaagatctgttttacaatctattgaatacattattgaaaaggaagaaagctgaaattattttgaatgaaggaatatcttccaatctgatctgttatattctatccttatgtttgtccttctccatcatttctatcggtatcgtctatatcatcgaaggaaattttatcaatttatttacattatatcttttcatcggcttatttctttatcattttcttcttctcttgattgtccggttattcggatggacttttaacgctaaaaatatggccgacgaagtcatcgtaaatttatggacttacaatattttgtcaggacttttgatttcaccttttgtaattgcaatctttttcgtgaaatcttttgctgttattcctctattaaagatagttatattcggtgcaattttacttatgattgttaaaattataagatggattgaaatattaatcacgcatagggtttcaattttgtatatgattttgtacctttgtgccctcgaaatcatgccacttcttgtgctttacaagatggtagaataacatcagggtattaatttaaaactttactgctttgaagataaaaaagatactcgtatcgcaaccgcaaccaactacagaaaaatctccctattctgaactagcggaaaaatacggtttaaaactggaatttcgtccttttattaaggttgaaggagttacagctaaagaattcagacaggaacggatcaatattcttgatcacactgctattatttttaccagccgtacagctatagatcactttttcagaatctgcggagagttaagaataacggtaccggacacgatgaaatatttttgtatttcggaagcaacggctttttatttacaaaaatacatcgtctaccgtaaaagaaaaattttctatggggataagaaagtggatgatatgactaaaattttactgaaacataaaacagaaaattttcttgtacctctttccgatattcacaaagaaaatattcccggattactggatcagttgaatctgaaatacacgaaagctattctttataaaacggtttccagcgatctgagcgatatcaaaaatttgaaagaatacgatatcatagctttttataccccatccggtataaaatctttattccagaatttcccggacttcgttcaggataccacagttatagcagctttcggacctgcaactgcagttgcagtcgaagaagcaggattacggctggatataaaagctccgacaccccaatgtccttccatgacaatggctatcgaagagtttataaagcgttataacaaagaaaacaaaacaaaataatccaaaaatgaagctaatcacaaaaagtttgactttttgtgattagcttccctataagttaccaacctgcatttatgtactcactcagcaaagccgaacgtctatgtagtaaaattcttttcgaagaactattgacttctgagatcagctttgtaaaatacccgttccgggtcgtactcaaagattcgtctatacccggagaatatcctgccaggatagcgatcagcgtgagtaaaaagaaatttaaaagggctgttaaacgtaaccgggtaaaacggctgacccgtgaagcttaccgtttaaacaaacccgaattctatcagcatataatccccggacatacagtagatattctatttatctacctcgatcagaatcttccggttttttctaaaaccgaaaaggccataaaaagtgtactgaagaagattccatctttactatcctctgtttcctgatcccggtaaaacgatcgtatgacacttattaaatgcataatcagtcacttattacttttaccgattcggttttatcaatactgtatctcccctctaaagccacccacctgccgttttgtacccacttgctcccagtatgcgatcgaagctatccgaaaacacggaccttttaagggattatggctggctataaaaagactactccgctgtcatccctggggaggcagcggctatgatcctgtgccttaaaaaataacaatccatcttaaggatttgctaattttcaatttaccattttcaattatcaattatatatcgtattttcgttaattaaaaatcaggtgttgtatcacaaacaaaaatttaaaatataaatgaaaacaaaaagaattctacttgttggcatagcattcatctcgatcactctcggattgaccgcactgagaaacgatgataaaagctttgaaatcagtaagcagctgaatatttatgccactctgttcagagacgtaaatatgttttatgtcgatgaagtcaatcccggtgacctggtcactacaggaataaaagccatgttaaaatctttggatccatatactgtttattatccggaatccgaaatggaagatgtaaaactgatgactaccggagaatatgccggtatcggttccgtcatcagtaaaaaaggagatcaggtcattatccgggagccttataaagattctcctgcagataaagccggattacttcccggagatatcatcctggctatcgacggaatttcggtgaaaggtaaaaatacggaagaggtaagtactttattaaaaggacaaccgggaaaagaaatcaccataaaagttcagcgtgaatttgagactaaaccactagaaaagaaagctatacgagaaaaaatccaactaccgagcgtcccttattccggtatggttaacgatacgaccggatatatctatctaaccagttttaccgataaatctgctgcagatgtccgttcggcaattatctcactaaagaacaaaggagcctcttctttaattctggatctaagaggaaattcaggaggtcttctggatcaagccgttgaaatagtgaatttcttcgttccgaaaaattccaaaatagtcgacaccaaagggaaagtaaaacaatgggataaagaatatacagccaaaaataatcccatcgtacccgatatgcctttagtagtattgatcgaccggggttcagcatcggcctctgaaatcgtatcgggtgctcttcaggatctcgatagagctgttctaataggcgaacgttcctacggaaagggattggttcaaacagtccgcgatctggcctacaatacgaaattaaaagttaccaccgcaaaatattatattcctagcggaaggtgtattcaggccttggattattcccaccggaaccctgacggaagtgtcggaaaagtgcccgattctttgatttcagaatttaaaacccaatccggaagaaaagtgtatgacggtggcggaatcagtccggatattaaaattactccggaagattatgcaagaatcactcaagaacttgttttacaagatctaacatttgattttatcaatagttatgcccttcggcaccccaatattgcccctatcaatgaatttaaaattacagatgaaatatacaacgaattcaaaacctatctgaaagaaaagaaattcagttatgaaaccgaatcacaacagatattgaataaattgatcgaagcagccaaagccgaaaagtattatgacaccgccaaagaacaaattgccgctttggaaaatgatttcacccattctatcgaccgcgatatggacctctttaaagatgagatcacttcgtttttaacagaacaattcattcaacgttactattatctgcaaggggtaatagaatataaagtccagcatgatcaagaagtagctaaagcggttgaagtattaaacgataaagaagtatatcgaaataccctgaaacctgtcaaataactaaataaaaggctgtttatagaaaatttttctattttttgtgactgccttaaagaccgattggcgaatctaaagtttacaacttatatttacgatcggaactacagattcgccaatcagtattaaaacaatacatattaagctttaaagcagctgatttacctcggcactctttcggataaactcttattattcggtttcttgatgaaaatactcatgaataagttgtgctttcttcttcccgatcaccttagccagttcttcaatagacttttgtttgatattactaactgacttaaactcatgcaataatatagtttcagttgcttctccgatacccttaatatcacctaatatactgttaatctgtgatttttctctcaatttacgatgaaatgtaataccaaatcgatgggcttcgtcccggatatgcatcaacgtttttaaagccatcgaatttttagccaacagataaggatccttatcttcaggaaaataaatttcttccatttgttttgccaatcctaaaatcggtactttcccatatagatctaattttttcaaactatttacagccgaatgtaactgtccttttcctccatcgatcacgatcagatccggtaattccagaccttcatccaatactcttttatatctccggaaaataatttcttccatagaagcaaaatcgtccgccccgacgactgttttcacgtggaactttcgatattcttttttagccggtttaccatcgataaaaactacacaggaagccaccggattagtcccttgaatattcgaattatcgaaacactccatacgatgtggtaatgtaggcagttttagttctaacttaatgtttttcaatatattaaaactcgaatcttctttctttagattcctctgccgttctctatccaatctaaaataggatacatttctttcggacaaatccaataattgtttcttgtcacctcgttgaggtatcacatattgcactccttccaattgaacatccggataaaaaggaacaataatttctttcgaattactattcaccaattggcggatctcatagatagcgaaagcaagcaaagcttccttatcttcttcgatcttcttttctaattcaactgtatgtacttgtataacagcaccatgaacaattctcaaaaaattaacataagcatatttctcatcttccaaataagaaaaaacatctgtatcgtgaatcgtagtacggacaatagtcgatttagattgataatttttaatggcttcaagtgcttctttcattcgattggcctcctcaaaatgcagtgattccgcatacgaattcatcttcctggtcataacctgaatgacagaagacaaattacctttcaaaatattcctcacctggctgataaattcatcgtattcttcttcctgtattttaccaatacaaggcccgagacaattaccgatatgatattccaaacaaactttaaaacggttgttatagacagccttcgtatttaatgcaagcttacaagtccgtaatttgaataaagatttaattaaagaaatcagtacatgggcaaattttcccgaagtataaggaccgaaatattccgatccgtcgtgtacaaaacggcgggtaagaaacacccggggataaggttctttcttaatacaaatccagggataagatttatcgtctttcaataaaatattataacgcggcttatattttttgatcagattattttctaaaagtaatgcatcttgctcactatttacaacaatataccgtaaatccgtgattttattgaccaaaatccgggttttatttgactgattactttgatttaaataagataataccctattttttaaatttttagcctttccaatatatataattactccagaagaatcgaaatattgatatactccaggtgaagaaggtaattcactaatcttttttttcaaatggtcatcatataaagccataacaaattcaatctgctaaaaacttaaatttactatattcgaacaatcctctttcacctattttcaattcaggtatcacaatcagagccataaaagaaagagtcataaaaggtgaatcgagtatacacccattatgatgcaaaatttgaattaatttattccaaatcatagctaccttttcaccattttcatcagtcataataccggcaataggtaaagataaaatgtcaacttctccctcagatgccactgaaagtcctccttttgctgaaataatagaattaagagcaatcaataaatcctgatcattacatcctactgcaatgatattatgggaatcatgcgatatactacttgcaaaagcaccttttttcagacctattccatgtataaaagcaatctgaggaggtttattctcataacgattcagataaataatcttgagtatatctctatccaaatcagattcaaaattatcgaatgaatcatgatttgaaaaaattactttatctgtaattaattccccatcatacaccttgatagaaacgatatcggatgttatgggttttctcaaatcggaaagctggagtaatttccgattgaattgattcaaattcgaaaaatcagaaacttcagctttaatatccggcatagaccaagaactagaatatttaagttcaccctgtatgtaaacttccgatactgaaaatgattttaagtcttcaaatatacaaaaatcagcaggatctcctatccgaagtgtacctaccggtaagtgataatgttgtataggatgaagagaagctattctcaaaacctgaaataaatcgaaaccatcagcaataactcttcgaactatcttatcgatgtgcccgcaatgaatcaaatctccgggatgagaatcatctgtacaaaacatcaaagaataaggatgactatttatcaaggattttaaagcctcgtaatttttagctgcacttccttcccgaattagaattttcattcctaaagaaattttttccaaagcttcggataaagatacagattcatgatcagtagaaatgcctgcacttacatattgtttcaaaacttcccctattatccccggagcatgcccatcgatcggtatattatatttttcagctaatttcaatttacgccatacttcagcatctttttgtaatactccggatatattcatcatttccgatagagaaacaaacgaatagttttgtaataattcctcgatatgatcagaatttatttcagctcctgaataatcaaaagaagtagcgggaacacaagaaggcactgaaaagaaaattttgatgggtgctttccaactattttctatcataaaccgaataccttctattcctaaaacattggctatttcatgaggatcattaataacggctactgtccctttcgaaatagccagttttgaaaattcttcaggcaccagcatcgaactttcaatatgtacatgagcatctataaaaccaggcgctatgaaattttgataagaattggaattttctaaaatatcggtaattattccatggtctatacaaattgttccgggaaaaatccggttattatagatatcaataatattaccttcaatttttttcatcggttcaaaaattcttttataaaaatattttataaaacacatatttcacccttcgcaccttttttatgttccacgtgaaacattcgcctctttaccgtcccatcaatatcaaaagaacattaatatcagctggcgacacaccacttatacgagaagcctgacctattgttctaggttgaatctttgacaatttttgacgagcttcaatagacaaattcgtgagttcttcgtaattaaattttccagcaatgactagattctctaaacgggataatttatcggctaacattcgttcccgctcgatatatcccgaatattttatagaaatttcagcagcttcaatgatttcatcacgcaaaacaaattccccgataaaattattcaacgaaggtaaaacatcgatcaaagccaataatcccacttgaggacgactaagaatatccaccaacttcattccttgtcggataggtgctgtattcaatgaaagtagaaaagaattgatttcatcaggtttaacactaaaattcttaataaaatcaattaacaaatctctcttctctattttatccaaatatatcttatgtctattattagtaactaaaccaatctgaaatcccttaggtgtcaaacgcatatccgcatcatcttgtctcaataaaatacgatattctgcccgggaagtaaacatacgataaggttcatccactcctttcgtcactaaatcgtctatgagtaccccaatatatgcttcatcccgattcaatacaaattcaactgaagaatgtaaagataaatgggcattgatcccggccatcaatccttgtgctgctgcttcctcataacctgtcgttccattgatctgaccggcaaaataaagtccttgaatcaatttagtctctaaagtatgataaagctgtgtaggaggaaaataatcatattctatcgcataacccggccggaaaattcttacattctcgaaaccttcaatcaaacgcaaaccggtcaattgtacatcccagggcaatgaagaagaaaaaccgtttaaataaaactctgtagtagtttctccctccggttccaaaaataaatgatgactggtcctatcggcaaaagtattcaatttagtctctatgctgggacaataacgaggaccaacgctctgtatagtgccgttgaataaaggactatcggtaaacccctgcctcaaagcatgatgtacagcttcgttagtataagccatataacaaggcctttggatcagagtattcctataatcataatgcaaataagaaaaacaatgaaaatcattatccccgccttgttcggtcaatttagaaaaatcgatactttttccgtctatacggacaggagtaccggtcttcatccgccccgtttcgaatcccaagctacacaattgagctgttaaaccgtgagaagccggctcggaaatacggcctccttcgaaacttacccgacctatatgcattaggccgtttaaaaaagttccgttggttaaaatcacccgtttcgcattaaaaacgacccccaaggctgtcttaaccccgtaaacctgcccatctttcactaccaactctactacatcatcctgccacatatccaaaccatccgtatgctcgagctgatacctccaattagcagaaaatttcatccggtcgcattgtgaacgaggactccacatagcaggacctttcgaacgattcagcattctgaattgaatcgagctctgatcagtcactataccggtcaaacctcccaaagcatctatttctctcactatctgacctttagcaatacctcctatcgctggattacaagacatctgagctatcttattcatatccagggtgatcaataaggtatgagatcctaaatgagctgctgcacaggcagcttcacaacccgcatgtccggcgccgacaacaattacatcataatccggtaaaagatttgccattttaaagcgttttaagaagatctaagcaaatattttcatttttacgcatttccttactatcgacatccgttttatctttaaatccgattaaatgaagaactgaatgacaaatcaccctacagaactcattttcaaaaaaagtagaaaacatttcggaattcgatttcactgtatccaaactaatgaatacatcgcccgaaagtacatctccttcgcaatagtcgaaagtaataacatcagtataataatcgtgtttcaaatattgacgatttacagcaagtatataatcatcgtcacaaaaaataaaattgatagcacctaccgatttattataatgtccggcaatcacctcgatccatttacatatcagcttatcagaaaaaaaagaaggatagtctgcttttccttctctataaaacaaaatttctttcattgaaatagcttaaaaacgttattataacccaggaaatctttcccacaaaataaaaacgctgacacacacattcactacaaattaaaaaccaaagtcaccgtagaacctccgttttcaaatattaactcatcggacaaagttttcatcagatatagcccacgaccggttattttattgatattatccggtaaagtcggatccggtataacttcataatcgaacccctctccttcatcactgactgtcaccttaaattgtttatctgttttctcagctactaaactcaccattttatccggttggcgtttatttccggataaaatagcattattaaccgcttcgataaccgataagctgatcttaccatacaatacagacggtaaagcaaaataatcagtaaaagtttctacaaaattctcaactttgacaatattactgatttctgacgaaattgaaattgataatttattcattcccaagctttatatagtaatggttgtacattgatttaaaataagtatttaacttcaaatcagacttttgaatatccgttttaatgaaagccgatttcttttgaaattcaaacatctgctcaggccgatgaaaccgagtctgagtggccgattcagatttacgtttatcttcaaaatcctctttctcttttgatgctttttctgacattaataatttattataaattaagttattccgattaattaattgaccggaaaccgaataattagccatatctctaatattttgatcgatcaattggttgatctcattcaataattgtttttctctgcttgacatcgaaccagcttctgaaataaattcattcaaactctttctgaagagttcgttctctctgatcatattactgattctttgatgtaaaggtttacctttttcaccatttttcatttgagaaactaaatcttccaattgcttcttcagattacgttgaaattgcttcattttaggatatccactatcacctgatgaatttctttgtctttttttatcggaatttttttctcctcgtcgtttaccggatcgatttacttcttccttagctttttgtaatgcatcggtcaaagataaagcaatatcattcaaataattaataatataatgctgctcccttaataaatcgctgcgtctattgtcctgaatgtaacccggtaataatccgaattttacttcaagatcataaaactttcggtccaaaagagaagctagcatcaaattcgacttagccaagacagataaactatcttttattatcttatattcctgtctttttaaatcctgaatacggcctaactcattatatttcaaactttgagcttgtacatcagaaaattgctgtaacaattcttcctgtgatagcgaaattattaaaatattttgaattatcaattcaatatcattctgaggcaaggatttattaacaaaatttcgttcttgttgttgtttcattctttttgaaagttcgaaaagatcatcttcaatctcttctgacaactttttatctttcttattcccggatatattttgcctttgttgctgcattttccaagacaatcgatcgaaatcggtcttaaaatctttcaaatcgaaaggttctgacaaggttgaattctctgtaatcaactcttcataattattttctatcgctctcaaatcattcaatatgcttttgttccgggaataagcagaatcccgatcgaacgatttgttttccagtaaacgctctaaacgggcctgatccgatttcaatcgatcgatttgtttagaaatcaaatcatgcctctcttcgatttgaaaccgtttcaacaattcaatattccgatccaattcttcactgacctgatcgaaagtaaattccattctttcgtccaaatttttaaatttatctttcgaaaattcttcggaaagctttgaaaattcatccaacaactgttttatttcactatccatcaaacggtccagtaaatcctgaatcttcttttgcttatcgatcaataaactgtcctgaacagtaaaacttcgattcaaatccgatttcttctgattattttcttttacagcttccaataatcgatccaactgctcttttttccggacaacctccttcgacaactgttgcttttcccaatcatcagtcgtattatccaataatttttcccgtaaatcctggataccggtaacaatttcacctgctattttctcagctttcttcagatcattgttgaccgattgactaacttcccggttataatcaaaaatagtattcaaatcaggaatccggtaaatcagccgggaagaacgggtactcttcggaccggagagattatcgttatcaaaaacctcaaaataataatttatttccgttttatcggtaccggcaaattcagcaaaatcaaaactaaaataaaattcctgtgtattcaaattcttcataaaagataccggtacaacgacagtcctgtctgttcccagggaataattgaagcatagatctgaaaatccataatcatcggtaatcaccccataaaaataatgaagagaatttttcaaagaatcctgaatctccgtaatttgaattccagggtataaatcagaaatgcatataatattgaaattcaacaattgacgatgagaaaaataagcattactaccggacaatatatattctcccgaagcttttatctgtctggaaaaatcggtcttagataccgacttcaaaggaatagaaatactttgttctttatcttcaaaaaataaagaatccaaattagaataggtcaattcaaattgtaaaaccgaaccgtacaacacttgcaaatcgactgtattggttaaaatttcgggctcctttcctatataagcaggaggaatagctaccactcgataaccgtcgatagaaggagtcggcaacaccctcaaaagataagaatcgctagtttgatcctgcgttttaaaataaaatttcaaatcattattaaccagttcgaaatcatacgtaaaaattgaatcaacggaagtcattaaaaattctcctccgccataacaaataaaaacaggttttacagttgcatcgggaatggaaagactcaattgcacctgaaaggtcttaccatattctacttccaaacttcgatttaaaatgtgaaaacctacctcattcgaagggcccgaaacctgtctgtaatcttttaaatccgaataataatcataccattcaaaaccggtaaagaaaaaaagaacaaaaagaaaaacaacaataaccgataatttaagatacaatattctgggaaaagacaaaaaagaacgggatgcggtcagctgtcgatatttttgattaaaagccgcttgttttaacactgtttgtccgataaccaatttatcccgaaaagccagattatacacagatataaaaatatcgtcgacctgacggggtataacagacgagatttgttttataagaatatccctggataatcgaaaagacaagaaaaaccgaatgaacggtaaaaggataaaaaagaaaaactctactcctaagagtaaaaataaaatcagataaagaacatatttaaaatcgggtgaaagtctgaaaaaagaaagaagtccggcatagaagaataaaaaaagtaaaaaagtaaaaagcacaaccgctacacccttcaacagatcaaatcctaataactctaatctgaaacaggacaatttccttctaaaatgattcttcagattctcatacacagattccatcacaattatttagctaaccaaagctccggattcaatttctctgtatccttaaaaacttcaaaattcaaaacactccctttttcttcgtcatgagcaacttttccgatcacctgcttcgttttaacaacatctccttgatttacttttacctcctgcaaattaatatagacagtaaaataacttccatgacgtataataactacataactgtcgatatcattcatatacatagccacactaaccactccttgaaaaacggaacgcacttcagcattttttgaagttgtaattccaatcccccgactggctacttcaaccaatttatgtatcgaatgattaaatacaccgaatttctcagaaatgaatccttcagtcaccggccagggtaactttcccttatttttagcaaaatcgttcgataccaattgttcttcaggagtcagtttataagtcgaagtagtgctaccggatttcttgatttgactggctatcaatttatccaactgtttagccaacctctgacgtttttgcatttcggcttgcaattttttccgaaaatctttctcttttttctgaatctgagcaatatattgattttctttcaattgttcggattctaattctttactctgtacaccgatttcattcaaagcagtattcttttgtgcaaacaaatccttcaattctttgtttttaacatccaaagaatcgtttaccgcctgaatcatatgtaattgacgtttagaatattcctgaatctgttgaaagtatttaaaccgattataagcctgattaaaatctgctgaagaaaaaataaacatcaatttatctgttttattccgttttttccagctaccatacaccaatttcgcataaagatcgagcatcgacttcttgttctcttccagttctttaatacgctgctcattggcagaaatattattctgaataagtcctacttcctgatttaaagaacttaatagttttttactctgttgaatcttctgccttaaaatattcaatttctgagtagaaacagacttgttcttttcggcttccttcaacaatgaatttaaataagcgatctccttttcagtcttagctttttgttttttaatatcactgatcgattgagctgagacatttatctcaagcgaaaaaaacaaaactaacaatatacctaaaaacttgtagatcatgaattattctattcttttaaatttaggagaaattttaaaattcggttccaaaggtacgtcgaaatctattttcaaaaattttaattccagactggttttattatttccaaccgctaattggaagacaatcttttccggaaaattcttttccgaaaactgtttaaatgctccataattcacactcacagacatatcttcatccagatcttctacagatacttttacaggccggaaatactcaggatctattaaaatccgctgcaaaaccagcataaaatctttattctttcgttttttcttatagaattttttgatcttacggctaattgccctttcttctacagtagaaagttcatatcccaattctgtcttatccaatttatatttcttttccttacctaaacctgcacaatcctgaaaatcaaaaaaagcattcgtgatgatcttctcgacacaatcgaaacttacccggacatcgaacttatcataaaaataatcataatcggctacaaagaacttcttatgataagtgtctacaaatttgatactgtctttagtcaataaaatacgtgctactccgattcctaatggtgctgtaacattagcctgaataaaactatcccgcttaattttcagagaagcctttaaactattggatcctttcccgtctttataggaaatatccatctttttagcaaacaaagtagaatattccaattcattattttcgatatttttcaatagccggccttccgttatagaaggaatattcttttttaccgctatctgtttagcagaacggcaagacactattgaaacaactacgattatcaacaaaaatatatgtccacccagtctcatttcattcaattcatcgtcttttaatcggataatttaccggattgtatcttatcattcaattcttccgaaaccccacctcccatttcagctgcttttttccacatcttcaaagcttcctggtgttctccactccgatacaggatatcaccataatgttcataaagcacaccggaaggatccttatccttttctatagctaatttaatataatacctggcttgagaatattctccccgtttatacaacacccaggcataagtatccaggtaagttgcattatcggactccatagcgacagcctgtgaactcattttttccgctaaagccagtctttcattccgcaaagagagataataagcataattattcaataccaatatatcgttcggattaattttcaatacttcgtcgaacatcttgaatgccctctccacgctatccaaattgtaataacaatcagctaaataagaataaaactgggatcttaattcgggcttatcgtctgtcaactcaacgcctttttcgaacaaaggcaaagcttcggcgaattgtttttgcatcatcaaagcgattcccgataaagcatagggtaaaggttgttccggaaaatactttatagcttctattccatgccgatacatacaagtggtatctcccatctcgttacacatcagcagcaattcttcccaaatcaaataattatttttgtccttcgaaagaatatactccaattcattccgtgcttcagccaatttatgatcttttttcagaaaatccgaatgtaaagcccttaccgacaaatcgtcgctatatttttgcatcaatagattcatataattatccaactgactatcgcttgtcaatgtcgtatcaggattcagaatcaacttcagaatatattgtattttatatccattctcgattttatcactgaccaaagcttctttcgtatgtctatcggcttctttcaattctttcttactccgataataatcagccaaatagaaatgaacaaaaccgttatcaggctcggccttcaatatacgatccagaatttgtaatccttttttatcctgattataattgaaataaagttcggctaataaactaaggtattcgctcttatccgggaacttccgaatcaactttaacaattcgttggatgctttcttaacatcatcgagtttagtatacaacttaattttttcgatagatacaggttcggttatgccgttctgttgttcataacggtcgaatacctcgatcgctttctgccatttctcgacagagatatataactccgcttcgatcaaataaaattcttctttattcggatatttagcaatgatatcggcatatacattacaagcctcttcgatcatcgctttcttttgcaaaatattggctaacaatattttataccacatattatccggatttccggccacagcctcacgagctaactgcaaagcaccgttataatcttcacctgcagtcaaaataccggctatttcatattttgcaactgaactggaaggaaggattttaaggcaattatcgaaccatccgatagcagcctgataatccccggtaattttactcctgaccccttccataaaagaatagtcaaattctaatctggttttctcatctagctcttgtatattctccgttttcttttttttatcggcaaaagcaggtaaaataaaaagaaaacaaagcatgaaagcaatccatcttaccatatttttctattctttaattttataattatttttttcctgtatgaccgaatcctccgtctccccgttcgctgtccgatagttcatttacttctatccattcggcttgttctaccttgttaatgaccatctgacaaattctttctccgtcttcgatcgtaatcatattattagagagattcaccacgataactcctagttcaccacgataatcggcatctaaagttcccggactgttcaatagtcctaaaccttcatttaaagccaacccgctacggggacggatttgtgcttcatatccctcgggtaattcgataaataaacctgttgggatcaattttctttccaaaggtttcaacgtgacgatttcttccagattagccctaatatccataccagccgaagcttttgttttatattcaggtagcggatgttttgaacgatttacaattttgatttccattt

SEQ ID NO: 5786 - DNA, 1827 bp, Unknown
  gut microbiota DNA sequence
cgcttgagaggatcctcgagcttgttcagagcctcgacggtgtcgaaaaatgcagcctgcgcggtctcgccgccggctgcaaaggccgcgaacattttgtcggagttgaggccgaggcccttgaaggcttcggcgctgctgtcgctgccgtctttcgctctgatgttgaactccttgacggcgtcggccactttgtcgatgctgaacaggccggcgtcagcgccttccacgagggagcccatgaactggtcggcgctcaggccgagggccgcaaactgcgccgagtattcgttcagggtgtcgagcaggtcgccgtttttgtctgcgccgttctgtgcgccggtggcgattaggccgtaggcttcttcggcactgatgttgaagtttttcatcagagccgaggcggctctggcgctttcactgatgtcgtagtcgaaggtgtcacgcagcacgaagccggccgcggtggcctgctccagcgcttcgccagccagatcgctcgctttctgcgtagcggccagcccttcggccacgtcgttgaagtcctcgccgaggttctgcgcgtagatgttttttacactctcgcccagcgcgtccagctcgtcgccagtggcgccggtagatgcggagagctggttcatggctttgttgtagtcgtcgcccagctctgccagatacttcccggcctcgacgaccgccttgcccgtcgccacagcgatgccgcccacggcagcaccgacggcaacggccttccagtttactttgtcgaggtgtcccgcgacgttgtccatcgccttcccgagggaggggtcgatggtgccggcgaagctgacgacggcctgcatgatcttgtttttgcctgccatcagtgtcacctccttctgcatttcctgaagttattccggggcattgaggcggccttgtcgcgttgccgcttggcctcctcggctgcctcgtagtattccatcaggaagtcggtcaggcgttcccgtcggagctcgccgactgaggtgtggaaggctcgagagtagtctcggacgagctctccgagccgctttcctcggattgtgccgccgacctcgccgtagtaaaatttcggccgatcctcataagctccatgacgtcggggccgctgatgcgctcgaggtcgctgacgtcgatgtcgctgttgacggcgacgatcgccatcatggcgagataggcgtgcagggagtagtcgagctcgcaggcgccggcgctgccgccgcccttgttggaggtcgcgcggagcttgcgggcctcagcatcggcaaacattcccacggtgatcgcgtcggtgtcataggtcagagtcttgacctttttgccgttgatggtgatggggttctggagtgtcagcttttccatgtgtgtctcctttcgataaatagagggcgccgcccggaggcgacgcccttcttgttacaggacgctgcggatgtccttggcgtagtcgacgccgccgacgcgcatgatggtgttgagctggtcgatcagccagtattcgttgccagcgacgaaaagctggtagcggctgacggccagcgcgatctcgttctcgctggcgttgccgggatccacgctcaggccggggatgcccttggagacgcagcggaggaacgccttgcagccttcggtcttggtggagccgtcggagagcttgacgtcctgcgcccagcggatctcgatggtcttgctcgtcagcttgacgaggctgcgcaggccgaggtcaatgccgatcttagtgatggatgcctccatcgcctcgatctggccgggcagcggcgccgtgtaggttcccatcgcctt

SEQ ID NO: 5787 - DNA, 1368 bp, Unknown
  gut microbiota DNA sequence
tgggaggatgccggagtgactgccgctcgaaacgaagagaatgtttataacatttctgccatatacttgtggataacagaaaataaagtttctgtcttgccaattcctgccggactattcggtggagaaattatggtgaacggaacaaagtgggacaaaatttccgatatgacagctcgcagcggaacaatagaaatcgctacgtctgtgtcggacggttacatggaaatcacattcgccaatacccgtaaccggaaatccacctggcagaactggcggaaggttatggttgaaaaccttcaagttgcacttgtaaaaagagaccgcatcaggcagttggaaagaaacggtcatataggtaagttcatagctccggataacacccgcttgttggcagaaacgagtgaatcctttctctaccatgcgattcaggcactttatgccgggtattccatgagacgaagcgaacgctatctaaaagcgaatctgcttttatgcctgatagaagcggcaatcaaatgtattgcatatagcaccgtccggatttccgatatactcttcgtgtattcaggttgtgtacttctcggctgtgaaaaggcgaacatgaaacggttgggcgaaacaatggcccaaaagggcgttcgcgatttcgtatttgacacactgattcgctgctgcgttcctgattgggaagtcacggaatataccgtatttccggaaattaagaaatggatcctctcacaagtgaaaagtggaagcataacagaagcgaaagctgcattaaaaagtatttcttgtatttcagagaatattctgataacagatacgctgattacatcaactttaaaaatatgaaacagtatggaaacaacaaaaacaaccgaaaaattcaagagtgtgcataaaactttcagttacactcctcaaagtgcattgaccaaccaatggtcaagcctggcgtttgggataggtatgatcgtcgtacctttgatttacccttttgggttacgtatcaggcgggcagtcatcctttctccagaagtcttttccgcgattttgattattggcggtgtactactgcttataatgacatactttgacattcgcaaggcccgggtactggcggcacagggaggaaccattaccgtggataaaggacgggtgacatatcctgaggtaaataaaagcaaaatcgagtacaactctttccttatttccgacatcagctatataaaagacgatgatgaagaaaaccagtttaaagtaagtcttcctgataaatacatcgtattcgaaaccaaatattttgcatcgcaggaagagttcgaaggatttcgctctttattcaactagtcaattctttattta

SEQ ID NO: 5788 - DNA, 10621 bp, Unknown
  gut microbiota DNA sequence
gccaaatactttttggacaccctctatttttgtcctttttctcccctctgatcctctttaccattgccataaaatattacaattatggcatctaaaagcacaattaacaaacgtgtaaacatttacatcaacggccgggaagtcagcaatgacataaaatccatccggactgaaatgcaaaaggcagtcaatgatattgcccgtatgaaacgcggcagcgatgaatacaacgcgaaagccaaagaaatccgcacccttaaagccattatccaggaacacaaccagcaactccggacaacggagcaacggtggtcttctctaaataacgttgccaatggcttaaagaaatattccggtattattctttcttttgttggttcgctcaccggagcaacattaggttttcaaaagtgtgccgaagaagctgaaaaatttgaggaaaatttggacaacctttctgccctgaccggactgggagggaaaaatctttcctggttaggcgatcaggcaaaagagatgtctgtaaaaacaacagagtccggaataaaaatcaaacaatcggcaactgatattctggacgccttcacaaaaataggatcacaacggccggaactgctcaaaaacaaagaagctttggctgccgtaacggaagacgctattattctcagcgaagctgcaaagatagagctggaaccggcaacagcatccctagctaatgtcatgaatcagttcaatgaaaaatcttcctccagtcgcaggatcatcaacgaactagccgcggggtctcagaccggttcgggagatatccagtatctttccaatgcaatagaaaaatgcggtacctctgcctacctcatgggtatgaaaaccaatcagacaatcggtgtagtcgaagctattgccccgaaattcaaagatgcatctcaggccggtaacagctttgacaaggtattgctaacaatgaaagataaacaaatcggttatcagtccggcctgtttaacatgaacgatgcattggatgaacttcaaaccagatttgctaaaggggaaaaagcatccgacctttttggaaaagaacacgcgaaaatggctgaagttctcgttatggctaaagatgatgtaatacgctatactgaggctgttaccggaacggacaaggcgttggaacaagcagcaaaaaatacgaacaacagggcagccaaacgcgctcaggccatgaatcgtcttaaactggtgatgattgatctcggagaaaaagtagctccggcaatcaccatgggaaccaatgcgttcacttctttcctcacttatctttcaaaagccccgacgctcttccgggaaaacaaacagcttattcttgctctggctactgcttttgttgtccttcagggaaaaactattcttgctacgctagcttccatgaaaaaccgtgcagcacatctgctcgaagctgctgcaaaaatgaagaatgcaacggcaacagcctacttaaatacctatgcagaacaatacaggatgactcaaggaaacgtttcccggggagtgttgaaattgcggacttcattttccttactttggaaaacaattgttgctaatccagtcggagcaatagttacaggaatatatgctttgatcactgccgtgaatttcatggaaaaacataccgatagtgccatgagagccgaaaaactcaaaaatagtatcctttccaaatccgaaacagcaactaaactagctaccgatgcaaatagagaatttgccaaatcaatcagcaatgttaatcgcctcagtacagaagaacgtcaacgtcttcgggaacaaatcagcgatcgtataaaattgacagaggccacattaaaccaactgaaagccgaacaagccgaattaaagcagactgcaactaaagtcggattctggcaaacactaaaaaacagctttctctccggtggatttggtgaaccttccgtcaataattatgagaatttccaaaaattacagcaaaatgatgccttaaaaaacggtcaggaagcagctgatgaaatgaatgaaagtatccagaaactcgaagaaagtaacgcgtcacttaaatctcaattagatgattttaatgaaacatttaatgctgaaataaacgctgataagattggtactaaaactattacagaacttcaggaaaaagtaaatctgtatcgtaccgctttggaaaatgcgaccttacaaagtgaagaatatgaacggattcaaaataaactaatcgcaactgaaaaacaactgaatcaggcaatcaaatcaagggacataaacgatactcccctaccatcaaaagacaataaaaatccacttcaaaacaaaaaactagaagccgaacaaaagcttgccactgcaatctctcaaatacggaaaaaactttatctggaaaaccttacagaatcagaaaaagaaattttgcaaactcaacaacaatacaatgaactaattgctctctgccaacaattcgggattgatacaatagaagtgtataatgcatactcagaaaagatagaagccattattgacagagaactggaaaatgaagttagtgcatccattgcagcacaagaccgaattaatcaggctttaatgtcttcctcggaacgggaaaaagctagtgtcaggcaaaaatatgcggaattaatcgcacttgctgaacaatatggaattgatactttggctttaaaagaaaaaatggatgaagaattagcctccataaaagaagacgaagaaccacaagatatattcggaatgtcacccgaagactgggaggatctggaggggaaaataggaaaggcgattcaattggccggtcaattagctgatatctggggacaatttaatcagattcaggccgataaagaaaaaaaagaactacaagaatatgaaaggagttgtaaccgaaaaaaagaactactcaataaacagctcaacgccgggaaaataagccaggaacaatataacgcccgtacctcccaactggatgctgatttagaaaaaaagaaaactgagatagctaaaaaacaggcaaaacgtgacaaagcgcaatcaattttttcggctataattagcactgctgctgcaatagcccaagcccttccgaatattccattatctattattgccggtattatgggggctgcacaaatagcagtcattgccagtcagccacttcccgaatatgcaaaaggtggtctaaccgatggcgcaaaaatgtacattgccggagaagccggacaggaatggatttctcccaactggatgctgaaagacaaaacaaccggaccaattattcaacaattggaaatggtccgctccggtatcttatctccggaacaactggctccgatcagaccggattttcaaactatgtctgctattccaatgtatgcttcaggtggatttacatctaccggttcgatggaaacaaactattacaccacaacaaccactacaaatcaagataatgacacattgatgaatatcaatgaaaatattaaaatccttattgaatatctttccgatccacgtaatcgacaagcagttatttccaacgatctattgcaaaaacacaacgaagaaataaacatgataaatcgtttaaaaaggttgtaattcagaaagattataaacaatgaaattaatacagttctattttagataaaacactgctaataaactcattgttgtcatcaactcaaaaaaaataaaacggtttgactatactcacccggaggccccgccctatcactcaacgcaatttcacacatacttttcaggaaatatgacaggtcaggtcgcgtcctactagacagcaaaaccgcataaaagtcctactgtttctgcggttttgattccgagagttgtgagcatttgtatgcaattgcatttgcaattggtaggttgataggtcgcaatcacaaagtatcaagacagggaaacttgttttgaatttccttattgacaacaccgagtttatgcttcagatagatctctgtggtttgtaccgatgtatgtccgttctggtcgcgtagagccaacatgtttatatcgctgtctgctgccagtgaattaccggtgtgtttccaactgtacagcttgtaactatccggcatatttaatcgggtccggaaaccattaaaacggttcttcagattattctttccaagtggtgtaagtcccggtttatattctttaccaaacacatagtaatcccggttgtattgctgcaattggtagatattccgcagtttcagcataaaatgtcgtggaatggttgcataacgttcccgattcgtttttgcccggaatcgatccacattaatcaatcctcttgcaaaatcaatatccccgatcttcaatagtcgtaattcctttcctggtctcagaaaacaatatgtttcaaattcaatggccatccacaattgtgggtcattctttgtaatagcttcccggaatatctcgatatcccattcagcaaccggacgcggtgccatatctttatccacacctgaaggaatattgtaaaccggattctccgagattttaccctgatcttttataaaatcaaaagcagaacttataatttgacgatagtcatttattgtaccggttgccagttttttcttatttacaagataattgaaaaactccaagattaacgcattatcaaaagctgtaatatcaatctggcctttgttggcttcagaccatacagtcagcatccgtaatttactaacatacgtttgtattgttttctcctccagtttctctttcttcttttcctcgatatactgagatgcaaacattcgaaaagtagcattagcagccttttgggtaccatatatgtcggccacatgtttatactgaagttgatcttcatatatagcttcagtatcatccagaaaaggagtccaccccttcttcaatttaacagtaagttcctgaataattttgtcagcacgttcacgccgtaccgattcatccggatgggataaaccgacatgatccttaaaacgttccatcttatccgtccggggatcacgaacagaataatagacaaaccatttttttgacaaattaccacctgcatcgttcaatttcggcaggatcactatttttttccttttcatgacatctggtttttagagcttcccaacatcaaaaaccatttttgtcaactttttgtcaactcctcaaaaatttgtcaactttaaacaaaaaacgcactgataatcagtgcgtcctgttttttgtcgagatgactggacttgaaccagcggcctccacgtcccgaacgtggcgcgctaccaactgcgctacatctcgtttgcggatgcaaatgtaataaaagtatcaggaaaaaatactatatttgttgaaaaatttttcaacttaattcaaatacgatggattcgataagacaaaataaggtagcacgcctgattcaaagagatttaagtgagatgtttcagcaggagtgtaaagaatatacagaaggagcaatgttgtcggtaacagcggtacgggtcagtccggacctttcttatgccaagatttatgtcagtattttcccttcggaacgggtggaggctgtcatgaaaagcctggaagaaaaaaataaaagcatccggtttattttagggaaaaaagtcggcaaacaaatgcgcatcgtgccggaacttcgtttctttgtcgatgacagcctggactatatcgacaaaatcgacgaattattaaaataattcatctatccggataccgctctttgttaccggacatcaattcaatccaggaatgaaactgtctttgtttattgccaaacgctatctgttttccaaaaagaaacagaatgccattaatatcatttcggtcatcagtgtcgttggagttgctatcggaacttcggcattggtaatcatcttatctgttttcaatggcatcgatctgttattacaaaagagtgcggacagcttcacccccgatctggtcatcagtcctctgacaggtaaattctcccacttcgacgattctttgtatcaggcacttcgcaataattcgtccgttgcctactacaatcagatcgtcgaagagaaagcgctcgtaaaatacgatgacaagctttcgccggtaacgatcaaaggagttgccgacgactatgcccgtaatacccatttcgaggataacatcatacaaggtacctttcaactcaaaaccggagatacctacaaatcggttgtcggttacggtctggctgcagaattaggtataggtctcaatttcctaacgcctatggtattttattatccggataaaaatgccggagtttctgcttcggctttaaatacagcatacctgtacccatcggctttcttttcttcccagcaagaaatagaaggtcaatatgtacttacagatcttgaattcgcccaacgtcttttcggcataaacgatcagatttcgaagatcgaaattaaactgaaagacagtaagctgatcccggaagtaaaaaaagaattatccgatttcaccgatacaacatatcgtctggaagacaaatacgaattgaacaaggccttttatgctatgatgaaatccgaaaagctggctgtctttatgattcttctgtttatcttattgatcgcttcgttcaacattatcggttcaatttcgatgctcatcctggataaaaaagaagacctcggtacttacaaagctctgggaatgacaaatcaaagaatcatttccgtattcaaaaccgaaggaaatcttatcacaatggccggcgcagtcattggactcgtctttgggacgctcatctgtctgttacaggaaaaatatggattgatcacactcggcgacgggagctatatcatcacggcctatccggtcaaaattgttttcgaagatattttactcatcgtgcttgccgtcttatcgatcggctatacagcctcctatttcccggtaaaatatctggtgaataaacttgccaaatgaagaaaggagaaaatatgaaaaagttcttttgtgtattatgtggaatctgtcttttttacatgggatatgctcaggaaaaagaagtaaaagcggttatcgagacgaatctcggtaacatgattgtaaaattatacaacgacacccccaaccaccgggacaatttcgtccgtctggccaaagccggacactatgacggcagtctgttttatcgtgtaatcaaaaattttgtgatccagggaggttcgtcggatagtaaaaaagccattaagggagctgcaatcgggtacggtaaaccgatcgttatcgatgcggaaatcaaaccggagcattatcacaaaaaaggagcattagcagcaccgcgccaacccgaccgggttaattttttcaaagaatcggacatttcccaattttatatcgtccagggtaggaagtatgatcccaaagaactggatatcatagaaaaacaagtaaatgttccgatcaaaagggctattcagcgaaaatactatactccggagaaaaaagctatcctggacaccctccgaaaacagaaaaaagtaaaagaattccgggaaattgccgagaaaatcaaacaggatatcgctttcgactggaatgccaatcccaacaaaatttatatgccggaggaaaaacggaatgcctatataaacgaaggaggtatacaccatttggataaagaatatactgttttcggagaggtgatcgaaggttttgaggtaatcgataaaattgccgcccttccgacagacggaaacgaccggcctatcaccgatgtcagaataaaagtcagaattttgagcgaataaccccaatgtatatgagcagtaaacttcgccatatttttattctggccaatattttatgggtcgtgattatttttattctctgtgcgatgcccagtgatgacatccctgatccacactggaatatccctcatctggataaggtagttcatttcggtatgtatttcgttttatccattcttttaatctttccactcgaagaatatagttgcttaaaactaagccggatctatctgatcgccatcctggtggcactgatctacggaggaggaattgaaatattgcaagccaattttttcaaccgaagcggggatgtgtgggatttggtcgcagatgtttcaggcggcatcgcaggctgtctgtgttatcctattgtaaaaagattcatccccatgaaaaattgaattctattctaaatttcaattttcaatttttaattctcaattaattaaagtagttttgtgactttgataatcaaaagcctttaccatgttagacaagattaagcagattatatcagagatcgggagcttcaccgctaccacacctgcagaggttgagcaattcaggattaagcatttgagtaagaaaggtaccattgccgctttattcgatgatttcaaaaatgtaccggcagatcaaaaaaaagaaatcggaaaagctttgaacgaattgaaaacagcagccttagataaagtgaatgagttaaaggaaaagctttgtaattccgatcagggtaaaaccggtgtggatctcactttaccgggagacctgatcaagctaggaagccgtcatccattgtccatcgtaaagaatgaaattctggctatttttaataaactaggtttcacgatatcagaaggtccggaaatagaagacgattggcataatttttcagccttgaattttccggaagaacacccggcccgggatatgcaagataccttctttatcgagaaaaatccggatatcgtattgcatacccatacttcttcggtacaggttcgcgacatggaaactcattccttacccatccggttagtgacgccgggaagagtgttccgtaatgaagctatttcggctcgtgcacattgtattttccatcagatcgaagcgctttatatcgatgaaaatgtttcttttgcagatttaaaacagacgctgacttattttgccaaagaacttttcggtccggaaacccgaatccggctgagaccgtcttacttcccatttaccgaaccttcggcagaaatggatgtttcctgttcgttgtgtcatggagaaggatgtaatgtgtgtaaaggtaccggctggctggaaattttgggttgtggaatggtcgatcccaacgtattggaattaaatggaatcgataaggaaaaatataccggttttgctcttggaatgggtatcgagcgtatcacaatgttaaaatacggcatcaaagatttacgcttgttctttgagaatgatattcgttttctggagcagtttactgcagcaatatagaaaagatagaaggtgtaaaataaaaggtaaaaggttgaaaaatatcaccttataccttttaccttttatttcaatatatccatcagcttatccaatttcggcgccatgatgatttcggtacgccggttgtgtgcccgtccctctacactttcgttattgtccaccggcataaactccccccggccgcaaggtaaaatctgtaaaggattcaccccataatctttggtcagaatacgtacgacagaagtagcacgtacgacacttaaatcccaattatctttaaattgcacggttttaatgggtttgttatcggtatgtccctcgatgaaaacatcgatatcatgctgttttttcagcacttccgctaatttacccaacgcttctttaccctgtttgttgacctgtgcactccccgactcgaacaacagcttatccgacatagccacatatattttcccattcttttcggtcacggtcaattcatccgagctaaatccaagtaaagcatccttgacactattcaataaactttgaagacgtgcgttttgcgcatcgacttcggcctgtaatttattgatggtagcttcccgttcggccagtttctccattttttccttcagtaacatattcagtttttcctgttcggacagattggaatacaatgattttcgataatcgcggatggcttgacctaaacgagtcgtatcactcatcaggtcagtgatctgttgcttcaattttgcaatctcatctttctgttgtcccaaatttctgttcagtacccgttcacggcttaaagctgccaaccgaccgttttcagcaaccacgtacttctttttagatacacacgacgtcactgcaatcaataagcataaggcaaaaatgattcttttcatttgtgtaaagaaattatttatttgtaatataattaaaatctaccgctctaactaccatttcaccacaaacttaaaaattattctgcaattatgaaaatccctttttatggatagaattaattgggaaagtagttccgggataatgcagaatattctaactttgtagttagaaataccgataagaactattcaaatatgatccggctaattttacatcttttcttatttttgttcctttctagttacagttgtgaggcttaccgcttctcttcgtccgatcagaaagtattaaattctttttggaaatatgcagaagaacatcgcttgggcaatcttcctgtaaatgaaagaatcccttctatc

SEQ ID NO: 5789 - DNA, 34592 bp, Unknown
  gut microbiota DNA sequence
gtatataattgccataaaattttacagaatcggttttgtatattattattttatatttttgcatattccagggattcaaattatccctgcagatttagaaaaaaatatcaacatggaaaaaaaaatcacctatcttgaccggaacgaatataactatggaccttgtccagcagtaggagaagtacttaagaatttcgacccgaacaatctttgtttctatacccgtatatatgatgaaggtaaaaaaagtatattctcagattatctctcttcgatctataatattcctgaaaaacaaatcattctcggttatggtggagaagatatcctgaaacaagtggtacactgctttttatcaggtaaagaaaaacaaaagacattattgatccctaaattttcatggtggtattataaatcgatagccgatgaagtagagggacgaagtgtactttatcctttatacgaagagggaaatacgttcaaatacgatttcgaagcgatgaaagaagctatccggaaagaaaatccggaaatggtattgattgcttcgcccaataatccgacagggaattccctgacttctgaagaactcgatcagattctttcctttatttcgccggaaacagtggtcgttatcgacgaagcttatgcttctttcgccaacaaagataccagttatataaaacctttattggaaaaatttccgaatctgttgattgtacggactctatctaaattttacggacttcccggattacgtttgggtttcgctttcatgggaactgcattaacccgctttttgaactatagtaccaaatatttgggttataaccgtttatcggaagaactgggaattgccgtattgaaatcgacagactactatcagcaagttgccgatcaaatggccgaagaccggcaaatgtacatgaacgaactgaataccctcgagggcttcaaagtataccagtcgaatgcgaatttcattctggtgaagtatccgatcgaactgaaagcaactcttcaggctgcctttaaagccaaaggataccagatcaaattcatgaacgaaccggatatcaatactcacatgcgtattactttgggcacacatcgccagaatgtcgaagtaatcgctacgataaaagaagtcgtcgcacaatgaaagctattatactcgcggcaggtatggcttcacgcctccgtcccctgacagatcacaaacccaaatgtttgctggaaatcgggaaacaatgtctgctgggcagagctatcgagggattaatttttaacggtatccgggaagtggttattgtcaccggatacctgcaagaacaaatcatcgaattcgttcagcgacactaccctgatttaaaggtcgagtatatttacaacgaaaaatatgcttcaaccaataatatctattccctttggttgactaaagataaaatccggggggaacgtatcttacttttagatagtgacatcctgttcgatccgttattggtaaaagccgtattggattgtcccgacactacttgtctggctctcaacgaccacccgctttctgaagaagaaatcaaggttattcctgatgcccaaggtaaagtagccgaaatcagtaaaacctgttccatcggaaaagctatcggggaatctataggtatcgaaaaaatgtcgggcggttatactcatgctttagtggatgaactcgaccggatgattctgcaagaaaatcaggtcaatattttttacgaagcagccttcgaacgtctgatcgcccaaggtcatactttcggtatcgtagatacgacctcgtttttttctatggaactggataccgttgctgactttcagcaagctattgataaaattcctgcacatttattataatatctgttatgcgtattgttttattttgtgaacaaaaatatgccatcaatattctgactcctattcaggaagaagcactgaaaagcggaggacacgacattttatggtatgtccattcccggaatatccctgactttcccttaaaagaccgagtgaagtggaccgacagcatacaaaagatttatgattattcgccggaagccattttcgttccctgcaacattgtcccttattatctgccgggcgtaaaaatacaaatcttccatggttatgctgccgaaaagaaagaccattgggtgatccgaagatatttcgatacctactttacccaaggcccttttttcaccgaaggtttcagtgctctggcaaaaaaatacaaggatttcgaggtagtagaaaccggttggccgcgccaggattggatttttcagaatctgcatactttcgatgaagaaaaatcccggctgttacagcaacaccaacgtgaaaaattagtactttatgcaccgactttttcgccttctctcacctcgcttcctcatttgaaagcgggactcgatagattagtgcaggaaaaggatatcctgttattattaaaattccatcctttgacgcgtcaggaatggactgatgaataccgggaatgggcagcctctcaaaggcatgtcatctggatcgacgatcataacattaccaaatatcagttgatggccgatgtcatgatcagtgatacttcatcgacggtatacgaatttttattgctgaacaaaccggtaattacctttcagacggtagccaaagatatttattggatcgatatacaacagacagacgaactccccgaagcctatgaacaggccctgcatgacgaaagtgccgcacttaaacgccaatggatcatagacaactacgatccttatctcgacgggaaggtcggacaacggatgctgaccgctgccgaagattatatctcccggcatggggtacctgccaaacgaaaactgaacctttggcgtaaatataccagtatcaaaaaattcggaaaaatcaaaaaacactgaaattcttatcgtcgatgaaaattgtcctgaatccggaatacaaattcctgcaacaatttgtacaagaccttccaacccgtttcgcctcggaagggaaagtcattcaagacaaaagaaatacgattaaagtattcgaatacaaggaattggaaataaacgtaaaacgttacagagttcctatattcatcaatcggatcgcataccgttttttcagaaaatcaaaagcggtcaaagcttatttcaactctttagaagtccggaaacgggggtttaatactccggaatctatcgcttgtatcgaaaccttccggggtggtttacttcattacagttactatatcagccttcaatgtccctttcataaagagatgagagaactgtatttcggtccccttacgggtaatgaagacttgctcagagctttcgcccgctacacggcagccttacatgaagccggtatttgccatcaggactattctcccgggaatgtcctggtcaacggggaaggcgattgttttcagtttgctttgatcgatatcaatcgaatgaaattcaggcagatggacctaaaaaagggatgtaaaaacctgatgcggatgttcgaaaacgaagagatatatactttcatcgcacaggaatatgcccgaagcagacatttcgatccccaacaatgtaaggcctggatccattattacaaccacctctctttaaaaagagattatcgtaaaaagaaattcaaggcattcaaaaaaagattcttttaaagcagactccattattgaaaactgttcatttatcgaggatcatcccgttcctgtgagagaccttaccgttttgtttagaatatcattttgtcattattgcgtcgaatactcctttcagtctccgtacatactcctccatggtataatctgtcctgattcgctgataaccggcttctcccatcattttggtttttgcacggtcagcagccaaaacccggatcccttcggcaatcgcttgcggagatccggcctgtacgatgatacctgtccgcccgtcgacgaccaaatcccgggcccccggaatatccgttacgatgcaggccactttacaggccatcgcttcacgtaaactacggggagaggcatcacgggtcgaaggacagatgcagacatctttacccggtaaataataaacagcatctttatgaggacctaacatatgtatttgtttcgcagcagggccattttgtgccaatttatagtcggctttatcatactcccccaaatagatcaagtggatgtccgtatcggtcagtagctccaaagcccggatcaaaatccgtaatcctttaaaagatcttcccttggtattggccaggcatataacttgaaaagcggtcgacggtattcccgctacggatttaggatgagcccatacatcttccatccacataacctcgtagggtttcggagacacagtcattcgatccggagaaataaaccgggcaagttgttgttttatatcttccgttgcacacatcacatgggctatgcgtggattgagaatacccagataataagtcgggtcgctccttctgattttagcctgcgtgccccgataccctaccacccgggcaggtgtcccccaggaagcgaacaatgcaatggataaatcgatgctactcgaagcatagattacatcgatacgatatttctttataatcgaacgcacctccttgatagaggcatatttaaatttacttttaaaatgaggtattctcaaagccacacattccttaggcaaggcctctcgttcttcatcagaagtataagttgcataggtttcgatccccttccccctcatcgcctgaagcatatggtaatttataatatcgatacaatgaaaaacaccgagcaaacgcataaaaatcaatataatttcctattccgacaactccttcgatatatcctgtttctttatccggttttcccagattttagcgattgtaacaaatttataaaaggcatccattccggcattgatcacaccggctttcccatcccgaaaacctcccttcaaaatataagacttgaaaaaacgatatgccggagcataaaaaatactaagaaaagtatatttctgtccggtacgtttggggatctctttgctggtgtaaatattcagtttattcaacttcaattccagcggattgttgactaaatgaataaaagccagctcttttttattacggggcacccggatcacctttccttctacccggggaactgcatgtacatatggaggccaaaaagcattttgcttacggaaaaaacgtaagatataatccggatgatccccatgtatgaattttcccatcaaataattcttccgtgggatccaaactccaccgatagcacgctgttcccgaaggagagtatataaataatccttcaagtccgcaggaacaatttcatccgaatcgaccaccaacacccaatcataagtagccgagtgtatggcaaaattccgggccggttcacaaaaatcggttttcttatgatacacgatcttacaatcgaactttcgggctatttcaatcgtacggtcggtgctatacatatcacacaccacaatttcatcgaattctttcaccgaattcagtacccgttccaaaaattgttctgagttataagtctgaataaccacggatattttcatcgcctccaatttaaatgtttgtttattttggtagcgaaaaatcatccggtgcgataagccggcgaattctatcccggttagtattagaatgataaaatttgtacatcctaaaagattctttatctttgcccgacaaataaacgaaggtttttattgcctgaagtcatctacgtattattagataaaaaggaataaatgaggaaaattatactcaatccccaatataaatctctctataccttcatcgaaaccctcccccaaaatttcaacgcaggtggagaaatcgtccaggacagacggaacacgatcaagaaattcaaggtgaatggtctggaaataaacgtaaaacgttaccgggttccgattttcattaaccggatcgcttatacttttttccggaaatccaaagcttgccgggcttacaacaatgctttcgaagtcatcaaacggggattcgaaacccctgaatcgatcgcttatatcgaagaatttaagggaggattactacattatagttattatatcagcctgcaatgcccttaccgacgggaaatccgggaatactaccagggaccgttacagggcaatgaagctttgatgactgcatttgcacagtttacagctgctttacacgaaaaaggagtttgccatgaagactattcgccggggaatgtacttatcgcacaaatagacggacaataccatttttccctggtggatatcaaccggatgacttttaaaccgatgaacctcgaagaaggttgtaaaaatttcagacgcatgttcatcagcgacgaactctatatttttctggctaaaaaatatgcgcaatgccggaatttcgatcaggaagcatgtatccggctgatgttgaaatacaatcattattccatacgaagagatcagcggaaagaacggtcgaaggctatccgaaaaaagattttcggataactcaaccctattcagcctttaaacgataatcgagaaatgagtaatcgaattcatttttctcatcggcataatgatcttcacggccgatcaattcccatttatccggatctatggcaggaatgaaagtatctccctcgggagaggtatgtacttctgtcagatataactgcgaagccttatcccaaaattcgcggtagatcgagcctcctccgatcacaaatacccgttcttccccttttagcagttccaaagctttcgggatatccggcaccacctcggcaccaggggcgacaaaaccgggattaccggaaatcaccacatttcttcgattgggcagcgctcttcccatcgattcgaaagtcttccgtcccatcaatatcgcatgaccggtcgtcagcgctttaaatcgcttcaaatctgccgataaatgccagatcaatccattatcccttccgatcacatgattttcagcagcagcaactataatcgctaattccatattttttcaaatttaaatacttaaatattcaacaaaaataggacataaaacgacaatcccgaaaaaaaaaacggaatattcaggctgtaaacagactttataaatcagtcggattgcatattataaaaattttccataactttgtcaggctaaatcccgtaaccgacccgttaaaatgatgaatttactttgtgtatcccacacaattgatattataaattatggcatgttgaaagccattcaggccaaaggcttcaacacttatgtcacttataccactgaagacgagcataaagctattcccaaagacatcacaggcatcgaagtgccttatttccgtaagaaatttaattggccgactattcagtgtatccgtaaaattattaaaacccatcagatccatgtcatctatgccattaacagttccgatctgtccaatgccctattcgcaacacttggaactcaggttaaagtcgtcggttaccggggtacacaggctaaaatcagaaggagtgatctgacttattatctaggcaccctaaatccaagggtagctcacatgatgtgtgccacccaggacatcaaagaacagctgtctaaatttatttctccggccaagatgaccgtaaatcccaaaccttacgatgtcaactggatgaaggatgctttcactcatccccagtcggtcgagggcattcctgacgatgcttttcaagtcgtatgcctggccaataccaaacaccgtcctttcaaaggtctccggcaactgattgcaggtatgcatctgattgaggatccccgggtacatctgattcatttgggcgattacgatgaagccgactaccaactggcccaacaagggccggcagcagcccggattcatatgctcggtctgcgtaaggatgccgtccattttctgccgggtaaagatgtctgcatctgtccctctatccgggatgcctccccccgcagcttgcgtgaagctatggcttgtaaggtggcttgtatcgtaaccgatattcccgggctccgggaattggtggtcgacggacagaccggtatgatcatccgccccgactcaccggaagccattgcagccagtatcggaacactggcccgggatcccgaaaaaacgaaagcattcggagaagccggataccagcggatcatcacccattataccatagaaaaatacgtacagaatctgacgaatgttttccagcaagttatcgataaataaaatgaacactttaccaaaccgcctccaactgggatttgcaatctatattgcaggatcttttaccctgttcttacaattctttctctatctgttgcaaagcaatatcgcttcgaccaccgatttcgccggatacggttactacctcgttgcggcttttgcacatgccggtctgtttgccttaattccctatctgctatatatcctgatgtcgctggcgtgccctttcccccgtttcaaccaaggtctactgattaccttttatttcctgttgaatatcatagcctacctgaacggcctggtctttcagctatacaaattccatatcaacggtttggtactggacatggttttcgggcaagatgccggacaagtgttcaatttcgaaacgtctttgattctcagatttgcattgactatcctggctgtgggattcctgttttccggcataatatggatagcctaccgcttttatcagcgtttgagaagacggcaaattatcttatatctcgttctctttgtatgcagcactttaagtgcacatttagtgcatgcctatgccgctgcttcaaaccaattttcgatacaaaatgtcgcaacctgcctgccacaattttatccattgactgcaaacaagttaatggcaaaattaggaattatccatcacccggtttcccatccgcaactgaacgacaacaccactctcaataccggtatcacctatccgttacatccgttgatttcaaatgataccgtttcacggaaaaatattatttttatccttctggattcctggaatccacggatattcgatacagagaccatgccgaacctctccggtttcgcaacccgtagttcggttttcacccatcatctgagttccagcagcggtacacgaggaagtattttcggcttgttcttcggaatttctcctacctattggaaagctttcgaactatcggggacctctcctttattcatccaaaccctgctcgaacaggggtatgacgttcagacctttccgagtgcaactcttcaaaatccgcctttcgaccggattattttcggggaagttccgcaccttcggacagaaacccaaggggcaactcctttcgaccgcgatacccggctgacggccgactttcttcaatatctggaccaaaaacccgacaaaccgttttttgcttttttattctatgatttgttgcatgccatctccattccggctcctcaccgtcataaattcgaaccttcctgggagtatgccaattatatggcgctgaataatgaaatggatgccacgccatttttcaacctctacagaaattgcggttggtatgtagattccctggttggaagtatcgtcggagaactcgaacacaagggactcttagacaattcgatcctggtcattaccggagaccacagtcaggaattcaatgagaataaaaaaaattactgggggcacggcagtaattattccgatgcacagattcacgtgcctttcatttattacgaacccggacaagctccgcggaactatcaccatacaaccactcattacgacattgtgccgactttgatgcataccctcttcggtgtttcgaatcctcccggagattacagcatgggccattttctcaccgacagcctgcgcccgctttttcacctgacaggtaccgaagaaaattacgcctttgtcacccccgaagcgatatacgaaaagaaacattcaggccgaatcgtcgtaacggacagtctgctgaatccgatcgatcatccgatgtctcctcaactactcaaagaagttttggaatataaaaaccgattcaggaaaaaagactgaaccacgatttataccgaaatcgctcctttgatatgcggatggggatcgtagccggtcaattcgaaatcttcatagcggaaacccaaaatatccttcacagccggattgatatgcatctgcggtaaagcgcggggctcgcgggacaattgcagacggacctgttcgatatgattcaggtaaatgtgggcatcccccagggtatgtacgaactcacccggctgcaaaccacaaacctgggccatcatcagggtcagcaaggcataagaagcgatattgaagggaactcccaaaaaagtatcggcactacgttggtagagctggcaggataatttgccaccgaccacataaaactggaataaagcatggcagggagctaaagccatattttcaatatctccggcattccaggcactcacaatcaaacgccgggagtcggggttgttttttatatcgtggaccacctgtgcgatctgatccagatgggtcccgtcgggccggggccatgaacgccattgataaccgtagatatgtcccaaatccccgtcggcatccgcccattcgttccaaatcttcacaccatgatcctgtaaatatttgacgttggtgtctcctttcagaaaccaaagcaattcgtagataatcgatttgagatgcaattttttggtggtcagcaaaggaaaacctgcctgtaaatcaaaacgcatctgatgaccgaaaacactgatcgtccctgttccggtacggtctgttttctctgctccttcactcaaaatccggtccagcaaatccaaatattgtctcataattatgctctgtttatatccttacaaagataaaattaattcactcaatttctatctccgattcctaatctttcttccggatcagcatcaatccatgccgcacaggcaacaacagattttctacccgggtatcggcctgcaccaactcattaaattccagtatcccgcgtgtttgcgcatcgcgggtatctttttccgtgaccttaccgtcccacagcacatcgtcagccacaatgatacctcccggccgcaccttatcgaataccagccggtaatacgctgtatattgccttttatcggcatcgatgaataccagatcgaaacattcatccagcccgggtattatctcacaggcatctccgatatgaaaaacgatctgtccggccagtccgctacgttcgatataattacgcgtaaaatcttctatctcgtcattgatgtcgatggtatggagcacgcctttctctcccatgcccatcgccatcgagatggctgcataaccggtaaatgtcccgatttccaacacccgttggacccggttcatccggcacagcatcttcaggaattgcccctgcagatttcccgacaacatccggggtcttaaaatcttctgatgagtagccctcgacaactgttgcaatatttccggttccggttcggagtgcaatccgatatattcttccagttcagcatccaagtccaacatactttctttatttatagatcaaaaccgattgtttatcctgagcaaaaatctcccgggccacctgccggagcaactcaggggtaatacctcctacctcttcacagaccgcctccagttcatccactttatcataaataagaaagctcttgccactggacagcatcatattttcataattttccgacgccagggtgatctgcccgatcatctgatttttggctttacgcaattggttatatcccaaaagttcctcccccaaagccgccatctctttccggcaaagtcgcagacacttgtccagatcgccggcatcacagccgaagtatatcgtgaaaacccccgtatccgaatagggggtataggaagcttcgatgttataagccagtccgtatttctcccggatattcaggttcaaacgggaattcatccccgtcccccccaggatattgaccaaaagagaaaaagccagacgtttatcttcggtataatcgtaagcgacgtttcctataatacaatgattctgataagtatccatatcgatcactttctgccggggcaagtatatcccgggacgttcacgaaccaatacagccggatccccgggaatatctccgaaatatctttcaatcaggcggaccagtttatcgaaaggaatatccccgaccgaactgatcaccattcttcccggccggtaattccgtttgacgaaatcgataatatcgtcccgccggaggccttttaccgccttctcgcttcccaggatatttctaccgatcggataatccggataaatcagttcctcgaaatcgtcgaaaatcaattcgcccggactatctttgtaagaattgatctcatcgatcactacctctttttctttctctatctctttttcgggaaataccgaatgaaacacgatatcggcgaacaattccaaagcccgttcataatccctggccaggaaggaagcataaatacaagtatcttctttcgtcgtataagcattcagttctcctcccacatcttctatgcggctcaggatatgaaaggcttttcttttctccgtccctttaaaaatcacatgctcgataaaatgagcgatcccctcttcttccgggcgctcgtcccggctaccgacaccgataatcaatccacaccaggcagctttaccgtccacctgctgatgaatgaccttcaatccatttttcaatatatgagtctgatacatgctcacgcgcaaacctccttcatatcccgttcccctccgggtgtttaaagaaaaaagccctgcatagcaaggcttttcccatattatttcctaaaatcttatttctggaataatttttcgaaatcagccatagaaatctcttgttcttcgagcttcacgttttcccggatcacatcgaagactttgttatctaaagctctttcatacagatgctgacgctgtttttcatcttccagcaatttagctgcaaatccgtccagctgttcgtcggtcaatccgtataacccgtattgttgcagctgggcagcagcgatctggcgtccttcccgtttcatatcctcggcttccaccttcacatcataatctttcacgatagccgatttcaccagctgccatttaaattcatcccggtagccttcgaaatctttctccacttcttcaggagtcatcttttcattgacagccacaatccatcttttcaggaaagtttcgggcagaacgacatcttcatttttctttatcagtttttctttggcatcgatggtaaagcggtattcagaatgtcctttcagctgattttcgatatctgccttcacgcgattacggaaatccgctgcatctttgaccactccttccccatacaatttagtaaacaattcttcgtttacttctgcatcgatataacgtttgatttctttgacgataaaacaatagttttcaccggcatgttcggcttcttctttcgttacacccaacatagcagcaaaatcggtcttgttcgggtatgctttcactgcattgaacttcacttcctcacctgcttttttacccttgaaagcatttacagcttcttcatctttcatgtggaataccgacatcgaagcatcttcgtttttgatacctccttctttcacatttccgtcagcgtccaattcgatcaattcccctttcaggtattcggtaccttcgatctcatctacagcgatcatgttaccgttgtttttacagatgctttcgatctgtttgtcgatcatttcatcgtcaactttgatggtatagaaaggtattttttcacgtttgctcattttggcattcacctcaggagacaaagcgatatcatacaggaattcgaaattttcatcctccaggttcagttccttctgttcagtctcgttcggaagcggttcacccagaatctgaaggttattctccttgatgtagttattcaacgattctcccaaaactttattgatttcatctaccaataaagattttccgtacatttttttcacaattcccatcggagtttttcctggacggaagccgtttactactactttcttctgataatctttcaatgctttctctacgcggccggcgtaatcttctttacctagttcgatcttaatggttgcattcagatcgtcgatctggtttttcgttatattcatgccattcttgaattatagcaattgttattatatatgactaactctcttctcaatcagaaaaaagccacctcgcataaggtggcttccctacttttgtacgggcgaagggactcgaacccccaagtcttgcgacactagatcctaagtctagcgtgtctaccaattccaccacgcccgcgtgccggtttttgacgctgcaaaagtaatattaaatttcatatagtcaaactttttttgaaaaattcagttttacaaacataagttacagagggggtaaacgttacggaggataacctgtctcatgctccctctgtaacgtttactaacacacctttgccccaacgtctgtttcccagcctaaatcgtctgtgtcatcgagatcactttaccgaaaccggagaagatactcggactattggccggccctccgaacatcggtccgtacatgtcttcgatctttccggtagtaggactcacttcaaattctacgatctttccttcctgagttttttcattccatacggcagcccacaaaacacgtccggctgtcggaaatccccccgttccgatcatatacagacaagtaatgacttcgtcgtcgtcatccgagttccacacttttacagattccgtttgcccggtagtataactataagaatacaaagtattaccgaccgaataaaacaaaacggagcctgcattggtcgaagtaaaacaagtggcccggtctaaattctcacatccggccagggaacgggagtaacgagccagctttccattatccacgacattgtagaaacaagccacatccatccaatacccaccgtcacgtttcatcaccgccatcgtctcacctccgtttacggtggccgaatacaccaactccccgttcatatggttcacatcgaataccgcttcagcatccgcttcactaaaacggctcaatgacgaagcccggttgaagaaaggccggaaaccgttctgttctttgtcgaaaaccacctggtaagccccgatagccccggtcacaggcccccaacccgcaatcgtagccgaagccaggtaaggagcaagatcatacgtaccgctcatcgctaccggaaacttccggtcaccggcactttgaatatacagacaatgcaaccttccgttattgatcaggaaatcacaattattcacacacatcatcgcctcaggaccgtattcgggcgctgaataaaacatatcgttccaggtgtccataatcaccatattcgcaggtgaacaacgcaaagcctcctgtccggtcaggatataataccattttcccgtagtagaataaaaaatcagcttagcctcaccgtccaaaggatgttccggatgtaaaccactccaataatcctgttcgtgccaatattcttcagcctgtgatccgctgaaaatcaaggtccttttcgatccgaaaacatcgacatccacccggccctctttttcttgtaaacaataaattccactcttagaacccgcctgaggaagagtcaggtacgatctcgccagaaaaaatcccatcgtattgtataccgtatctttggccatcatccacacctgataagctttccccgcctcgagactcaccacataattcagatcgagtgtacgggaaatggtgtcggccggcggatacaccgtcgtattccccaccgtttccggtttgtaatcggaatccataacaaaccaacggtataccagattttcaggcttactataggtaacccggggcgtaaaatgaatggtatccccgatttcccaggtccggaacagttcggttttatccgttccaaccgtatctatctttatttcaggcgccacaccgaagtcgtaatcatacacgcctttatcctccagacatccccaaagtcctatcgccaagaggcaaaaagccccgattttatatttcattcttctcatgatatgctatttttattaattaaaaagaaacgacagccccattttcatccttcatattctccgaatgggtggcattatattcttccagcgcagcgaccatccgtaaacgatagttccacatttctccccaagtcatcccctctgcttctccataggtaaactgactgactcccaaagtcgaaataataaaccggtatttggtctcgctatagtcaccgaaaaattcggtcaaatcctcccaattgcccggcttggtaattttatcgttccaggcgatagtcaaagcagaccacgcatcgactcccggttgcagatcaccggagccgtctatcttcacctgaagacgtacttcttcggtttgcatcgcttccgtccggtaaagcaggatatcgaaccccaccgaatcctgaccggctttcagtatcacttcccggggcagtgaataatcggatgcctgtgcagttgttttcgacggatcgacagccaatttcactgtccggtcgtaatccgccactttcccttgtatcacgacacaagacgctacagcaaattcctttacctcttccggataaaccgaaaaggtaaaagtcatcgaatctgtatttctggtccagatctccgggccgacaatccgggcaaaatcttcttttccccaaacaaaatcatcattttcgcaggaattcaacaagagtaatccccaaattcccagtagtatatattttatcataataatccaatttatcagttctacaatcattgccggttaccgaattcaacctcattctccggcatcggcaaaacatagatatcgtcgctaccgctgaccgccgacccgggaatagaagcaaaattcaagcgcttataatagtaaaacaattgtccttcccccaccaattccttccggtattctttatagatttcattttgaatctgtgtcaccggcaagttttcatccaacgggtcgaaatccagataccggttgttccggacagtgttaagataacggacagcctgccgggaatcggtattcagtgaagcttcggcagcgatataatacatttcggaccaacgcaaaacaggcataaaatttttatatgtaccgttttcatactgccagaatttagacagataaggatcactgccactataagtccaatgataagtatgccgccaatcctgcccatacgctttagtcgaaacttcgtaaatatcgtcccacatttcctcggaaggagacaattttttcgtcttatcggtctgttctttaaaataaggcccgataatatcgtccatatcgagcacattcaaacggaataacagttcggaagcgaacaacaaatccctttcgtaagcattcgacgaagtgatagaagtatagtgtacccaggaaaatttcttttcctcgatcactttccgggcatagaccaaagcctgcgccagattatcggcccctcccttccattgataagccctggctaaagttgctgcaacggcataataattaaaccgataggaacgatcgttccgataagtataagcttccagactatcggccagaaacaacggatcggtttccagcagcccgagagcttcccgggcatccgcaatgacataatccaatactttatcgacagtagactgcggggttaccgctgtcgaataagtcattacataagggatggctggagcttgtgcattcgaagcatacgaaggagcgaacatccgcaataaatccagatgcagaaaagcacgcaatcccaaagcctcccctttgtatatgcgataattatccccactgaacatcgccggatttttatcgatatactccagcataatgttcagattggcaatcgccgaatacatctgcgaccaaaccgtagtgatcttattcttcaccgccgtattctcataattgtaaaggcctgcctcataatactcgcttcctgttgccagatcataattttgtgtcaaggcttcggctaacccgaaggtcatttcctgcccatacaaagaggtcgaagccaatctcttgtacactccggtcaactggtcgctgaaaccttcttccgtagaaaaaagttcgtcggcgagcacctgtgatttcggacgtacatcgaaataatccgaacatcctcccgtcacgaaaaggaacaaggcaccgagccaaaagctcacattgtatcttaatttgttcatagttgtcctgttttaaaaagttacctgtaatgagaaagagaacgaacgggcaaacggataagaagttccgcgttccgttttcaccgaagaaatggtagcaatatcattcatataaaaggtggctttcatgcgttgcagaaaactcttttccatgaaacgacactcccggaaatcataataaacattcaaagaagagaatgtcagcagattataatcttcaacaaaccgactcgtaggtttagtctcggagtcgtccgtaatcgacttgaaacgggccacttgccccggttcactccaacgtccggtgaaaacccgccggtcgacattataatgtacatcggcattttctactttgtccaacaaagtcgtattatacatttgtccacccagccgccaggtaaaacccgcattcaatccgaacccatgatactccatattgataccgaaattaccggataccttcggacgggtatctccgccggcaataaaatcggaactactccaatcgtaagtcagcgaaccgtctttcttcacgaacacctctttcccggtctgaggatcgatacccaaagatttcactacccagatcgtactcatcgactggccttcttcgtaacggacaggtaccgaggtagcagaagacgagtcgtactcttcatccgtgctatcgttcaatgctttcaatgaattagatattttcttgaggatatttttattggcagccgccgacgcataaaaattcacataactccggcttggcgtatctctccaaatccggccgttcaggtacacttcccaacctttgttttccacttcacccaaattggccatgtaagaagaaaatcccatagaaggcggagtcgtcaccgaagtgatcgtccctttggtcgtcgaaacataataatcgaaacgcacattcaccgctccctgcaaaaaactcagatccgcaccgatattattgtcgtattttttttgccaggccagatcaggattagccaatcccatcaaataagaccccaattcgccctgataagcactttggtaataattcaaggttgcaatagcatcataagaattaaaaccttgcgacccggtataacctgtcgaggccctgaattttatccgctcgatccattctatatcactgaagaaactctctttatgcagattccaacccaaaccgaaggaataaaaatgtccccaacgattattggtcccgaaatcggaagaaccgttcaaccggtaattgacatccaacaaataacgatcgtcgaaagaatagtttaaagaaccggtgaaccccatgtcccgggtaatcccttcgctaccggtcggtttggtattcttgtattctacccccatcgaaatatgatccatattatcattggccaatccctgcacagcaaccgtataatagtcatatttcgcccggctcatactgtattgggcattcaaaaaaagcgtatgcctcaattttgagatcgaataagccgcccccaaatccagactcaggttattatctttacgggaataggtggaatagctaccccgcttatacaaattatcccctgtatagctgacaaaattggtatgtccggcaggataataatcttccgaaccggagttctttttcgtcaaaccgaaccgggcagtcagacgcagattttgcaacgcctggtattcggcataaaaattttcggtaaacgtcgtgtatctgtcttcaaaccgggtattgatcaggccatttttcagataattatattcggtcaccaaacccgtccaggaatcttccatttctccatcctcgtcatgcaaacggttataaggattcaggtaagcataatcgctgaatgaaccataaggtgaatcattcgatttattatcgtcgatcgtaaacttattccggaacaataaatttttgtatttatatgaaaatgtaatccctccgctcagggtattccggttcgaccccttcatcactccggccacattgttataactcagatcgatcccatacagcatataatcatccccaccctccagataaagagaatgtttttgtccgacccccacccgcaaaggtttatccagccaatacgtatcgacaccggccgcgatagcactggcaacggtcgtatatcttttgtccagattcatctgttctgtggcagatcccgtcgaagaagtatagaaaccggccagatattccgcccgcaatttttcctcggcattacacaagtcataactggataaatccggagcttcgatatccaggcttccggtataggtaatcttcattttccctttttccggtcggatcgtttctaccaccaccacgccattggccgctttcgacccataaatagccttagcagtagcatctttcagcaaagtaacactctgtacctgattcatatcaaggtccataattttcgtcagcgtcgtctcgaatccatccaaaataaataacggctgattcggattttcctgatattcactggccacttcggtaaatccggtctgtccacgcatctgaaaatcgggtatcgcattgggattcgaaccaacctccagattttcaaccatcagaaaagaaggatctatatttttcaaactggacaagacatttccattcccgaccgttttcaattcatcccccttgattgtggtaaccgagccggtataactattcgctttacgggtgaacataccggttaccaccacttcttccatctcctgggtatcttctgtcagtacaattttaaaatcggttttccctttcagggctacctgctggtttttatacccgacaaaagtaacttcaatctgagtaacctccgacggaatattcaacttaaacttcccatcgagatcggtcgaagtagcgatcagggttttcactcccggagcttgtaccgctttcaccgtagctccgggcagtatttctcccttctgatcgacaacaagcccggtaatcgttcgcatttcctgagccttcagctgtaataaaggtaaacacaaaagcataccgatcacagccaacaaacgccaccctctccggtaatttttgttttggacattttttttcattttcataagttttatagtaagtatcggttagttcaatatttcggcaattttatcggacaacgcttgtccccgcagtttatcatactgtacgattccgtcttcggtaaccagaaaaatagccgggatcgtacgcccgtaaaactgctctccgaacaactcttgccgatcgatcaaattaggccagggcagctgttcctcatccaaagctttctgccaggccttatcctccttatcaatagatatactaatgatttccaaccctttgtctacatatgcttcgtaaattttcttcaaattaggaatttcccgccggcaagggccacaccacgatgcccaaaaatcgatcaaaacgcattttttattcttacgcaaatcgctgtcggagtgtatatttccattccggtcgggagcagaaaaggccggtaaccgtttgccgatcagattctccgggatcagttccttcttcaacaactgcccatagtagccattttgtatttcttccgggaaactattgtaaagttcaatctgggcaggatcctcggtaaaataattaaagcaatacagcatcaacagaggtccccaatagctatctttattcgctttgatcgaagccatagtctgcttttctacctgagtgaagaaagctttctcgtctctggcataggccttcatctcttcggtttgattcagtgaatctatcttcaccgcatttccggtacggcgggcctcccccaactgccggcttatatcctcgtatttttggtgtaaccgagtataagctttatccaactcctgccggaaagctattttctcccggaattcccgatctgccttactacccgtaacaaccgccttattcaatgtcaccatttcccgatctccgtcggtcgtagagacggcttcgcctgttatagtcacctcaccgttttccagcataaaggcataatacaactgcttcccctctgcctgcagattcaacaaccgcggctcgggtaactgtccctcgaaaacaaattttccatcttccaccacagcttcaccgataggcttctcttgtttgtgtgttgccgccggtaccaaaagcatcctggtaccatccgctaacccgctcagatttccaaccaaccggtacgaatccggcgcagtacaggccccggctaaaagtaacagcccacccaggaaataaaatccgttcttcatagtccttaacattatcttcataacaaattcttaaaaatgatttagtaggacaaagaaaaacaaatccggaaaacaccttattattaaagcaattccaaaatcagcaattgctttttttgtaaaaaataaatgttaaaatacaaaaatcgtacgaatttacacggacaatttttgcatttctttaagatttattttctctcagcgagcgggcatgtttccggtattggtccggtgacatctgaacggcagctttgaaaagagtataaaaagtagttaccgagctgaatcccagatcggcagcaattgcttttatcggtgtatcgtcctgtggatcagccaatattctccgggcttcttcgatccgatatttattcatataatgcgtaaaagtcaatccggtttgttcattgatggtctgcgaaagataggtacggttagtacccaataattcagccattttttcccgggtgaataaactatttttatatacctgatcgttttgcattaaacgctccaaccggccgaataattcctgctggctatctttattcagcgaagaaccggaataacgccctccatcaacagctccggccttaccgatcaattcctgcaattgtttctcctgttctgctatccgcttagaaaactgtctttccttcgccagccaatccacactttcccgaacaatctgtttatataatcgattttttctccgataattgatgtagaacagtaaaacgacgatcaagacgacaaaagtgatcccgaccaaagccatcacccgattctgttccttttgtaacaacatatttttttgagccaattccttatttcgtttctctgtctcatacctcaccatcaactccttctctgtcctttctttgtcttcgttatacaaacgaaaagattcagccgtatacttcttataatattccaaggcttcttttggctcacctaaccgatcgtaacaggctgaaagcaacaggtagacttcccgccggaacagtgaagtgatatttttttcagagatctctttcccgatctgtaatttttccaaagcagacttgtattttttctgagcgatcagtgcccgtccatagccgacataggtggacacgacataagcagcctgtgaaaaaccatgttcccggatcgcctgctcatagtacaatccggccttcatataatcccccgcttccaacgctatttctccgtatgtattataaatatccgaacgatttttaaagtcataacgtttactcaaccgatccgcttcacgggtatatctccaggcctcttccatcttccggttgagacaaagattgcgggccatagaaatcgccccgcaatagatcagataaggatcattattctgccggcccagcaggtaacatttctctgcatattccaacccggcttcttcatttcttaaagtcagtacttccgcgatattagcgactaacaaacaatacaacaaccggtgtccgcaacgttcggcgatatcacacccctcccggtaataattcaaagagcggtaatagtcacaagtgacattttgttcgtacaacccaagcccgttatacaccgaacaaagtgccgaatcattgtgttgtatctcagccaatcgttttgccccgagcaaatcctgtaatccctcctgcgttttgcccagcatgatccgtgcttgtccctgatagatcaaggcataggtgtaaaaccattcttgtcctccccaaacggtattttgtaaaatctcctgacaaactctttccgtctcctgatattcgcccttagaaatatgcccataagccttatctttcaagacatacaaagccgaatccgacacctttccctcctgcttgccaccgaacccacaaaaccatagataacaaactgataacaaacaaaataaacgcatcataaaacgtcccattcttttggtggatttccaccaaaagaataattgacagacgacaattacctattgacaattatttggaagcgaagtttccatcgaaaaaggaataagtaaagacaaatgaaaaaaggaataaagaataaagcattggtttttagttggttcgatggatctttccagtgtgctgtttcattgtcaactggtctctggcaattgtcaatcccccacaggtgcgggaacttagaattttttgtagactttataaactttcgactaatttaatgggacgttttccacacgaaattaaatattattttgactttattccctatctttacagcgaaaattaaaagaaattggatgattgaggtcaaaaatatcaaaaaaagttacggaacactacaggttttaaaaggcatcgatctgatcattcccgaaaaacaaattgtgacgatcgtcggggctagtggagccgggaaaagtactttgctgcacattataggcaccttagactacccggatgaaggagaggtatggtatgaacaggacaacgtcgctcactattcggccaataaattagcaaatttccgaaataacaatatcggttttgttttccagtttcaccatttgctaccggaattcactgctttggagaacgtatgtatgccagcctggatcaagggagtcccccggaaagaggccgaaaaaaaagcactcggactgctggaattaatgggattgcaagaccggatctctcataaaccgtcagaactttcgggaggagaacaacaacgggtatccgtcgccagagccctgatcaattccccaaaagtggtcctggccgacgaaccttcgggtaatctggatacacatactaaaaacgaactgcaccaattatttttctccttacgcgacgagttaggacaaacttttgttatcgtcactcacgatacggaactggcggagatggcagattcgaagatttgcttgagcgatggacagataaaaggctaaaggctataagctaaaagctaaaggctataagctaaaagctagaggctataagctaaaagctaaaagctaaaagctaaagggaaaaagtataagggaaaagggaaaaaagggggggaaataaaagaatcgaggggaaaagggaaacagaggagaaagagtttacgtaaaacagacaagtgtttattcaaacactttttagtcttaactttttactttttaccattttagtgtatctttgcgcgattaataattaatagataaagaatgaaatacacagacgaacttgacaaagtcagctatagcttaggacttagcattgccagcaatttgatttcttccggagtaaccacgatcaatgcagaagcatttatcgacggtctgaatgtcgtattcagtggtaagatgccggaaatcatgccggatgaagccaataatatcttacaggattatttcgacaaactccagcaagcaaaaggaaaagaggcaaaagctgaaggcgaaaagttcctggcagaaaacaagaaaaaagaaggcgtagttgcacttccgagcggattacaatataaaatcctgactgctggcaatggcccgaaacccaaagcttcggatacggtaaagtgtcattatgaaggtcgtctgatcaatggtactgttttcgattcatctatccgcagaaacgaaccggcagaattcccggtaagcggagtgatcgccggttgggtagaagccctgcaattgatgcctgtaggatcgaaatggcaactttatattccttccgaactggcttatggcacacacggcgcaggtcagtcgatcggaccgaaccaaaccctgattttcgatgtcgaactgttggctattatctaaaacattaaaatttaattcaataaaattcaaaacatgaaagctaaaaatttactacttactctggcagtaggtgcaatggctatcagctgtaacaacagcggttccatgacacaaacttctgcttctttgaaaacaacggccgactcagccagtttttatatcggttacatgtacggctcaggcctgcaacaaatgggtttctccgaggttaaccgcgaagctttgatcgccggtttgaattcagctatagccaaaaaagaagtgggaaaagacccacgcgaaatccaaatgttcctgaacggattcatgcaggaagtggctatgaaaaaagcaacggaaaatgcagaaaaaggaaagaaattcctggaagaaaatgcaaagaaatccggcgtagatactttagctaacggtatccaatacaagatcatcaaaaaaggagaaggtgcaaaaccggcagctaccgatatggtcaaagtacattacagaggcaccttgatcgacggaactgaattcgattcttctatcaaaagaggcgaaccggtagaatttcctttgaatcgggtaatcccgggatggacgactgctttacaacaaatgcctgtcggatcgaaatgggaaatctttatcccgtcggatcaggcttacggcccaagaggaaacggctccatcggaccgaacgaaaccctgattttcgaagtcgaactgttagacatcgttacaccggacgctaaagaagctgatcaaaaataatctccctatagggaacttcaatgtgaacccgaggtaatacccccgggtttcactttttaattagctaaatcaaaaaaactccacatacatgaattacgaaatagtcgggaaactgattttcaaagaagaaacccaacacatcagtgaccggttccaaaaaagggaatttgtcatcgaagtagagaacgaaaaaaactcacaatggaatgacttcgtaaaagtacaattgatacaagatcggtgtgacctgctcgaaaatatcgatttaaacgaaaatattaaagtatatttcaatatccggggcagaaaatgggaaaataaaggacaagtatcttattttaccaatctcgaaggctggcggattgaaaaagtagccccccagaatccggcaaatattcccgtaccggaatatcgtgtagaagatatccccccgatgcctgaagccgacgatttgcctttttaagagttgctgagtttcagcaactctatccctgcttcatccataccgttttggcctgacaatgcgtcaagtgctcggtttcgtctttcacttcatgccaaaccaccacttcattttcaccccgttcttccatgcgataagcggaatgaatctgactatccggcataatctcatgggcataaatcacttcaatttctgtcaacacatgctcttttagaaacccgaaaggcagcgaattggtaatccagcggacatacgaagcctgagtcacgtgcccgttaaaatcaatgttatcgaaagtcgctgtaaaatggcgtattccctgtctctctccgccaaattccttctcatccagcaaaggggccaacaccaacttagggatgttatgctccgtactcatggcaatgacattctccggcaaacgcaaaggtcttctccgtttcatatcgatatacatccattcggaagttgcccgcaccaattcctccccgtcttcccggaacatccggtagtcacgcaaggcaaacaaacggtcgatccccgaaggccaggtctcgatagtcacgatttcttcctttaaaggcatcttatggagcaggatatgcagacgatgcaacatccaggtaaacccttgtgcattcaaggtatccacatccaccttatatagttcggtctgtacctcggccgcatcgttgaacaaatcacacaaagttttcacaaacaacctgcctttgtaattggtatagtggttgtaaatttttactttctctgcatacttcgtcaccatagctttgtttttaacttcattcaaatcacatagacttcaggttctatccagatcccgaatttcatgaatacacttttccggatttcattcgccaggcgggtaatctcgataccactggctcccccccgattcaccaataccaaagcctgtttgtcatgtaccccggccttcccccatgtacgtcctttccaaccacattgttcgatcatccagccggcagccaacttgcaacaagcatcgtcgacctcatagacaggcattccgggatattccgccaaaagccggtccgcctgttcccgactgaccacgggatttttaaaaaaactccccgcattgggaatctccgccacgtccggcaatttagaacggcgaatccgaatcaccgcctgccggatattcgtcaaattcacttctccccccatcttttcaagttcgctccgcaaggcaccataatccagccgaaactccggttttttggacaaccggaataccacccgggtaatgatataccgatttttccactcccgtttaaaaatactatcccgataagcgaaacggcaatcttttcctgcaatttccacctggatagctttatccagggctatcgcttccacccggtcgatccgctcgccggcttccatcccataggctccgacattttgcaccggagctgctccgacatgccccggaataaaagaaagattttcaactccaccccatccctgttccactgtccaggccacaaaatcgtcccattccactccggctccaatcctaacccacacctcttcctcatcttcctttatcacctcttttccctgcatcgccggataaaaaacagtaccggtaaaatcttccgtaaaaaggaaattacttcctcctcccaaaatcaacacttccgacggttgccattcataatcagccacaaaagcccggagcgcttcctcctcgtcactttcgacaaaatacctgcatttgacatcaatagcaaacgtattatatggtttcaaactataatcttccttgacttcaatcataacttatccaaaatcacttatctttgtacacaattatttgcaaatatacggaaaaacatgaacactttacccgctctgttcgaagaacgcatgagaaaacttttaccggaagagtcggaagctttctttgcagccctgcaaacagagcctcctgtcagtatccggctgaacccgggaaaacccgtccccatctcccggttattccccgacgagcaaatcggtttacccgtatcctggtgcgaatcggcctattatttgaagagccgccccgttttcaccctggacccttgcctacatagcgggacttactatgtacaggaagcctcttcgatgtttttatatcatatattcggacaaatactaccggctcatccggtaagagtattggatctgtgtgccgctccaggtggcaaatctaccctgatcgcttcccggctttcctccggcagccttttggtagctaacgaagttatccgttcccgggccggtattttaaaagaaaatatgatcaaatggggaacttcccatgtagtcgtcacgaacaatgatccggcagactttcaccatctgaaaggcgctttcgatatcatcgtcgtagatgccccctgttcgggagaaggcatgttcagaaaagaccccggtgccattcaggaatggaacgaaagcaacctgcagctttgcagtgaacgccagcaacggattctggcagacatctggccttgcctaaaacccggtggtttcctggtgtatagcacctgcacttacaatcccggagaaaacgaagccatcctggaacgattgatacggaaatacggagcccgttccatcgaaatcgcacctctttttccaggaattgtcccgggaaactcaaccgctcactgttatcatttctaccctcaccggattccgggagaaggattttttaccggagtggtacaaaaaaccgaaggcgaagaattcagagccgggaaagtcaggaaaaatacgaaacatacccccccccttctccccggcgacatccgggcttatatccggacacccgaatattaccgcccctatgccaaagacaatatcataggcgtaatcccggagcaacacagcgaatttatacaactactggaggctaatctgcgcatcctctaccaaggttgtgaaatagcagaaatcatcaaccggaaaagtaaacctctgccttcactcgctctctggcagggactgaataaagcaaactgcgccctcctggataccgaccggatgacagccctgacctttctgaaaaaagaagatattccggtgccgcccaagaccgcagaatggttattggttacctatcgcggacagggtctcggatggtgcaaacacctgggcaaccggcttaacaactattaccccaaagaatggagaatcagaatgacaatcgaataaaataataaaaccatgaattatattgaagttactttcgacatcaccccctacgaagaagcggttgcagatgcgttaatttccgaactgggtactatcggttacgatggtttctcctacaccgaccagggattcacggcctacattcctgccaaagattataatgcacaagccatcacccggctggaaatattcgattttttcacccggaactatcgtatcgaaacctcggtacaggaaatcgaagaccaggactggaacaaagtatgggaagaaaatttcactcccatcgtggtagacgaccggatcttagtcagggccggattccacgctccggttcccggcatcgaatatgaaatcctgatcgaacccaaaatgagtttcggtaccggtcaccattccaccaccgccctcatgctacgcaccatcctggacaacaaggagcggattacaggcaaacgggtactcgacatgggatgcggaacaggtatcctgtctatcctggctgccaaaaccggtgcccgggaaatcaccggcatcgacatcgatgaatgggcttacaacaatgcgatggaaaatatccgggccaatggtctgaacaacatcaccatcaaaatcggagacgcccggttactggaagcagaggcacctttcgatgtgatcctggctaatatcaaccgcaatatccttctcgaagacatgccccattacgtcgcccgactcctcccccaaggcctcctgatcatgagcggattttatctgcaagaccttcccctcatccaggaaagagcggcacaatcaggtctgactttcatgacttaccgggaagacaagaattgggtggcagccagcttctacaaaaattaatcacgttgtttaattcttaacaaagtattgttttatcaatttgaatatagcacctttgcagccggaaataagaaaaacactggagtttataaaattgacaaatatgaaagttttaaaattcggagggacctccgtcggaagtgcagacagaattcgtgcagtggccggattgatcgataacggcgaacctcagatcgtggttttatcggcgatgtccgggactaccaataccttggttgaaatttctaactgcttataccggaatgaaaaacaggctgctctccatatcattcagaatctggaagtaaactactatatcgttatcacagaattattcgaaacagaagcttatattcagaaaggtaaaaccttcattcaaaccattttcacctatctgcgttcttttatcaacaaggatttctatcctcttcaggaaaaggctgtattggcacagggggaaatcatgtctaccacgttgatgcattattacctggaagaatgcggagtgaacaacacgcttttgtcagccctggaatatatgcgtatcgataaagactgcgaaccggattatttttatatccggcaaaacctgaaacgcgaactggccaaaccggacacccaccccctgatcattacccaaggctttatctgccggaatgcttacggcgaaatcgacaacctgaaaagaggaggcagcgactattccgccgcactggtaggggcagccatcaaggctgaagagatccagatctggacggacatcgacggttttcataacaatgatccccgtatcgtcgaagggacgaaggctatccggcatctgtcattcgacgaagctgccgaattggcttatttcggggcgaagatccttcacccgtccagcgtacaaccggcgaaaaaagaaaatatcccggtacgcctgaaaaacaccttatgccccgacgacgaaggtacactgatcaccgaagacagtccggccaaaaatgtgaaagccgtcgctgccaaaagcgggattaccgcgattaagatcaaatcgaccaatatgctgctggcctatggtttcctccggaaagtattcgaagtattcgaagcctggaagaccccgatcgatatgatcgcaacttctgaagtggcagtctctctgactatcgactgtacggaacatctggaagaaatcctcaaggatctggaaaaatacggcacgatcgaggtcgaccgcaatatggcgatcgtatgtatcgtcggcgatttttcagccggtaaatccggactgggagcccaggttctgaaagccctcgaagaagttccgctccggatgatctcttacggtggcagcgcacacaatatctcggttctggtaaaagaagaagacaagaaaaaagccatgacagacctcagtcataaactggaagatcttcagcattgaaaatagttcactcagcaacaacacactttactatgcagttatctcagataccggttcaaacaccgacgcccttctattattataatttagagctactgaaaaaaacagtacaagcggcaaagtccgaatcagccccttacggttaccgggttcattatgccgtcaaagctaacgccaatccggtgttactgcgactgatcagccagcagggactgggagcggactgtgtcagcggaaatgaaatccggcaggcactggaatgcggcttcccggccgatacgattgtatatgccggtgtcggcaaaagcgatgcggagatagaacttgccttacagcacgatatcttttgtttcaactgtgagtccctgccggaaatacaggtgatcgacgggattgcggcccggctgggcaaaaaagcccggatcgcccttcgcatcaatcccaatgtcgatgcccatacccatcactatatcaccacaggtatcgaagaaaacaaattcggtatttatttgtacgatctggaacatgtcatcacggaagtagcgaaattaaaacagatcgaactcatcggtctgcattttcacatcggttctcaaatcaccgacatgaccgttttccggggattatgtatccgggccaatgagatccaacggcagatgaaagaacgcggactccttctgccccatatcaatttcggcggagggttagggatcgactacaacgaaccgtacgaaaaacccattgccgatttccaatcttactttgccactttcgcccgatttttcgaaccggaacctcatcagcagattcatttcgaattgggacgctcgatcgtcgcacactgcggagatctgatctctaaagtattgtacgtcaaagaagggaaaaacagaaaattcgtaatcctcgatgcaggcatgaacgatctgttgcgcccggccctttatcaggcctttcacaagatagaaaatatcagctccgaccgacccgaagagaaatacgacgtggtaggaccgatatgcgaatctgccgactgtttcgggaaagacgtcgtcttaaacgaaacccgccggggagatctcatcgctatccattcctgcggagcctacggcgaagcaatggcttcccgctataatctgcgcgatctgcccggtagtgtttttcaatacccaaagtgaccaaaggaattttgttttccaatggtcactctataccaaacgattgatctcaaccgaaatt

SEQ ID NO: 5790 - DNA, 8398 bp, Unknown
  gut microbiota DNA sequence
gctttgggcttttcagcaaccacattctccgcattctcctcttcaagataggtaacggttttctgtaccggaagtacagcttcctcatcaatctgttcttccttaaagtaagagcggtctacgggcaaggtcacgatgaattccgttccccggccttcctcgctctccacttcaatgcttcctccatgcagctccaccaagtcctttaccaaagaaaggccgatgcccgtaccaatggtgttgaacttccggtaatccccctcgtagaaccgcttgaagaggctcttctgcttgtcctttgaaatgccactgccattatcctttacatgcaaccggacgaagtccctgtcttcggcatacatcagcgtgacttgtatatagccaccctccttattatatttggcggcattggaaagcaggttgtagagaatcttgtccagcttgtccgtatcaaaataaccgataatcgactccggattacagagtacggagaaatgtatcttgcgctttttgacaagcggcaggaaagattcggcttcatttttcacaaacgccgccacatctcctggagagacacgcaacttcagattgccggtttctgctttacgaaattcaagaatctgctgcaacagacggatgagcctgctgatattgctacccattaccgtataaaggtcgtcatgcccgggaaaccgcatcttcaactcatcgacggtagccgagataatggtcagcggagtcagcagttcatgcgtgatatttgtaaagaactgcaatttggcatgattcagttcttccagtttggacttctccatctcccgaagatgcagctcattacgcagctgcatcctgttctttgctgtccggagaatgaagcagacaatagctgcccctatcagtgcataaatgatataagcccaccatgtagcccagaacggtggcaataccaccacctcaagttcacggatttcctgactccaaatgccattttcattggtggctttcagacggaaccgataagtaccgctcttcaaattattataataggcaaaacggcggttggcatccgtatattgccaatccttgtcaaaacctacaagctgataagcataccgatttaaaccgggattcttataagtaagggatgcgaattcaatactgaaattattatatccgtaaggcagatctaacttccgcgtaaacgaaggcatgacagaagaaatccgttctctgacctccggttccaataccgcaaaagaacggttgaagatttttatatccgtaatcagataaggcacggcttcattgtctttctccagagatgcaggaaggaaactgttataacccttatttcctccaaagaataactcgccctccctactgcaagaagactgtgatatgaaaaagttatcctgcagaccgtctgctgtcgtatagacacggaccgtagccaaattctcgtccatcggtacaaaaagctgtaccagccccatattagtccccatccatagacacccttgcctgtcttcctctatagaccctatcatgtcggcagacagctgatattcctgattcttttccgtaaatacattttccttataatcatatagatacaaccctcctccctcagttccggcccatagccttcccgatttatccacatgcaaacacaacaccgagttcgttgccagctggccgttgttataactatagttactatatttcagcgtttcgggatgctgcacatcccccataatatgtataattccatagttggctgtcgcaatccagaagctgccatccgcatcctccacaatatccttcacatgataccaatccgccaacccgcctccggcaaaagaaagtgttccgaacctataatgccctccatcggccaaactgattcccataccgccgcgacagcctacccaacaattccccttactgtcctcacacaaggccgaaacgcaatccgaatagagataaggcgtgtcggattcagtcagcaccttcactttctctcctttctcataaatcaagataccaccgtcataggtagcgaaccatacttctccattcttacgctgaataatgtaattgaccgtgggtacaccgggaatatccgagaattccgggatatgggaaaagaacgacaacacaccggtttcataatccttgcgtgccagcccataacttccggtacccagccaaaggtctttatctgcatcggcaaacaaagcgcggacggcagtagtaggcacgtcatcctctgccagattcaaagaatagaaagcaaacggagattgtttcgtgtctatcatcaggacaccgccgccaatggaacccagccagatattattgaagcggtcgcgcaacagtgaatttatttcatcacaaggtatatgatatgccgaatgcaacgacttgtaattaatgaatgtaccgggattctcctgcttcataatgctcagccccacccgggtccctatccacaaggtatgggtgtgtacatcctccacaatatcataaacaatattgtccgacaagctggcatcatcccctatcctatgcgaataatgcgtataagacacgtttgccatatcctttgggtgattcaagagaaataatccgcaatcccagccaccgacccacattttccggtttgaatcctgatagataacatgtgccgagttccgttcattgattttgggatatgcatagaatttatcctccttccgggaataacgaaaaagaccactggaccaggtaccgacccacaaatccccatccgagtcctcgaacaacgatttgatggaagctgcgggaaatataccatcggtggacttgccgtcatacatcacgaaggagtccttctctgccacataccggcataagccagaatccgtaccaatccatacctcattttcccgggtgaccaacaggcatgagaccgcattgtttggaatggcaggcgcagtatattgacggatttctccggttttcttattgagtgtgttcaacccctcttgtgtaccaatccacaagaagccgtcattgtcatcggcaaaacaataaatgttgttactggtcaacaaaccgggagtattcaagctcgatttatagacagtaatctggtaaccgtcgtatttacagaaaccataccgggtagcaaaccacaaaaaaccttccttatcctgatatattttctggacctcatccgtcggtaatccgtctaatgtagaaatctgcttgaacttcaaacgggaaataacattcccatcagccgcatgccccaaggcaggatacattgtccaaaagctgaacaggagaagacacgtatgcaaacaaaaaaaacttactctatttttcatataccagatattaggaattatgacaaatatagcaagttcagctcactttaaagaagaattatgctctttttttgtctgcaaatacttcaaacaaggctttattccttacctttacagccgtgttctacaccctaaccgtagacaagcaaacaacatatggaaaataaattcgactaccagtctgtgccttatggctttgcacattgcttcaacagccagtgcgtccataaggaagaatgcctgcaccacttggctgctaccaattgcacctcgcaatgtcctactttaagcatcatcaatccgaactgtatccctgccgataccaccaactgccctcatttccggaaagccctgaagtgccgggttgcatggggcatccggcacctgctggacaatgtaccccacaaatgtgcagccccgatgaggaaccagcttgtaggacactttggcaagaccacctattatcgcttttaccgccaggaacaaggcttgtttccaaaggcacaagcatatatccgtcaggttttcaaacaatacggaattgccgaagaaccgaaattcgagagatacagcgaagaatacagctacaacgattgaagcatccggacagctcagctcttacaaagtttatttttgaaaaacatctgtcatgctatcacgcagagggggatatccttttgattataaaccgattaaagcgtgaaagatacccgtgatagataaaaatcttcacaaccatccatcacgccataacaaaagcagtatccgatacttacttcattcaccacagaatagtgctatatgcctagttctcagtatgaaacttttagtttcttaagcaaatactattggtttcaaccttctaaaacaaaagtttcaacaagagaaactaagagtttcccttaggaaaaccattggtttcaacaagtaaaaccttttgtttcaatagccggaaactattgttccgacaagcaaaaccagcgtggaagtctgcacaaagcatcccaaatcacctgctttttcgactcaaaacatcagattttccacagaaaaacgctggaatcgacctaaaaaagcatggaatcacttgcaaaaagagcctgattgtcgtaccttagtacactgtaagcaaaccattttgcctgcatgtgacaaaacaaaaaatagaaatgaaaatcacccaactgagagaaaaagacgggaatctgacactgagcacgacagacttagacaccttcctacagaaaatcaaaacggagaccaaaacccagcccgtatccactttccgccagcaactgcgatactgcttgcccggcaagcgctgcaacgaggcagaccgactgcccaaagtactcccggcagccgaattccgcaagacgaacggtgtttgccagatgaaaacctacaacggcatcgtggaactgaccgtaggcccgctttccggcaagtccgaaatagcccttgtgaaacgtcttgcctgggaacagccccagacgcggctcgtattcaccggttccagcggacggactgtaaagatttggactaccttcacccgtccgaacaactcgctgccgggcaaacgggaagaagccgaggtgttccacgcccatgcctaccgccttgccgtgaaatgctaccagccccaactgcctttcgacattctgctgaaagagcccaagctggaacagtactcccgcctctccttcgaccccgaagccatgtaccgcccggactccatacagttctatcttgcacagcccgtctccatgcccgacgaaaccacctatcgggaagccctgcaagacgagaagtcacccctgacgcgcgccgtgccgggatatgaagccgaagaagccatcatcatgctgtttgaggccgccttgcagaagactttcgccgaagcgacgggtgccggtgccgacaacagcctgcactccctgaccgtgcgccttgccgagaactgtttccgttcgggcatccccgaagaagagaccgtgaagcgtacctatttccattattatctacgccaaaaagagactgtcatccggcagattataagaagcgtttaccaagagaacaaaggcttcaatacccaaagcagcctcagcaaagagcaaagacttgccatacagacggacgagttcatgaaacgccgctacgacttccgctacaacacccaagtgggtgaggtggaataccgtgaacgccactcgttccgtttccgcttctcccccatcgacaagcgcacgctgaacagcattgccctcgacgcacagagcgaaggcattcccctgtgggatagggacatcagccgatatatctactccaaccgcatcccggtattcaatccgctggaagattatctgtacgaccttccgcactgggacgggaaagaccgtatcctggcactcgcccggacagtaccctgcaacaacccgtactgggccgaactgttccaccgctggtttctcaacatggtggcacactggcgcggcaataccgacaagaaatatgccaacagcgtctcccccttattggtaggtgcacaaggcacccgcaaaagcaccttttgccgaagcatcgtcccgcccgagctgcgtgcctattatacggacagcatcgacttctcgcgcaagcgcgacgccgaactttacctcaaccgttttgcgctcatcaacatcgatgaattcgaccagataagcagcacccagcaaggattcctgaaacatatcctccagaagccggtggtcaacgtgcgcaagccatacgccaatgccgtgctcgagatgcgccgatatgcctcgttcatcgccaccagcaaccagaaggacttgctgaccgaccccagcggcagtcgccggttcatctgcatagaagtgacggaagcaatagacaccaaccgcccgatagactacaaccagctttatgcccaggccatgcacgaactggaccacggcgaacgctattggttcgaccagtcggacgaacggattatgacggaaaacaaccacgatttcgaacagataccgcccgaagagcaactgttctaccactatttccgcgttgccggaaatgacgaggagggagaatggctgtcgtctgccgaaatactgaaccgcctgcgccggtacagcgccatcccgctgtccaccaagagagtgaatgtattcggaaggatactgcagaaacatgaagtgccgtcccgcagaacacggttcggcacgctgtatcatgtggtggagtgcaagagacaagaagattagtctttaaaatattcagacaccggcaatgcttctatcgttttatctcctacggaaaatttgtcatgttggttataagtgagtatcagtccatgccccatcttgaagaaagacaaggcatccagtaagccatctacttcccttttccggttttctgcggtcaaggcatagcatacctggatggcaagctggggcacagaattgcgtacaactataaagtcgcattccttccggttctcattataatagaatatctcagaataacggcgacgcaattccgcaaaaaccatgttctccagcctccgaccctcatcacgggtgaaagatggagaggtgacaaatacaacaccattgtccacacaatacactttcttcgggttcaacagttgcgctttatatgaatatgaaaatttcggaacaaagtttatcaagtaagtctgttcgaaataagagaaataatcagacacagtagaagtacttttcattcccagtatctgtttcagttttgtagcagacaccagattgcccacattccccatcaaataggccaagagacttttcaaagagtggtcatcacgtatattatatctcacggcaatatcacgatatactatatcattgactaaatccgtcagaacatcctgatcatccagttgcaagtattgagggaagccaccctgatgcagatagtcgtacaaggaactgtcaccgatagtcttacccgtaaaaccgcaatattcagcatacgaaaaagggaacagttctttcgtaatatgtcttcctgtcaacttcgtgcccaattcacgactcaacatcgaagcattggagccggtgattcccacataaaacccttcatccaacttgccccgaatatacacctcccaaccatcaacaatctgtatttcgtcaaaaagaagagcgatacacccttcatgttccttaataacttcatccactatacggaaatcactgaattcaaatccatacagtaaaggggtatcaaaattcaaggagagcacctcttccggcttgtatctatccaccgataattgtgccagcaatgtactcttaccacaacggcgaataccagatataatcagtgcatagtctgctaccaagggaggtaaagacaacaataggtcacgtcggaaactttgaaatttcctcaaccgttcacgttgcacacgtatggcttctactatatccgatttgcttatcatagggctatgtcatttatattcagatacaaatataaacattccattctgaataaacaaatctatccatttagaatagatagatttgtttattcggaatgaaagcactaccttagcacctcattacaaaaataacgcttatgcaagacattataaacggacgttgcggctggtgcggaaccgacgagctgtatgtgaaataccacgatgaagagtggggaaaaacggtaacagacgacaagacactattcgagtttcttgtattggaaagtgcccaggcgggactgagctggataaccatcctcaaaaagcgggaaggctaccgcaaagccttttgcaatttcgatgccgcgcaagtggcgcaaatgaccgacgaagacgtggaacggctgatgcactttgacggcatcgtgaaaaactgtctgaaaatcaagtcgaccatcaccaatgcaaagcagtttcttgtcatacagaaagaattcggcagcttttacaactatacgctatccttcttccccgaccggaaccccattatcaatcattttcagtc

SEQ ID NO: 5791 - DNA, 20501 bp, Unknown
  gut microbiota DNA sequence
caaaacggccctccgaaaactgatcatttacctttattgtgtgtataagcggctggttagagccgcttattttcgtttcatgtttcacgaatgtttcacaaatatgtataatcaaaaatccaaccatctgatttttagatgattggattttatttttgtggtcccacttgggcttgaaccaaggactccctgattatgagtcaggtgctctaaccaactgagctatgggacctgcatttttcatgcaccaaaaaaccgcgaatcttttgacgggtgcaaatatagggataaatttctgttttatacaaaagatgtaggaaaaaaatgttattttcgttggatggaaatggcctggtcggtgggttggaatgttttatcgggtagatttagagaactatgaaaatttgtttgctggttattgggaaaacagatgcggattatattcgggcgggaattgaagaatacgaaaaacggttgaggaaatatgtggggtatgagatgaaagtcttgccggatgtcaagaataccaaacatatgagtgaggcattgcaaaaggagaaagaaggtttgttgctattggaacaattcttgccgaccgattatgtgattttgctggatgaacggggaaaacagtacggttccggcgaattttctgcttttttggcacaaaagatgctgaatgggataaagcggttggtttttgtgatcggaggaccttatggtttttcggaagcggtctaccgaaaggctgatgagctgttgtctttatcgaaaatgactttctcgcatcagatggtccggatgatttttgccgagcagatttatcgggcgatgaccattatgaagggagagccttatcatcatgaataaaaccgggaagtagaataaatgagcatatgaagcggaaggcgtttatcgttttgtttggtgctgtgttgttgctgatggcgacagcgctgacggaatatcttttctatcggcaggatgagaatacctgggtggaacgcttcgaaagccgtttgcatgaacaggaacgcaaagcggatcatttattggcgacttttagagacagcgtagatatcgactccgaggaatgggaggaggatcttatctttgtcgggattcgggagggcagggttttcttttggacgaacgaaattatcggagatcggcatttatccgaattgctgaccagtgggagaaattttacgaagatcggaaatacctattacgaaatccggaggaaaagatataaagatatcgattattatgccttattgcggatcaaagacgactatccctataccggtaaatacatcaaaaacaatttcggaaagtttctgaatattagtgaagagaatatcgggcaggtagaaatctctacagtcaccgttgaacagggacatttgatcaccgataaggacggtatgggcttgttttttatcgtttatggcgatcattacaaagaacgggcttccaattatctgttgctttctttctatctgctgtttttcctgagtttgttttatgtgtatgatctggtattgaaacatacggattgctggaaaagacaactcctttattttgccggatttatattatttctggccggtttgcgctattttatgcaagcctttcgtctgcctcctactatttatcgtctgccgattttcgatgagactttttctaaaaaaatatttattacttctatcggtgatttattattgactaccttctgtatttttcaggtttgttatatcactttgtcgaatatccggattaattaccaggatgagaaactgttgcattatcgttaccttttcactggtgggattatttttctgatttttctatatgtcgatttcttcaatttttccatcgatctggtggtggaaaatatggatattcatttgaatatcgcgcagttggtacctgtggggctctcttctattctttcgtttgtcgcgattattatgggaggattggtgatcgtgatcactatctatggtgctgtttctgttttctggcacatgatgtcgttcataacggtgattaaagtcgtcacttacatgtgtgttctgttgagtctggtcagttatatgttcagtttatatacgaacttctgggattgtttttttatctggatcgttacggttttactggctgttaacaggtatttattgaagcgggatatacaaagaagtatttatatccttgtcatatttttattatccatctacgtggtgatggtgactaaaaaatatgaaagctataaagagcaacgccagcgtatgaactatgccaccgagctgatagaagaaagggattataatttcgaaaagcggttggtggagatcgatcgggtcatacgcggttcggaggaactgaaaggatggatcgaggttggtgaggaacaggaagcggaagctttgttgagtggagagctattggatttgagaggatataattattcttgcgaaatcactttttgccgtgccggtgacagtctttggctgaccgatacccgcgaacaatggggatgccgggagtatttcgaatggattatacgtaaaaacgggcaccggatcgacgactccggtttctattccatcggtgttttcgatggatatgtcacttatatcgggcgatatcgtttcggggaagtaaatctttatcttcgtttcgatgcagtcaaggacgacgaaggcatagggtatccgcaaatcctgtcccgtaaatctgccgatgggaaagaggacggttatttttactcctatgctaaatatagctacggggagttggtgtcttcttcgggaaattttgtgtattataaaaaattatcggcattcggtaaagatgcccgtaatttcgacctgttcaataaagacaaatattcgcatatgctgatccctgtggacaacaacagtaccctggtcatcagtttgcatgagaatactttcgctctttattacatgaatgtgttgtatgctttcttcgtttgtatattgatttcttcctatggtttgttttttaatgtcaaccggaatatcaatttcaggcaaggtacattgagggcccggataaaaaacagtattatatctttgatttttatcctttttgttatcctgacagccttgagtatttatatgaataccgtgagttttaaagggcggcataatgctaaagcgatcgaattgctgaaatatgtcaataaagaattagagcgtttgccttgtgtggatgcccgtaaatgtcccgaagttacgggccggctatccgatatgtccgaattactgctgatcgatatcaatatttattccagacaagggaaattgatagctacttcgcgcccggaaatttttgaatatggattcgagggtactttggtcgatcctgaagccttgaaacagatcgaaaagctcggggtgaccagttatatcgcaaacgggaaagtgggcgaactgacttatatgtcggcttatatgccgctggtattggacaatggaaaatcttatatactgaatatcccttatttcgctcaaaatgacgaactgaatctggatattattattatggtagtcatcacggtgaatatcgctattgtgatgatggtcctggcttttattttatccggtttggtggcggaacgtgttacccggcctttgcagatgctgaacgataaattgaagaaaatgcatgtcggagggaaaaatgagaaaattgtttataaccatgccgatgaagtcggccgcttggtggaagaatacaacaatatggtggataagctggatgaaagtattgtgcagctggcaaaatcggaaagagagagtgcctggcgtgaaatggcgcggcagattgctcatgaaattaaaaatccgctgactccgatgaagttgaatatccagtttatgctgcgttctttgcagatggaagatacggagaaatttaaggaacgtttcagagccgtttccggcatgttgatcgagcaaatcgataatatggctgccattgcttctgctttctctgattttgccaagatgtccgaggcacataatgagactttcgaagtagatgagttagtacgcaactgctcgttacttttcaaaaataatacagaagaattggaatgtgatgtggaggaagggatccggatattggccgacagggaacagatgaggcgggtgttgatcaatctgttgaaaaacgcagaacagagtatccccgaaggccggcagggagttatcaggatcacggtccgtaaaaaagaggggaaagtggaaatccgtatccgcgataatgggcaaggtataccggaaaatcttcgggagaaaatctttcagccgaattttaccactaaatccagtggcatgggattggggttggctatctgtaaacggattatcgaaagtatgggcggggagatcggttttgtgagcgaagtaggggtcggtacggaatttttcattatattggatattgtaagagcataatttcaaattggtatcgtctatgatttgggtgtggattttgattggatttgtcgtgggggaagggagtatggccggagtgtggtattggatggagaaaaaacggaaacggcaaaaggaagttcaggataaaggcagggtagtgattccgctccgggatatggtacagttggctaatatcaatacggcgatggatgtcggttatctgatgctggagtataaaataaatctgaaaattcctgagttttatgacaagtatatgaatctggtcaagaagcagaaagaattgtattttagggaactgatcgagatttttagtcacaataaaaaagaatatgtccgggatttattggataaatacgccggattttctactcaggatgtgttgttattactgatgtgtgaaatgcagttggataataaaaccatggcccggattatggggctgactttggaaaccctgaaaaaacgcaagacccggatgcggataaaaatgcggacggcctctcctgtcactttataggcaggagttgccggatacgggttgcgatggtttccgggcggatatctaccatacattgctggtaaacactttttttacatttcccgcttccatctttcgtacatggccggcacgacaaggcggtctcgaatatctcggcggtcggaccggtgggaaaaccgaaagcggtcgggccgataagggccagagtcgggattcggaagagatcggcggcatgcatgaaaccggtgtcggcactgacgacgatatgggaacggtgaatgaggtagcaggattccaataaggttgttttacctgccaggttttctacccgttcaggagcttcggtcctgatttcttcgcagaaggtatcgcccggacccgccaggatcagaaagtggtattccgatagtaaggtgatcagctttttccaatgttcgaccggccatcttttctttatccagttggcagaagggacaagggtaatcgtatgggcctgtatacgggaattcagcttttccgggaaattttccgggaaataccagtcgtcgtaagtatccgggaaacggtcgatcccccattttaaaagtggtttccggtaagaaacgacaccccggaaaggccagggaaaccggttgataccccaattgaaaagtaaaaaccttttccagcgttctttgctacgcagggtgaaatgcggacctttgctccaccagggtaataattttagtcttaagatattagaccggatattactatgggcgtcataaatataatcgtaatgctcctcccggagttgccgggcgatttttaacaggcctttaaggccgagtgctttatcgaaagcccatattttaccgatgcgcttgtccatggccaggaaagaagacatatcttttcgggcgatccaatggatttctgcatcgggaaaatgttcccggataccgtcgatgattcccatacattgaatgatatcgcctatcgagctaaaacggatgatcagaaatttgggcatagttaatcgttattaagaatgagcgaacataaagtacggatgccggtttccagagcggctaggtccgggaaaaattcgggggtatgcagtttccccgccgggtgggtagtcgaacttacgcccaagcggatgaatgttgcagggaggagctgactgtaacgggcgaaatcttctgtggtcatgcgccggcccaaccggattacctgcttttctccgaattctgtttttaatatgccgatcgcttgctctgctttttccggttggttatagaggcagggatagccatcggttatttctatcgccggttgggctcccatactttcggcaatagctgtggttatccggcggatacgggttttagcctcctggcgccaggtttcgtcgaaagtgcggaaagtcccttctagccggacttctttggggatgatgttcatcatgctgtggcatctgaaatgaccgaaagtcaggacggtaggaatgaagggagaggcgttccggctggtaatctgctgcagagccacgacgatatgggaagcgatcaggatcaggtctgccgattggtcgggtaaggcggcatgtcctcccgggccgtgcagggtgatggatatctcgtctcccgaggccatatattgacccggacagatgccgagctggccgaccggaaggtccggttctgcatgtaaagcgatgatccactccggaagatgggtttggaaaaaaacatttccgatgatatcccgggctccgccgggcaaaacctcttctccgtgttggaagatgaacatcaggttaaagggcagtgaccgggtggccagtatttctgccgttcccaataagacggccgtgtgcagatcgtgcccacaggcatgcataatgcccgggttacgggaaataagaggatgatcttccttttcggagatcggcagggcgtcgaagtctgcccgtaaggcaattgtccgggaagtgtctctaccgggcagaaaaccgatgatccctgtcgggcctgcgttggtatactgaatttgcaggcagtcaagagtacggcggatataggctgcggtctgttcttctgcaaagcttagttccggatgttcgtgcaaataggtataatgcattcgggcattcgtgagcagctcagggggtatatttatcataaagctttatttacaattcaaactatattttcaggtggttttgagctaacgaagttaaaatttattcttgaatcatcgaaatcctcggtaaaaagaattattttcgtattccgaattcataaaagaaaagagaatttgatgtatgtatatttttgagtgagtgtatgttgttttatgctaatttttgtgatatgaaagtgcttttatcgattgtttttctgtttgcctctttggcaactttttcgcaagcagtgatcaacttcagtaaccgggcacatgatttcgggacgattaaggaagtgaatggagctgtttcttatgattttgagtttgtgaatgccgggactgctccgatattgatcaaaaatgtagaatcttcgtgtggctgtacttctccgcagtggagtagacaaccggttttacccggacagaaagggtttgtgaaggctactttcgatccgaaagaccggccgggatttttcgataagacaataacggtatattcgaatgctaaaccgaccgtagtggaactgaagattaaaggtacagtcgaggggaaagcccggacagtgctcgatgattatccttatgagctggcttccggtttacgtttgcctttggagcatatctctttgatgaaagtgcacaaaggagaggtgaaaagtatgtctgtgggagttttcaacaatgccggtaaatcagttgccgtttcttttacggacttaccggcttatattaaaatggctatcgagcctcagcctattcccgataaagggaaagcgacgatcaaggcggcctataatacggcgatgaacggtgaatatggattgaataaagagcaggtgacgatggtggtcgaggggaaaaaatacaccttgccggtttcggtcttcatcgaagaagactttacaaatatcgatccggcgacagcccctcggattgaagcggacaaacgatatcataacttcgggcatactcctgccgctcaagcggtttcctgtacttatcagataaaaaataccggccaaactcctttgacgattcatcgtatatattctaacgatgagcgggtaactgtcgaaatgacccggaaggaactgaaaccgggagaagcggctgctttgaaggtgaatacgaaatcaggagccgatgccgggaaggtgacttgtttaatcagtgtgattagtaatgcacctgccaatcctgagttgactttacgtttttacggaaatatcgattgaaattattaatatattagttatgagaaaacaaatccccaacctgatcacttgtatgaatgttatttccggtacgctggctatctttctggctatgtacggactgttgaccgctgctgctatcctgatcctggtggggatggttttcgattttttcgacgggatgaccgcccgtctgttgcatgtcaagtcggagatagggaaagaactcgattcgctggccgatatggtcagtttcggggttgctcctgctattctggcgtattttctgatcgttagagaattaccgggaggtgatttcctgcattttgccacctggacgctgggacagcagattacagctgtcatgccggtcgtgatcgctcctttctcggcttaccgcttggctaaatttaatctcgatgtacgtcaggccacttcgtttatcggtatgcctacgcctgctaatgcattgttttgggtatgcctggttttcggaagttattatactccggaactctatatgaccttgttcggaaagccgggggtattggcaagcagtgcccttatcctgtctattcttttgatcagtgaattaccgatgttttcgttgaagatttcgggattcggctggcgggagaataagattcgttattgctattttatatgtttgattatatcggcaggtatttggggaaaggggattctcatttttatcatccccctatatatccttttttctgtcgtagaggctttgataaaaattaccacttcaaatcgttgaccggatcgtagtcgacgtagtcttgcgaaggggaaattactttgttacaagtgatttttccggatgcagatgactgaatagcaggaatgaccggttgtacgccggaactattcacagcccggttcggatcggaaaccgtgtggaagaaatccagttgggtaatgatgacgatacctgcgatagctgtcgctcctagagcatatttcaaaagacggtgcagaatattaccggaagattctaaattgatatatttgggaatatccggggtttgggttgacctgctggtacccgatacggcgggttttattttatcggataaaccgaccttcgccactggaagtggctccattcctaaggtttctgcaaaaaaattatgttttccgggttcgaaaatgatattaaaacggcggtctgtaaaaaatacaccgatgtctccgaaagcgatccgttgtcgttggtttagccgaattttcaggtcttcgcagaaaagcatcagctgggaagtggccttctcatagctgatattttctttgccggcaatccaactgaccaacaatccgtcattgtgggtcaggttacggttgaataaaatatccttagagggtgggcaaatcaaaccactctcgtcgtcgatataagcacttttatagttgcagataaatcccccgaagtccggaatgattacgcaatcgtgtaaaaatagcaaatcggatatgtattcaataaatttatgcatagtacaaaagtaagaaaaaaacggatatccgccaataacccgaaaaaattaatttcaccctgttgaagcgaccgattttaatattttattacttactttgcatgaaatacagaataaaacaataaatttttagccttatgaagatttttgtaacaggggggaccggctatatcggttcgcataccgtggtggagttgcaacagaatggatatgatgtcgttattgtggataatttgtgtaattccaatatcggcgtattagacggaattgaaaagattacaggcatccggcctgagtttgaacagatcgatctgacagaaggagaacaggtgcgcgatttctttcgccggcatcaggatataaaagcggttatccattttgccgctttgaaggctgtgggcgaatcggtgcagaaacctttggaatattaccggaataacctgaattcattaatgaacgtcattgccggaatgcgtgagttcggagtaaagaatctcgtcttctcctcttcctgtacggtgtatggacaagccgatgttttgccggttaccgaacaaacaccccgtaaacaagccgaatcgccttatggaaatacaaaagcgatgtgtgaagatattatgcgggactttgcgaaagtagagtctggcatgaacttattggcactgcgttatttcaatccgatcggtgctcatccttctgctctgatcggggaattgcctaacggtgtaccgaataacctgattcctttcctgacccagacggtggcaggtatccgtccgcaattgagtgtcttcggggatgattacaatacgcccgacggttctccgatccgggattatatcgatgtggtcgatttggcgaaagctcacgttgtggctatccggcgtttactcgacggaaaaaataaagccaattacgaatatttcaatatcggaacaggaaacgggctttcggtattgggtttgatcaaagcttttgaaaaagctaccggcgaaaaagtaaactacaaaatcgtaggacgacgggccggagatatcgagaaagtatgggcagatactaccctggctaatcaggaattgggatggaaagccgaagttcctatcgaagaaaccctggccaatgcctggaaatggcaacaagcgttgatgaagaaataaaaagaaggtaaaaatggggaaacgatcgtttccctatttttataactgataaaattatttttttgccggactttccagaatctgatcgaagaaggtggcgtaattttcgatgtattcttccggagtggtgtattctgtcaccggtttgccgctttgtgtcgcataaacctttagttccgggtcgacattagagctattgaaaataatcccatccgaataatcgaaagccagtttattgacgttcgtatgggtcggttcgctcaggatacgtacgtcttccgaagtaatattttcactcaatactttcttttgaaaatcctggtctaaggtgccaccgaactggtcattataggtagaatatactactttagaatgagcgaatatcggatcttcgttgtattcctttttcagatacagaggcactaaagcggtgaaccagccctggcaatagatcaggtccggagcccatcttaatttttttaccgtttcgaatactcctctggtaaaaaagatcgcccgttcgtcattgtccgggaagaaagaccctttttcatcggtaatcacatgtttccgttgaaaatagtcttcattgtcgataaaatatacctgcatccgggcagattggatagaggctaccttgataatcaacgggtggtctgtgtcattgatgatcaaattcattcccgacaggcgaatcacttcgtgaagctggttacgtctttcgttaatacatccataacgcggcatgaatgtcctgatttctttgcctttttcctgaatcccctgaggtaagtaacggccgatatgggccatttccgattcaggtaaataaggcatgatctcttgagatataaaaagaatctttttcttcgccataactactttttcccaaaaaccttacaaaggtagtcatttttgttcacaaatcaaaaagcgtttggctaaatttgaatttgtactcttttgtaaatgaaagagaagacggtattgtttttttgtttatatttggaaaaagtaaaataaatcatggcagctcataatgatttggggcggaagggagaggagaaggcggttgaatatttggtgcgggagggatatgttgttttagaacgcaactggaggttaaaacaccgggaattggatgttatttgcctgaaaggggatctgttggtggttgtagaggtgaaaacccgtgatttgccggaagaacatcccgaggaactgttggattaccgcaagagaagaaatatccgtatagcgacggatgcctatattaaagcgaaagggattcgggctgaggtgcgcttcgatttgattttggtgatcgggcctgatttaaagattgaacatgtaaaggaagcgattcaggtgtttgaatagaaagaataacgatttaatgaaggattcgttaaaaagataaggattggattagactaatttcagtaataatataaaaagaatgtgttatggcgacaataaaagcaaaatatttgggacaactccgtgtggagtgtgaacatgtggcgagcggtacgaagatgatgaccgacgctccggtcgataattgtggtaaaggggaagctttttcacccaccgatttgtgtgctgctgctttaggttcttgtatattgactaccatggggatttatgccggtcagcataacatcgatctggaaggtacagagatggagataacgaagactatggggacagagccccggcgtattgtaagaatcggaatcgatatttttatgcctgcgaaagcttattctgccaaagaccggattgttttggagcgggtggcacagacttgtcccgtttattatagtctgaacgaacatttggaaaagtcggttcgttttcattggtcggtatagttgttgagtcgtcgactcgattattcaaataagtaaacgtatggtttttgtgacaggtgcaaccggattattgggtagccatttattgtattttttggctgtttcaggccattcggtttcggcattgcgtagaaaacagagccggctggaagattcccgggctgtatttttacagtatcctgacggtgaaagatattggaacacgatcaattgggtcgaaggggatgtggtgcaaaaggaggggctggccgaatatgtccggcgggctgactatgtttatcactgtgctgctgtggtgtctttttcggggacggatcggatgcatctgatgaataccaacctgcaagggactgaaaacgtggcggctctgtgtctggaatatcaggtgaggctttgttatgtcagttcgatcgcagcccttggtgatgcccggcaaccggaagatttgatcgacgaggatacacctgttatcgccggtagagagcattcggtttattctcaaagtaaaacggctgctgaaaaactgatccggaaatatatcggttatggattgaatgcagttatcgtatgtccgtcggtgattctgggggcgggtatgtggcatcgcagtagtgcacgattgttttttaccgctgctaaaggaattcctttttatacgcggggtatgaccggatatgtggatgtccgggatgtgtgcgaattgatgatccggttgtgtgaagatcctttggtgagtggggaacgttttgtgttgaatggaggaaattatacttatcaggaactttttacagctatagcccgggtgaatggagtacagcctccctggtggaatcttgcaccctggatgaccgaactggtatggaggatgctggcctgttggggatacctttccggatctaagcctgcttttacccgtgagactgcccggtcgtctcaacattgttcacgatattcgaacgccaggatactcagcctttatccggattttcatttctatcctctggtagagacggtagatcatatgcggctgatgtggatttcagcatctgcagatccgaagcataagtgaaaaatcgggttggctttctaaactttatgaactttctaaactatttcttacttttgtgccaaatcataaaaaagggtaaatgaatcatccattattagaaaaattagagacttattatatccgttttaaggagatcggacagttgatcaccgatcctgaagtgattcaggacatggagcgctatgtgaggttgaccaaggagtataaggagttggagacaatcacccgaactgccgataagtttaaggcggccctgcttagtgtcgaggaatcgaaagatattctgctgcacgaagaggataaagaacttcgcgaaatggctgaaatggagatcgaagagctggaagataaattgccgggtatggagcaggaattgaagttgttgctggtacccgcagatccggacgatagtaagaatgttatactcgagatccggggaggaacgggaggagatgaagcctgtctgtttgccggcgacctgttccggatgtatgcgaaattttgtgaacgtaaagggtggaaagtcgaggtgaccaatgccaatgaaggaactgccggaggatacaaagaaatcgtggccagcgttaccggtaaaggtgtgtacggcattatgaaatatgaatcgggagtgcaccgggtgcaacgggttcctgctacggagacacagggacgggtgcatacttcggcagctaccgtggcggtattgcctgaagccgaggcttttgaagtggaaatcaacgagggggcgatcaaatgggatactttccgttcgggaggagcaggaggacagaatgtgaataaagtggaatccggtgtccggctgcggtatgtctggcaaaatcccaataccggtgtggccgaagaaatcctgatcgaatgtaccgaaacccgggatcaaccgaagaataaagaaagggcactttcccgtttgcgtacttttatctatgataaagaacatcagaaatacatcgacgacatttcggctaaacgcaagacgatggtcagtacaggtgaccgttctgctaaaatccgtacctataattatccgcaaggacgggtaaccgatcaccggatcaactttacactttataatttacaggctgtgatggacggcgaaatcgacgagattatcgaaaaactgcagatcgaagaaaataccgagcgtttgaaagaaagcggactgtagaaatgtacgatttatcatttacaattaaatcatatggattataatcaattatttgaacagataaaggcaaagaaatccttcctttgtgtcggcttagactcggatatcgctaagattcccccgcatttgctacagttggaagatcctgtttttgaatttaataaagccgttatcgatgcgacggccgaggtggctatcgcctataaacccaatatcgctttttatgaaagccggggtgtcgaaggatggaaaagtctggagaagactatacactatatccggacgagttacccggatatttttactattgcggatgctaagcggggggatatcggaaatacttcgcagatgtatgccaaagcttttctggaaactcttgctttcgattcgatcacggtggctccctatatgggagaagattcggtgactcctttcctgcaatatgagggaaagtgggttgtacttctggccctgacttccaataaaggagcttatgacttccagttttttgaaagcgaagggatgaaattgtatgaaaaggtactcgaaaaatcacaggactgggggaatgcccggaatatgatgtacgttgtcggagcgacaaaagccgagatgctggccggaatccgccggatcgtgcccgatcattttctgttggtgccgggagtcggagctcagggcggaagtctcgaagaagtggcgaaatatggaatgaatgcacattgtggcttgatagtcaattcttcccggggcattatttttgccgaccgtacagaaaattttgccgtacgtgcacgggaagaagcgtttaaactgcaaaaagatatggagcggttgttagtggaagggaaagtattataggctggcttcttttgtcatagtcgggtgaaccttgagttcggtctggcaaaaaaaactccggattctcggcagagaagctgaatcggaaaactaaagttttaccggtagaactgaaagttcgttcggctatgataaagtgaattttttctgacaaaaagtttcgggaatgtttctggaattataatactttggatataaattctgtaaatccttcttctttgtccgattttactaatttatagtgtctttgtaaattaaccggggcattggctaccaaataggcttcggcacaaatatccagaaaatcgatatcattataatcattgcctagtccggcaacctctttacaattgatattcagtttttttaaaagagtttgacagctattgcctttatggataccgtcggcaaaaatttccagccagatcgcccggttgtctaaaggcgaagtggagcgtactacggaataaccggctaaatccgaacggattttttctagtaaccgtaattgcagggcatcgagaatcatcacgaattgggtggctttaccctgtatgccggccggtgattctatcgggcttccgaaaggccggtaggtggccaggcgtttttggtaatcgggatgtatcgggtaaagggttgtgtaataaaaataatggttatccgggatttcccgttggatggtgaaattgatattgtattcccaaagataagaggctatttcccgggtctcggacatactgaggtgatgagccgacagcaatcggcgatcgctccaacgtagtgtaccggcaccggaagagaaaaccagataatctatcggaaaaccggcaggtaatattttgagggcggaatacaggttacggcctgtggcaatgatccggatacatcctttattcccggctagccggaaggcttccagggtaccggaactgatgctccctcctctgggaagaagtgtaccgtccagatcggtaataatcgctttgatcatccgggcaatagttcgtaagtgaaataagggagggattcattcaggtagtgaagcactttttcctggttcatcccgtctaaaggattgtgggtatacccgaaagtagccttgattcccatgttgatgaagtgtacagcccgttcgatcgcttcgggtaaactgtcgccgttgagcagacaaccggtgatgacacttgcaaaagcatcaccggtacccggataactggctgcaacgtaatcgctgctcacccgccacaggcgttcgtcgttcttattataagcgagcgtagccacttttttttcatttcccgacggagccgaagtgatgatcacatattccggcccgagtttactgagggctttacaccattcgatcgcttcggccgggggggtgtgaggagatggcgccgtatctaaaagaaaggccgcttccgtcaggttgggtgtgatcacattcgcttttttacacagttcgcgcatccctgttatcatgccggtatccatccccggatagagtttaccgtggtctcctaaaacaggatcgactaagatgaaattgtcgtcctgactgaaatcatcgaaaaatccggatacgatattcatttgtttttccgatgccagataacccgaatacaaagcatcgaaatgtaagtccagttctttccaatgatcgatgatcccctgcatctggtcggtcagatcgaagctacggaaatctttgtattcgctgtgggcggataaaatagccgtggggagagggcaaacctgataccccatataagaaagaatggggatggcgactgtcagggaggcccggccataacctgacaaatcgtgtattgcggcaatttttttcatagtcgagaatatctgtttgtgcaaaagtaggataaataagtcgaaagtccataaggtttatgaagtccctgaaccttgtgggcttttttagcagctacgggagcgaccgatcggagccgaaggttccggtaaggaggtgcaccgaaggggtctacagactttatgaactaagtatatccgggattttggctccaccggactgaagatccgttccgcaattttgtgtagactctcgataattgaagtgtttgtgtgtaattttgaggggtatgtgtaaaaatatagtattattttctatttttgcccctgaaaaataatggtgttatataaaaaattaatcttttatcgattgtatggcaaaaataagattctcggcattagaagagctggctcatcggaaacctttagaagtcccaaaacggcgacgggtatctgaaattttcggatgtgatgtacttaccatagagaaaatgcgtcagtatttgtctatagaagctttcaaaaaattggaaaaggtgatgatagaaggtgggacgatagacaggggactggccgatcaggtggctgcagcgatgaaagcctgggctgtagaaaagggagcaacccattacacccattggtttcatcccctgaacggagctacggcagaaaaacacgatgggtttatcgatttgcaaaaaaacggaagtatgatagaagccttcgacggccggatgctggtacagcaagagcccgatgcatcgagttttccgaacggcggtatccggaatacttttgaagccagaggatataccgcctgggatccgggatctcctgctttcatcaacaacaacaccttgtgtataccgacggtattcgtggcttatacgggcgaagccctggattataaaacgccgatgttgaaggccttggcgttgatcgacaaggcagctgtcggcatttgccagtatttcgataaagatgtggaaaaagtgacggcaaccttgggatgggaacaggaatattttctggtcgacgaagccttgttcaatgcccggcctgacctgaaattgtgcggccgtactttgatgggccattcggcagctaaagatcagcagctggaagatcattatttcggggctattcccgagcgggtaaatgcttttatggatgaactcgaatacgagtgccatcggctgggcattccggcaaaaacccgtcacaatgaatgtgctccgaatcagttcgaactggcaccgattttcgaggaagcgaacctggctgtggatcataatcagttattgatgtctacgatgaagcggatagccaaacatcataagttccgggtattgttgcatgaaaaaccttataaaggaatcaacggttcgggtaaacacaacaattggtctttactgacggataccggagtgaatttgttgtctccggggaagaacccgaagtccaatatgcaattcctcgttttcttggtcgctactacaaaagctgtattggaacaggaggccttgtttaaagcttgtatcgtttctttgggaaatgagcgccgtttgggaggggatgaggcaccaccggtgattatgtccgtattcctgggacaacagctcgattctattctggacgaaatcgaacagaaagtgagcagtaagaagatgagtcctgatgaaaagaccgaattgaagttgaatgtcggtaaaattcctgaaatcatgcgggacaataccgaccgcaaccgtacttctccttttgcttttaccggtaaccgtttcgaattcagagcggtaggtgcttctgccaattgtggtgcagcgatgatcgtactcaataccgctgtggctgaacaattgattgcttttaagaaagaagccgatgcattgatcgatagaggggtgaaaaaagacgaagcgatttttcaggtcttgagaaagtatatcattgcttgtaaaaaaatccgttttgaaggtaacggatatagtaaagaatggcaggaagaagctcaaaggagagggttgtcggtcgatagtgattgcgtgggggcgctcaaagcttacttggctccgaaagccagaaaattgttcgtagagaacgggatctttaccgaacgtgaactggaagcccgttttgaaatcaagaacgagatctatctgaaaaaactacagatcgaatcccgggtattgggggatctggccttgaatcatattatcccgacagcgattacttatcaaaataccctgatcgagaatgtgaaagggttgaaagagatcctgccggatgtatataatgaagtgggcgaagtgcagttgaaagcgattaaagagatttctacccatatcaaagagatccgtactttggtcgacgaaatgaccgaagcccgtaaagtggctaacaattctatttcgaatgaagtggaaagggctcaggtttattctgctacggttttaccgtatctggataaaatccgttatcacatcgataagctggaactactcgtcgacgatgagatctggcccttaccgaaataccgggaattacttttctttaaatagggatattcagtaaatgtccctataaaatacaatggcatatgaagatgccccagtataatcacttc

SEQ ID NO: 5792 - DNA, 208 bp, Unknown
  gut microbiota DNA sequence
ttgaaaacgccgagtacctcggcgacctccgcgtcatcaaggagaagggcatcaccttcggccccgtcacggagcaagacgccgtccccgacttctacccgtactggtttgcatgggctgagttctccatcgaggagacactgacccgcaacccgaaaagctaccaacacctgctttaagggcagccgctcggctgctctaatttcat

SEQ ID NO: 5793 - DNA, 207 bp, Unknown
  gut microbiota DNA sequence
cgcgcacgaggttgacgggtgccgtgccgatatagaccggcgtggtgcccgcctgcacggcgctctgtgccacggtctcgccgatgtggccgtaggcgccgtagaggtattcgtttgccatctgcttatcctcctttgcatgaaattagagcagccgagcggctgcccttaaagcaggtgttggtagcttttcgggttgcgggtcag

SEQ ID NO: 5794 - DNA, 24304 bp, Unknown
  gut microbiota DNA sequence
aggaacggtctgacgacacagaacccgaaatcggaatagaaagaaaaaattatacctacacccttacctcctttaaaagttaaataagctcttcttcgcaacttctcgaacacattcaaggtataaataacaggtttaatttataaaaagcgtcccaaaattaacattcaatgctatgcgggacaatactcatgctcctatggaaatgaaacatatcactcctgatgttttaatgcgtttaagtattgcatttacatccggtagtaaattttctcaaagtttggaaaaggctttggaattgatcggcaaaatcagcaatcatgatcgtatatacatcatcgaggttcatcacaatatgacttatacgatcacttataactggcatgaaaagtcgttaaaagccattcccgaagaattcaggcacaacagcctgatatacgaccgggaacttgtacaacaactttgtacacaaaatcaggtaattattcaggaatcggatgtgtcgggtaatccggaattagcagagttactaaaagctaccgattgccgccaaatgttactattacctttattcgaatcgggatcacaatttgcttttatcgctttcacccaatgttcgacgactcacacctggacaccggaagaaatcaaatgcctgcaagatctgtcctcggttatcgctttacaattggataattatcaacttataaaacgcttaactgtccacctcaaacaagagagagctgcccggttagagctggaaatcaaacagaatcatttacgtcattggttacaagagataaaaccggtctgggatcaacttaaaaacaaaatagagcatccggaactccccgaagtgaccagtctggagcaacattttacaaatttagataaaatttgttctattccttctgtaaaataatcctacatgccaattaacaactgtcaatacactcttttagtgattacttcatcctttagtgatccggaaaaaatcctaaagactctccgggaagctgattttatgcttcttgaagccagtaatcaacaggaagccattcaacgaatccgtaccacctctccggatctgatcctattggatatcgacaaatcggtccggcaagagaatacgatcttacaggatttcaaaaccaataaaatcacaggcgccatcccggttttattcatcacttccatgactagcgagaatcacattccggaatgcctgaattatgacaatatcgattttatcacaaaacctttccgtccccaagaactggtcatccgggttcagcaccagttatccctgctccgggccgaacgggtcatccgccggcaaaacgagaaattgaaaaaaagtctggaagcccgggataaactgtattccatcatcgctcatgacctgagagcccctatcggcaccattaaaatgatcaattcctccatcgaggcacaaaaggctaaaatcaaagatcctcaaatttcaaagttattcgagatgatcaatgaaacgacagaggaagcttttaatctgctggaaaatctcttgcgctggacccggaaccaaaatggtaaaacgaaaatttatgctactcttttcaacctcacacctgtagccagacaagtcgtctcactattcagtgcaatagccaatgcaaaagaaatcgagctgatcaaccgtattgaagggaagttcgatattttcgccgacgaagacatgataaaaaccgtattacgcaatctgatttccaatgccatcaaatttacctatacagggggacaagtcgaactatcccttgcagactcgggtgattactggacaatatatgtcaaagacaacgggaaaggcatacccaaagatcttcagacccatttattgaaatccgatgaatacatcaccacctacggtactcacaatgaaaaaggaagtggattaggcctgattttatgccgtgattttatccgcatgaacaaggggaaactccatttctgttcccaagagggaataggaaccactttctatttcactattcccaaagcctcttcttctgcaaaagccgcaagccgttgatacattttcaacgccccccatgcatcggtagcggcatagcgaatctgggcttcagtcagtaccggagcttcccagttggaagtgcgctgacgtttagaaatcttcaccccgaagataatagccatcaattttgaaaaagatttatcttcaattccaaaatatccggcatattcctgcagatccacaaaggaggcaggtgtaaaatcggccaacttacgcaaattccggttatcgtcgcggataccgacaccgatctttataatccggggactagccagaagccgaaccaaagccggctggaaaccgcatttattcaaccggaacagaaaaacccgttccgggacagccagttgcaataagctcactttataaatttcacctttccgaaaagagggacgggtctccgtatcgaatcccagacaagtatgtttacttaaaaaatcagccgcctccccgacctgcctttcctcttctattaccttcacttctcccgtaaacacgtaaggaggtaacagatctatttctttccgatctatggtcttttttaaatcagtcaacattttctcaaacttaatcgtcctcatcttttacctgatagacagcatgatgtaccgccctcaacactccggcacaagcttttccccaatacaattcaaaactattattcaattgccataaagcctctccgatcacttccggtatcccacagcggaaagaagaaataaaattcttcaggtcctggtatatatcacaagttttctctgctatcgaatgtacgacaggaacttcactaaactgcatattatcatcgaaaacttccaggtattcatcgtgttctcccaacagtcgatgaagctgtccatataaataattataatcgtcttcggtgacgatatcttcgatcaatccactatctccgctatcactctccggcagcaaggagcccttcaaatagatcaaaggaataaacttctgcaaacgctggataaaatccctgcgctgcatctgaggtgccgtctccacaaaatcacaaaattccttggctactgcaacaaactcgatgacttctttgctatatccaacatgttgaaaatcttccataaactactttcttttattttacaaaggtagcattttacctcctacctcggtatacttacgggaaataaaaatgacattccaggtccctcccagaatgtcattctttgcggaaagacggggattcgaaccccggaatccctttagaggattacacgctttccaggcgtgccagttcagccactcctgcatctttccttactttggcggggcaaagataggataaaaagtaaaaagtaaaaagtaaaagataaaataaattttagaaagggtatccgatcgcaagattcagtaccagacctttccagaaactgccgtcgatattataatatccggacttgcctgtactataaggagcatgtataggtattcccaaatcggcacggaccacgatataggaaaaatcgtaacgtagtccgaatccggtccccaaagcaatttctttcaataatcctttgattctgaattctcctccgggacgctgggtttcattgttcaacaaccagacattcccggcatccataaacaaagcccctttaaaccgttcgtatattttgaaacgatactcgacattcccttccagtttgatatctccggtctgatcgagataagaataggtcgattccctgggatggtaacttccgggcccgatcgaacggatatgaaaagcccggatactattcgagccgccgatataaaattgctcactgtaaggcattactttcgaattaccgtaagcataaccgatccctcccataatccgcatggccaattgattattattatccacagtcttataaccgattaattcagaagtaagcttcaaaaattgagaataacgattattgagaatttgtttgccctccccctgatgattcccgcagatatactgcaggcccgctataatattaccggcctgagtgaccgaagtctgccagaacaaccggttgggattacgataagtcgcagcccggtcgtacgtataggtataagacatcgacggaataaactgattcttaaaactctgcgccactgcgggatttttatttacaacagaatcgaaggcatgagaagtacgcaacagataggtataattgagtttaaaaggtacgacggaatgataattccgggtagaagaattaaaatcataggtcgcacttccccaaaacgagatcatcctaaaaaaattatgtcggttgagcaaatccgtaccgatctgaaaatgggtctgttctctcctatcccgtttcgttttcatcagtttgggaaccaataaccggggcacggacaaattaaaattcaaccccagctcataagaattgatcaagcccgaattgcctgtcgattttttatttcctccgatttgccattcgtaggatcctgtcaaccggacactgaaattctctgcccggcggaacatattccggttagtaatccctaatgtcaatcccggaccgagcagattattcgacttggaagacatatccacctccacttccgtttcaatgggcagggcaaaatcgccgttgatttgcatatccagcaagcgatcctgaaccgtatcgggcacggtaatcgtcatattggcgaacttaaatacgcccaactgtacaaatccggcttgtgtacgactctgtcgcatagccgaataagtttgtccgggtcgcgtcttcaccgcccgggtgatcacattcggtttcagccgtagcggaggctcataaatgattttcacctgatccgcctgtatcgtgtcttgcccgccggtcgtttcatttcccgacagcatcactttcacctcaccgattttataaggatgaaaagcattttgcggaattccctgcttcaatccgattcgtacgtcggccatttttccaccttgagtggtatcgactaaaaattcgatataatcgggttggaagaaataataaccgtgatttctcaaccgatcggacatgcgttgccgctcctgattgaggacattcacatcgtattgccttcccggtttcagttcggagaaccgcatatacgagcgcacgatactatccatcggaggattccatccccacaactgtacattaccgtaatgaaaaggctgaggcaaatcgacccaatagctgatgcgggcttttttaggattccgtttatgcggaataatctcgtagcgggaagtcgtcccataaaaaccgaagtctttcatggcattatccaccattttcaaccgtaattcgggctgtacatctgaaatcaacaccggtttcttagccaatttacgatataaccaccatttaaaacctttctctttttttatattccaattatatatccacagcccgatcgggaaaggcgaacggacataaggagaatacagcggattattgggtttcacagacagcggaccggaagcggctgaattttgtgtactgttgagtttcactttctgaggggcctcgatcttcattttttttactccgacatacaatacttcatcttctgtcagttttttagtcgtcgaacaagaaaaaagaaggaaaaggaaaaagattaaaggtaaaaagtaagaagaagaaaaggtcagggtactacaaataggacaaaagtgactgaaccgacttttgtcagacttccgggcatactttctgatgaattcgattactttcatttctgattctccgtttttgtttctctttccgattttcggttatttttaaagagatctttaaatttacggaaatttttccgccaaacaataccgacacccgtttgagtgacttcgccgtccagtacactctcatagttggaatgccggaacactttcaaaaatagatttctcttcttcgtaatcacgtattctatagaaatatcgtcgacgagattatcttctatgttattactctgattttcattattatctgtagaaatccgtccaccgatcttcacccgaatccgatcattaaaaaattgtttggagaactgatacgtataatcggtacgggttgtattttcatcggtattatacgaatcgacgccaaaagtaaaaccggtcttccgggtatacttattcaattcattttctaccaggctatataaagcattgttggccatacttcctccgcttcccgacttagcagccccaggagcggtataagtattatagatcaatagattcaacgcttgacgggtacgttcttcctgagaaaaagtcgccaactgattctgtaccaccatatcgttgggagctgacaggtcaaaagagatatccggtcgggtcaatgtattctgtatccggatgatagcctcgaaagtaaccagtcgattctgttctccgtcgacaaccgtagctttcacctgttcggaagcggatatactcaacatcggattcatcacatttcctgtccattccacatagctgccactgcgaatattaaattcttttttacctgcaatgggaatattataaaccacggttcctccggataaaatatatttccccgacaaggtaagtccgttttcaggactcatggccagaaccagattacccccaccctggatgacgatattattacttccatcatccgataattcgacgtttaccgtcacctgatctccgatctcgatcaacatttttaaagcaaagctactggtgtttacccggttagtcagatcgtcacgctcattcaaggtggtatccctgaacgatacgaaacggaccaaatcggcactacggtccacaagttcgggtccggaactacgcaaagtataggtaatattggtccggttgagcaaattgatatttccggaaacgcttaaattcgaaaaggccccggccaaacgggaatccagattgatataagccttcccatagatcagcgaagtcggatttttctttacattcacgacctcgaaattaccggcttttacagatatatccatattcatccggtcgaacggagtcagggtaatcgctccgttcagcaccatatcacttttgttaggagcaataaaccgatattgccgaaataaaatcttcccgttgtctacaatcaggcgggtggtatccaatccgaatgtggtacccaacatcaccacatcggcttttccattacgaaagcccaatccaccgttcaaatccggccggtctaccgttccacgaaactgtaatgcgccggtcaactcgccctccagtttcatcagatctttcggaacaaaagcgttgaccatatacaaaggtaaagaaggtatatctacgtccagcatgacctcccggttggtctcggatgtagcgaaagtcccctgcactaccgcccggcggatgctgtcgattttcaactcgaaatctacggcatgatcggttaaatgatcctttcctgcatactgcagatccaaatcgagggtacccatccgctgttcttcataaaacagattattcactccgatatttccctcggcaccgaaggttttacgatcggtatacaacaataaatccgtatgcaggataccgctcagatcgggtaagaacggtgatatttcggtcaattttttcaggtctataccggtaatctccacctgtaaccgatccgtcctttctccttcatcaggcagagactgcaaactcaccaatttattctggtaggccatccggagattggcatcgatcttccaatctttataaaccgttactttattatcggcattgacaatccaccggctataccccagaataggagtcatcgggaaaaagctcaccgtaaaagcactgtccagcatcaccagattgatacccatatcgaatccgactcgttgccgggcatctttttgtttcagttcgatccggaattgattcccctgcatttttccggtcaggttgatattgaacagtcccttccaggcctggtcggaactaccggctcccaatgcatacaccagactcttgccggtctgccagatacccatctgtaccgaatcgagacgtaccgtcccaaaatagggagccgtagccgtgatccccatccggatacctgaccgctgacgggaaacgatatccagagaaagccgacgaaatcccatattcctggccttcaaaaatttagcgatcgcattattttgatcacctttcaagtgcatactaaaaacaggcaactccgctttgatctgttccatatcgatatctttaccggcgatctgcttcccgacaatccctgcaattttcccagcactctccccaaaaccggccaaagaagtatcggcccggaaagttaactgtaaatcaccggtctttacatccagtgtcgtcttcttcagatcgctggccatatcgatatccaggcttcccaaggtataagtcttcctgctatctgccatgctcaggctatcgaagcgggcttttaaagcataagcggaatgttccccgataaaaccttgcaaatctactttcagccccatagtcaaaggttcctgcatcaaatgcagggcctgcagatccaccttgccgatataaccacccaaaccgacctgatactgttgttgcagcgaatctccccggaaaaccaaatccaaaggagcatcgggatctttactaaccatagtcccccgtaaatgcgtcttatccaaggtagcctgtaaagtaatatctttatattcgtgctctttataaaacaactgacggattccggcatttaccgaggtctttgcctgaggccacgaaaaataccggccttccaaccggaaattggccgaggcgcttcctaacgaatcgacagtcaaaaagcgatcgagtgggaaacggctcagggtcaattcgccgttatatgtctcccggttcaaatcataactcccgtcgagggtcatacaaccagcagcggaacacaagcgcaccaaagcctccaaagctccctgattagccttcagattcgccgaccaggatacatcggccgggatcttcacgattccttcttttaagaaaacattagcaaaggtagcgtccggcatctccgcccgcaaatcgatcaccccacttatttttttcaggtcccggtaggattgcagttgtccttttccagtcaaccggaattttccggtcataccggcatccaggcggtcgaaccggactctgttttcatctatactgaaagtcgtattcaaatctacctgactatgttttaagtcctgagggattccgtcataaaagggagtaagatcggccagcccaaccctggcattcagctgaacgatcaagggtacccgtttcatcagattattcatcgaagtatcggcccgggctgtcaactcgatcttgctatgagcggtgcggataaatgcccccctcaatgctgtccgggccgaatcgagatccacctgtgcctgcatctgttgcagctgtattccgttttgctgtacagccctcagatctaccaggtttccccgcacaaccgttccccggttatatacactgtcgatttgtacggcaataccggacagcaccaaatcggtttgcccggcatcggcagtcttcatactaaaggcactgttctccaattgtaatctccctgcacgtatcagccaaggctggctaccggacggttcggtgaccggtgtcccggacgattgttccgttcccatctgcatgtcacaccaagcccctccgacagcgacaacatctatttcgacggattgccccctcaacaaaacttttccgccagtcagcgaaccgtcctttattccggcccccaggtaaggcaacccctcggtatacatgcgataaccgacgtcccggatctttatctgcctgacttcgatcccccaatccaaaggattactctgcactgtatcttccactgttccggctccggatttcaaaaaaacatccccttcttccaggctaatctcagcgactatcaattttttccgttccaaatcgatccgtccctcctgcacccccaaattcccgacagccaccttcagttgcataccggtagtatcgccggctaatccgaacttcacctgtctcagacctaactgttcgataccgagttctttacgaaatatccgatcgatattcaccctaagccggatcgcctctgcagcaaccagggtatctccggcagttttcccggcatacacatcgtccaaaaccagatcaaaaggaaaacccaaacggaaatgcccgatccggacttccaagtcgtaatgcgaagcagcataacgttcggctttgcgcaaaaggaaatcttgtacaggaggtaaataaagcaaaaacacgataagcagtagcaaccctaaaattgctaaaatcgttctgcccagatatttaaaaaatcttttcatgcttaagctttattcttcgcaattaccattatccagatcgtaaaaaagcgctgcaaggcctgcctcctgctattccgtaaagtctttaattaacgaaaaaagatccttacgggttgcacgaaccgatcaacattgtttcggcttcggcaatcgcctgaggagtccctaaatctaaaaaacgtccttcgtaaaaatacatcagtatcgggtgaagcctggcctgtgacagatattcgtctataatcgaaaagcccccttttcctgacatacgttctaaaaattccgggctcaccacctgcactccacagaaagcatagttccgggaatcccaaaattcttcatctaccggtttttgttcccctgtggccttattttcccatcctttcagcatcccttcacgattaaatctcaatcctctgcctttcccgccggtccgggtaaccaaggtcgcatctcccttattttgccgatgaaagcggagcaaggcaggtatatcgatatctgaaaatatatctacattatgaataagcaccgattcacccgggcagaacaactccctggctttcagaagtccgcccccggtatcgagtaatttctcccgttcatcggaaatcacgatatcccaatcgaaaaaatgtcgttcgcacagaaaagcttctatctggtcggcatagtgatgcacgttcaccacaatacgctgtacatccgccgctatcattttccgtatgacatattcaagcaaaggcttaccggctacttccaccaatgctttgggccgatcgttcgtcaaaggctgcaaacgggtacccaatcccgctgcaaatatcattccgttcatctaaatatttatcatcttatttttaattgcatacatgacaagcgcagcagtattccggcatccggtcttactcaacagattcgcccgatgtttatccactgtccgcttactgataaaaagtttatctgcaatttcctggttggaaagtcccaggcatacatgatacaaaatctcgagttctctctcggatatttcattatcaggggtttcaggttccggtttatgttgcccgccatcacgcatattattgagaatattcaccagcaactcctcggaaaagtaattctcaccggcggcgacagcccggattgccgcaatcactttttctataccggaatttttgagaacgaacccctttactccgacatcgaccattttatagtaatactgttcatccccgtacatagacaacacgatcaccttcaaatccggcctgatccgcagagcctgttccgtagcttctatcccgttcatctcgggcatttctatatccatcaacaccaggtcacaatctacaaaggagaggttttcaataaagtcgcgtccattggaagcttcgtaaatatggtgtacgaaatcctgggtagacaaaagcaatttcaatccttccctgaataacttatgatcgtcaacaatatagattcttaattttttcaaattctttgtgtccatgaatcgataaacatttacatccgtaactgataaacaaagataaaaataaagtcagaaagtcaaaagactttaataaaagcgttggcccgcatcccttttccatgctcgctgacaatctcgatatccccgttaccggattgcagccggtaacgcatgttatccaatcccataccggtatgtccggaaatacggtttacatcgaatccgataccgttgtcggtatattctaaatataatattccttcttcgagttgtaaatcgatcgtcactttcgaggctgcagcatgccgcaatgtgttgttgatcaactcgcagataacacggtagaccaccacttcgatattataattgaaacgttgattttcgagattagtagtaaaatacaccttaaaattatcggcttgccgcatccgttttatgaatgcctctaccgcatcttttaagccaaaattgttgaggatatgcgggctgatattggccgagatgtccctgaccccgctaatcgcttcatccacagcctgccgcaaattctgctttatcttttcgttgacttcactttctttattggtatccaaccccgagaccagcattttgatcacactcagcaaaggtcccagcccatcgtgcagctctttcgcaaaacgctgccgttcttgctcttccgtgcggataaccgctgccagtacccgtttctctgattcgcgccggatctcatccactcttcgcataaattgaaaaattttccggatataaaatactccgatcaggaggaccaaagcaatgataaaagccagaaccttctgtacaatagccaattcatcttccatttcgggataaatcgtaggccataaatcgaagaccctcgacaccaccatcaacaaaaatccgatggaaatcagaatccaggaagcattgaattttgtccgcttaaacaagctaatggcaataacggcagcagcaacctgtaaaaaaagcgaaacataaacgagaatagtggacaacatagtaagttcattaaaattaaaacggatatccgatagctatattaaatacagatttattaaaacctccattacgattcaacaacacaaaacgttgcccttcggcctgcatcggatcatgtaatttcaaaccaagatcaaaacgcaacagaaagaaattgacatccaaccgtagtccggcccctgttccgactgcgatttgtttataaaatccggaggacaacttcgtaccctgacgattctcataccgattgatattccagatatttccggcatcgatgaataaagctccttctaataaccagaataatttaaaccgatattccacattggcttccaacttaaagtcccctacattattcggatatttatccggcggagcataagatcccggtcccaaagttctcgcctgccaggcccggatatcgttggcacctccgcaataataagcctcttcaaaaggcaaagccttcatgttaccgtagggataaccacaacccagaaacaaccggtagacgaccgaattggctttattcaggtaatgattgaaccgatattcaccgtcggctttgataaattgggcataccggacacccagaattttataaaaacgttcttcctcggaaccggattttctggcccctaaaagtttatccatagccaaaagaaaattcccggaagtctccagattaccccggaaataattaaaactttgtgcagaattgaccacctggtcggtaaacacagccgaaaaattcgccgacagaatcatatggttggtataggcacttttgatatattcatttttcaattcactgataaaactcgaatcgacactcggcatcagcacataattcagatcgatgagatcgaaattataccgccatttattatctgcccgccgccaaaggtaaccgaacttagcactagctacacggcgtttgtaaaactgtgtattttcctgactgaaggagagagagatcgaagttttaggagcaaaattacggcggaattcatccatacgaaaaaccggcatccaaaattgaggtgtcactaacttcaattccgtaccgacttcggtggtactgaaaatttcattttccttcaatttctctttttttaaagccccccatacactcaaggtcagattctcccccccatgaaacaaattgcgatgattataagcaaagttacctccgaccccgatattcccggaattgttggtcccttcgagaaagacattataagactgccgtttgagcggagtaagctgcacttcacaaaacaacaccggctcaccgtcttccttttgctcttcccggaaaataatattgataaatttaaacagattcaaggcttgcaggcgggaataggaatcagccactttacggacatcataaaattctccttccttgaactggatcgtttcctggatcaccttcggcttaatcttcatatggccacgataaacaatcccatattcaccgtaacgggtatgccggtaaagcgaatcgagtccattggccatcagcaggggatcataatccaaatttacctgaatgtgctttattttatatttgcggtaagccatactgtcggacacactgttgacgatgctcagcaaaagatgagcctgttccggattaccgctccgcgaggtatcggcataataatgaataaaattctttgaaaaattataatacccgttttgccggagcatatgagtgatccgttcccgttcatcttccaatatctctatatccatcggcatttcctgatgcaacaaagtgtgattggtatcccgcaaaaccaattgtactaacggagagctttcgggtaatcctccggcccggaaactactgtcttcccggaaagtaaaatctttcacccgagtcagcggaccgggataaatccggtacacaacatgagcctttttctttttaaaccaaacggaatccgtcacctcagctttataaaaacctttattgttcaggtacaatttcaactgggtcacacttctgtcggtcaggaaaggactataaatcacaggagcttcaccgatggaacgcaaccatttgttaaagcgcttattctcattcttcccactcaggttataaagtcccagatgaaaacgagccactcccaatatccgcgtattaggacgttgccgcaccgtttttttcaattcagaaaaattcacccctttctcttctaccctcactttcaccttattcaacagatattcatctttccccacataacgggtaggcgaacacgataccatgaccagcataaagcccgtcaataacaaaattccccctcgctttttcagtaagctgatgaacggttggctgataaaatattccgaaacaatcttatatggaacccacttctccaaatctcaaaaaatgttactacttttgcacagcttctgaattgctctttattcaggattaaaaccacgctaaaaccgatgtagaggcacaaaccatgttaagcaaacaggtaacaaaaatagtccaaaaccttgaaaaaaagaaattcagggaaaaatataatctctttaaaatcgaaggggaaaaactggtcggagaactgttgcattctcccctgaaaatccattccctgatcgctttcccgtcttggctcgaacaaaacaaaaaagcgttgtcaaacgtaaatatcattgaagccgatgaacgggaaatgcatgggatatccaacttccaatctttacccgaagtcatcgcactggccgaaatacctgtccatatctatcggaaggaagaggttctcgattctttatccctggtattgaacgggatacaagatccgggtaatttgggtaccatcctccggttggcagactggttcggaatcggaaacatattctgtgatgccgattgtgccggtgtttataatcccaaatgtgtacaagccagcatgggggccatcttcagggtcaagacgttctatacggatctccctgttttattgagcgaactgaagcaagaaggccttcctgtctttggcacgtttttagatgggaaaaatatttatacgacagcattaagtacccggggcctgatcgtcatggggaacgaaggaaaaggaatttcagcagaaatagaagcgctgaccggacagaaactaacgattccgagtttcgcccggaatagcgaatcgaccgaatcgctgaacgtcggagtagctaccggtattattctgtcggaattcaagagaaggatgtaatcagcaatttaaaataaaacgaaatgaaaaagatttttacgttattatgcatctgttgcctgggtttcggagcgatggcccaattaccgatcaatctgggtgttcacggcgggatttccagtaaccggataaaattcaaagatatcccccaggctatcgggacacaagccaatactggctatatggtcggcgcatttatgcgcgtcaatctgggaaaactctatctggaacctgctttaaactattcgcataagagaagtgtgatagaagaaaaggcacaggcactaggagaaaatcctgacaacttcgatctgaaactcaacacgttcgatattccgattatgttgggtttccaagtattggatttatctatcgttaaactacgggccttcctcggaccggtactttccgtcgggaaagtaaaaaacctgaaaaaactaggagatatcagtaccgataaaaccaactggcacggtaaagtcggcgtcggggtagatgtctggaaactgaccttcgatatcgattatgaaaaagcattcaaaaatttaggtcatgaactgaaagctccccggtcgttcaatttcaccctgggactaaagattatttaagaccacatttaaaaatagcccactgcccgtccctgtgggctatttaaaacgttagcacattttttccccggcattcatttgttttttcaaaatatttcctattcctttgtttcgtcaattcaatccttaagaaagattgtttgaattataaagaggagttgagagactgggctctatgaaactccgacaacctccggaactttccgaaaggtgccaaaacccggcctgataacaggagttataatttaaaacaaaagtaagatgaaaaaagcagattatttaacccacatcaccgaccggagaaaccggaatctcaaattcttctctctttttgtatcttctatggacatgcgctgcatgcgctgatcttttataccccctattccgatttaccggcttacgatattaccaggcagtagttggcaagccccgttaataaacattcggtttaatgtttattttatagtggtatagtcgaatccgaactatatcctgaccaatttaaagggtaaacgccccagacatgaaacgctcattaaaaaacgacaaaatgaaaacttacgcagaaatcaatgaaaagataaaaaaagggactgccgtagtactgacagccgaagaagtatccgaattatccaagacattatcacccaaagaaattgcagaaaaagtagacgtagtaaccaccgccactttcggagcgatgtgttcttcgggtgcatttttgaatttcggtcattccaatcccccaatccggatggagaagatcgaattgaacggcatccgggttagtggtggactggcagcggtagatacttatgtcggcgctacagattgtaacccatcctctccggcttatggcggagcccatatcatcgaagacctggtcaatggtaaagacattacactggaagcctggggaaaagggacggattgttatccccgcaaacatataaaagctattatcaacaagaattgcatcaatgaagctatcttatacaatccgcgaaattgttaccaaaattataatgtagcgaccaacaccaccgatcagatcaaatatacctacatgggtacgctgcttcctaagatgaggaatgcctcttacagttctgccggtgagctatcgcccttgcttaacgatccggaatgccggaccatcgggttgggaactcatattttcctttgcggtacagacggttatgtcacctggaacggcactcagttcaacacttccaaagcggtaaatgaacacgatattcccactagtaatgcccgtacgatagctgttgtgggtgacttgaaaaacatgagcacccaatacctccggggggcctatatcgaaaaatacggtatcaccttatatgtcggaatcggaattcctatccctattctggacgaggatctggcgaaaagggtgtctatccggaatgaacaaatcgaaacgactgtcgtcgattatgggaatggcaatcaaattctgggaaaaacgaattatgccgctctacaaagtggtgctatcgaaatcaatggccataaagtaagaacagcgcccctttccagtctggccaaagcccgggaaatcgcagatttactgaaaagctggattcagaaaggtgaatttttactcaccgaaccggtacggccaatgcctgtacaagccagcctgaacggattgaaagccattgaagattaaaatttaaaaccttgtcaattagaaacatcatgataaagaaagttgtattatccttcccggtagatgctaccgacagatcgctgacctatgacctggtcaaattatacgatatccggatcaatatactgaaagccgaaatacaagccgggaaatccggtaatctattagtcgaactcgaagccgataccgacaaactggaccagggtatcgcctatttaatcgaaaacggagttacggtaagtccggtatccagtaaagtatcgtatgacgcgagcctctgtatcgattgtggcaactgtgtatcggcctgcttttcccacgcgttgaccataggggctccggattggaaactgcatttcaatccggaaaaatgtattgcctgcaaattatgtttgaaagcttgtcctctcaaactattccggatcgaatttgccgaagcctgaatttaccctatgccgtatggaatatatcgatcgcacctatcgcaagcatttccgccaggatcgctggagctattttaccatagcttataaagaaaccgatctgtgtatcggcgtggaccggggttcctggcaaccggaaataccggtctgtgcagaacgatttgtccgggaattacggacggatatggaccgctggatcggttcacacccggattatgcccaggctttaaccccctttcaggcaagcggggatgctcccggcatattcaaagagatgtcgcgggtaacccaaacaagcggtatcggcccgatgagtgccgtagccggcgccgtcgctctgaaagtaggggaaaacctgaaaaaacgattcggtataaaagaagtgatcgtcgaaaacggaggggatatttatgccgacctctgtcaggatatggatatttcggtatttgccggttcttcccccttgtctgaaaaggtcggtttgcatatcgaggcagcctatgcccccctcgggatttgtacctcttccggaaccgtcggtccgtcactcagcttcggtaaagccgatgcagtgatgattgtctgttcagacgtaatgctggccgacacttatgcaaccgctttcgccaacacgattcagacagcggaggatgttcagacctgcatcgaaaaaatcagggagcaggaagacatactggccgccattgcgatcaaagacgataaattaggtatatgcggtaattttgaactcaaacttttttgaattgaacgaacgtacaactatgatacaagacgaaatcaagaagcggattctgatcctcgacggagccatgggaacagctatccagcaatacggtctgacagaagccgattttcgcggtagtgaatttatctcccatccggtaaacctgaaaggcaacaacgatatcctgaacctgacctgtcccgaagtgatccggcagattcatcggtcgtatatcgaagcaggagccgatattatcgaaaccaatactttcaactcgaacgccatctcacaagccgaatatcggggagaaaagctcgtataccgcttaaactacgcgggggcgaaattagctgtaacggaagcccgtgcagcttcacaccaggtatatgtagccggcagtatgggaccgacttccaagacattatcactatcaccggatgtcaaccggccggaattccgtccagtggacttcgataccctggtctcgacttatgcagagcaggtaagcggattaatcgacggcggagtagatctcttgttagtggaaaccgttttcgacggtctgaatgcaaaagcagccctttatgccattacccaggtacaggaagaaaaaaggacttcactccctgtcatgttatcggccaccatcaacgacagaagtgggcggacgctcaccggacagagcctggaagcactttacaccactgtatcccattacccgctgttcagtttcggattgaattgttcgttcggggccaccgacttattgccgtttatcgaacgcttatccaagacgctgccttgtccgttgagtatttatcctaatgcaggtcttcccaacgaaatgggagaatatgatgaaagcccggagctaacggcttcctgcctgaaacagatggccacagcaggtttactcaatatcgcgggagggtgttgcggtactactccggagcacatccgggccatacgtgaagcccttcaagccatttctccccgacagattccggctatcccggcccagcttgtggtaagtggtctggacaaggtcgtagtcgataaagcccaaaataacttcatcaatgtcggtgaacggaccaatgttgccggttccgctaaatttgccaaactcatccacgccaaagcttatgaagaagctgcccggatcgcccggaaacaaatcgaggacggggcatcggttatcgatatcaacatggacgatgccatgctcgacagtgctctcgaaatgtccactttcgtccgttatatcagcaatgaccccgatattgcccgggcagccctgatgatcgattcttcggattggaataccattttagcaggactcaaaaatgcccaggggaaatgtatcgtcaattcgatcagcctgaaagaaggagaggatctgtttctggcaaaagcccgggaaatacatcatttgggagctgctgtcgtcgttatggctttcgacgaacagggacaagccgtcacttatgaacgtaaaatcgaaatctgtgagcgggcttaccggctcttaacccggcaagccggtttccgtgcggaagacatcattttcgacgtcaatattctggctatcggaacaggcctggaagagcacaataattacgccgtcgatttcatccgggcaatagcctggatcaaggccaacctgccgggatgccgtacttccggcggaatctccaatctctcgttttctttccggggaaataacccggtacgcgaagccatgcactccgtatttctctaccatgcgatcgaggcaggcatggatatgggcatcgtcaatccggccatgttacaggtatacgatgagatagaacctcaattactggaagcagtagaagaggtggtattgaacaaacacccggaagccacggaacgcctgatcgaactggccgaacaaatcaagggacagaaaaccgcagacggaaaggctataaaaaatgaagaatggcgcacccgtacgttatccgaacgcctgaatttcgctctgatcaaaggtaatacggaatatctggaagccgatctggccgaagcgctgaccgtttatgcctctcccgtcgaaatcatcgaaggtcccctgatgcaggggatggataaagtggggacactattcggtgaaggaaaaatgtttttaccccaagtggtaaaatcggcgaaagcgatgaaagcagctgtcgcaattttacaaccggagatcgaaaaacacaacgccggtacgggagaaaatattcagcgccctaaagttgtccttgcgactgccaaaggagatgtacacgatatcggtaaaaacatcgtcagtatcgtattgacctgcaacaatttcgatgtcatcgacctgggggtgatggtcgataaccaaaaaatcgttgccgcagccaaagcccatcaggcagacctgatcggagtcagcggactcatcactccttccttgagcgaaatggaagctttgtgtgagttactacagaaagagcagctccggattccgcttatcgtaggcggagcgaccacttcaaccgtacataccgctgtaaaactggccccccgatacgattatggcgtcatccaggggggagatgcctcccggactgcagggatcatgaaacggctactatccgaccggtcgtcctacctcgcacaagtgaaagcagaacaggaaaaaatacgcgggcaatattatcataaacaggaccgtttgcttccctatacagaagctcaggccctggctcctgtctttgaccgggaaagctaccggttgcctgccagtttcggggaacacaatctgttgggaaaaaatatggacttgcaggacctgatcgctaaaatcgattggactccatttttccatttctggggattcaaaggtaaattcccggaaatcattcatcagcatgaagaagccgaccgtacttaccaggccgcactggaaatgttgggcaccgttattgccggcaatgaattcgaagcttcgatcgtggtcaacttcttcgatgcctatgcagaagatgacgaaatcgtattggataacggtcaccgtctccccatgttgcgtcaacaaaaagcggggcaagaatgcctgagtttatccgattatatctgtcccaaggcttacggaacttccaccatcgggttatttgctctgaaagtcgccgacaaacagggcggttgtgactgccacgacttcagccatctgctgcgtgaaagcttatgtgcccggttaaccgaagctttggccgaatggatgcaggaacaattgagtgaaggtttgtccctgatccgcccggccttcggctattcggcctgtccggatcattcactgaaaaaagatgtcttcgacctattggatgcaccgtctaaaatcggggtttccctgaccacgtcttatgcgatctatccgacgacaagtctttgtggtatgctcatcgcacatccggctgcccgttatttcagcattggaaaaatcggtgcagaccagttgacggactattgcacgaagcgggcgatcaccctggaagaaggaaaaagattattaggattataaaaccgggcaagcctatgcccataaccagtacatcatgactaaagtaatcgatattatcaatcagaaaaaggcacctttcgcttcgttcgaactggtgcctccattgaaaggaagcgatatcaacaaactatacggagccatagaacctctgatggaattcgcccctcccttcatcaatatcacctttcaccgggatgaagtggaattccgccaaacggccgacggtacctttgaaaaagtgaccatcaccaaacggccgggatcggtagccattgcagcagcgataatgaaacggtttcctgtagaagtcgtcccccatctgatctgcggaggagccagtaaacatcagatcgagaacgacctgatcgacctgaacttcctggatattcagaatgtagtcgctttacgcggagatgctatccccggccaaaaatatttcgttcccgaacccgacggccaccgttacagttgcgaactggtggaacaaatccacaatatgaaccggggaatttacctggacgaatgtctgaaaaatgccgtacctactaatttttgtatcggtgtcgccgcttatcccgaaaaacattatgaagccccgaatatagacatcgatatcgaaaatctgaaacgcaaagtagatgcaggagccgattatatcgttactcaaatgtttttcgacaatacccggttttatgaatttgcagccaaatgccgggccgccggtattactgttccgatcatccccggcctgaaacccatctcgacgcaaacccacatcgaaatgctcccccgggctttcagtatcgacctgccccaggaactgatgaacgaagtccggaaatgtaaagacaataaagccatctatcaggtaggcatcgaatggtgtacagcccaaagcaaggatttattagtccacggtgccccggctatccactattataccatgggaaaagccgacaacatccgggagattttaaaacgtactttttaaatagttacaaaagtaa

SEQ ID NO: 5795 - DNA, 959 bp, Unknown
  gut microbiota DNA sequence
ttgataaaagctacatctttcagaaaaccctcattgtgcagattccaacccaaacctgccgaccagaagggcgcccaccgtttatcggcaccgaaacgcgaagaagcatcctcacggaaagaaagatccaacaaataccgttcgtcatagctgtaattcaaatttcctaaaaaacccaccagacgggatgtatactcatcccccgaaggcgcaccgtctttttcatactggattgcaaaactgatataatccaggttctcattggggaaaccttcggtttttaccgtaaactcccgggttacgttttcttgtaagttccatccgagattggcattaaccacgtgtttgtcaagctgccagaaataggtcagcactgcactggcatcatagctgaaattctctccgcgcgatccgatgtaagctcctctccggtcaaaatcctcatcgctataatctgcgaaatccgtatgtcgggcaggtttgaaattgtctacataggtattctgatgggtgaaagaaaaactgcctttcaaccgcaagccctctataatagtccaatccactccgaaattattagtcacatcattgtatttttcctcatctaccgtattcagcgtggtattatacaacggattataaaacgtctttcctaatccgccaccgccgacaggaatataccggtccacctcgtaaatataattcccatcatcatctttataccgtacatacggattccgttgggtataagtactgaacgagccgtaaggggaattaaccgccttcacgttagaataggtcagggtattacggaatgtcaaattcttatagatatactgtaactccatccccaaggccaaacgccgccgccccgactctttcattactcccggcgtattactatagttcacttccaaaccgtaacggatattatcgttaccgccatccagacgcagggtgtg

SEQ ID NO: 5796 - DNA, 33916 bp, Unknown
  gut microbiota DNA sequence
tgtttattattcttaaatatagcaccgacagattttataaactcaatataaaacagctatctgaacagacaattacaacagaaataacaaaaccgaatcttttaacttttcacgcaaatacttgaatccccggttcttttgggtttttaccgtattaatactgattccgagcagatcggcaatctcatttcccgaatgtccctgaatactcatcaaaagtattttttttctttcttcgggcagatcttctatatagacatagagttggcggatcaattcttcccgtacggttaaagcgaattgttcgtcgggtaattcaacctcctccgctaccatcttacgtaaaatattctgacgggaagcctgggtacgaagatagaacagggcattgttgtaggtcgagcgatataaataccaggtcaattctttgatatccggaaaggtccggtcggaattccagatcctgatcaaagtatcctgaacgatatcctgagccgtatcggaatcttttacaataccatcggcatatgaacaaagggctgcataataagaggcatacagcgtttcccacgcttttaaatccttttgatttacccctcttaatatttcctgttcatttagcgccatccactttctttctgtttgtttccgaaaacaaaaataaaggatatttataaatataattaaaacaagggattattttatagaaaacattttttctgtcccccattttcggcagcccaaccggttattggtgctcttttttcattaattcgttaaaacaatgccggcatatcggttcataatcgtgcttttctcccagcatcaccaatttatcattatccgacagacgatgggaatgatgggccaaattcccgcaacggacacagatcgcatgtactttcgtcacatattcggccacagccatcaaatcaggcatcggcccgaaaggtttaccggtataatccatatccagcccagcgactattacgcggataccgttatctgccaatgttttacataccgacactatattagaatcaaaaaattgggcttcatcgattccgacgacatcgacatctccggtcaataacaaaatattacccgaattttccaccggcgtacaacgaatcgtattcgcgtcatgcgataccacatcttcatccgaataacgcacatcgattttcggtttaaatatttccaccttttgccgggcaaactgtgcccgcttcaaccgccggatcaactcttccgtcttaccggaaaacatagaaccgcaaaccacctctatccaaccggcccgattagtactctccaaaaacatccctgattcatttttagtcgtgcaaaagtataaaattaagggattccgggacggttctttctgtcaaaatttaccggcatctgctaagttgccggaataggggaatttataaagccaatggttccaacggatgctttttacggtcgctgaaacgaacgatcgggaaggacggtttagcgaacaaaagggatttagaagtttctgacttttcagacgaaataaaaagttacaaaggttacaaagatggctcaacctctgccccctcgtaactcttgtaacctttttaactttaataactgaaaaaagaacgatcagcttacagccattttaccaaagcaaagtcctggcgatggggcagtaattcgcttttcgggtagatacggatggccagcatcagcaatcccggagagtcggcagtcacatcgatgcggtatctggccacactacccacttgttcaacagggataaaatcgtgtttttcgcggataacctggcgtccgtctttctgttcggcagccaccaattcaactcccacttcatgcatactgagttcgccgatctcgagtttcacctctccgtaataagatttccccaaagcgatgatctgtttggaacgattgggcaggtccaatccgactaactcgatattatcccattcgcgggaaattttctttttccattcggcaatttctgccgccatggcgaaatcattttcgatcatcttctgatagcgggcagacatcggaacataatattgtttttcataatcttccagcatccggttggtcgtaaaattcgaagccaccctggcaatagtatttttgatatagctgatccatttaggtgataatccgttagcatcccgttcgtagaacagaggagcgatctcatcgtcgataatgttatatatcatttcagaatccaattcatcctgcatggcctgattttcgaaagttctttccatcggcagcatccatccggcatctttacgatatccttcgacccaccagccgtcgagcacggagaaatgcataacaccgttcatagcagccttttcgccactggtacccgaagcttcctgaggccgggtcggcgtattcatccagacatcaaccccttgtaccaatttcttggccagatccatatcatagttaggcagaaagatgatcttacccaggaattgcggatatttggatacctcgacaatccgtttgatcaggtcctgtccggctttatcggcaggatgggctttcccggcaaagataaactgcaccggatgtttggggttattgacgatttcatccaggcgttcgaggttacggaacaacaggtgagccctcttgtaggtagcgaaacgccgggcaaaacctatggtcagaatatcgtcccgcaaagtttcacggatctgaatcacctgccggggagtgaaataagaagcagccacctcgtctttcagcaattcttttacatgatcgatcaggcgcttacgcaatttggtacgcacctcatatacgacagcatcgggaacggtatagatttgttcgaaacatttcttatcgtaatgatgattcttaaaatcttcaccgaacaaagattcttctattttcttccattcgggagccgcccaagtcggataatgtaccccgttggtcacataactgatgtgcaactcctcggccatatatcccggccacatgcctttgaaaatctctttactcacttcgccgtgcaaccagctaaccccattcatttcctgagccagattagccgcaaggaagctcatagagaatttctcattcggatcggcgacattgatttttcctaatcccaacagctgttcccaggagattttcagccgatcggcataatgagagatgtaagtacgcagcatattttccgaaaaggcatcatgtcctgcaggtacaggtgtatgagtcgtaaacaaagaagatgcccgcaccacttcgatcgcttcggcaaaagtcaggcgttcctcggtaatatattctttcaatctttccagcccggtgaaagcagcatgtccctcattgcaatggtaagtagaagcttcgatacccagttttcgcaaggcctgaatacctccacacccgagcaaaagttcctgtttcaagcggttttcccaatctccgccatacagatggtgggtgatactccggtcttcgggcaagttatcttcgaaatcggtatccagcagatagagctctatccggccgacatcgaccctccagatccgggcatatacattccgtcccgggaataccagactgatggtttcccaattaccttccttgtcacgtaccggggttacggcgatcttcataaaatcctgagcttcgtattcggcttcctgatcacccatagcagataatttctgtgtgaaataaccataacgatacaataaaccgacagccgtaatcttcgtccctttatcgctggcctctttcaggtagtcaccggccaggattcccaatcctccggaatagatcttcaacgaagtatgcaaaccatactccatactgaagtaagcaaccccattcccggacatatgttctttcgctgccatataggctttaaactgagcatatacttcttcaagtttatgcacgaaaccggcatcattttccagttctttataacgagccagggaaatcgaatccaacaacatgatcggattgtgaccgcaagccctccatttatcgacatcgatcatccggaataattcacgagcaccttcattccaggcccaccaaaggtttttggataattcttccagagcgatcagtttttcgggaatagagcgatggatcatcacactgacccagctgggattattcaccgtgagctgtttttcgatataagataccgattcgttcatattggcaggcaggtctttcaagcgttcgctgacctggttcaaagcgatcgtataagcctgtttataataattgatcagattatcccaaagtgcaatccgggaaacatctttggcattgtcccggtctttctgcatttcagtttctccgacctgtgtataattttttacccattcggcgatagccgtagccacattggacgcatcaccgtcttcgcggtgaataacttctataccgggatgattcatattataatgttctttcacccacagtccgaatccggccaaagtggtcgtaatggtaggcactttaaacgccagactttcgagcggagtgtatccccaaggctcgtaataagacgggaaagcggtcagatccatccccaccagcaaatcatagtaaggcatattgaataccccgtcatctccattcagataactgggaacgaagaagatcttcactttatcttcctcggaattacgcaatttttgtgcccggatacggttcatcaccggatcgttggcactatcgttgagataatgtgtcagataaagatctgtagaggtaacggcctgataaggtaattccaggttatgcagcaattccttgtttgcaccggcatgtccggcaggtaccaaaataaaggccaacacctctttaccgagtccgttgttacgattcaattgtcccatggcatcgataaagacatcgattcctttgtttttaaactcgtaccgtccactgatacccaggatcaaggcgtcttcggctacgggacgccccaaaatcgcctgtgccacctgaagaaatttttctcttccggcctttcgtttgtcttcccattcggcttcggaaggcgtaaagacattctcaaatccattaggagtaaccaggtctacttctttatccagaaaatgagcacattcggtagccgtgatctcactgaccgtagtgaaacaatcggcttgatgtgctgcggtcttctcgagagactgtttggaaatgacattgaaacgacgtgccagttcttcgggtacataatttttcatctcactgtacaggggtagattattcccggctacacaacggcccaacacggtggcatgagtggtaaatacacatcccacctgaggcatcgcacttttcaaatacaataatccggctcccgtcatccattcgtgaaattgggcgataatccgctgccggatagaagaattaaagcgaacgaagctctcgatcactttccctgctgcatatccgaacagggccggttcgatgtaatcccattgaccactaatcgaatcgagtttatatttttcccaaaaagaagcaaaaatttcatctttctgcgtaatgaacgtactgaaatcaaccaggatgacaatcggttttccagccacattccaccgtcctactttaatacgcaagccttcctgggctgctctctgccgccaggacctgaacaaacggggatcgtcgataaattcaggattctgttcggtataacgccagacatcggggccgattaaaatatgactactgctgtattctttttccatattgagggctttggtcgaaatcaccgtatgaattccccccactttattacaaacttcccaacttacttcaaaaaggtaagcgggattcttcaatttattgttatccatattacttttgcgtgtgttaaatgagccccgaaggtacatatttttatccaaaaagttgataatcaaaacctaaaaaatcaaaattcaggaaattcattgttcctgcaatgcctttcctgaatcggtttagttcatgagcgatcaagtttattaagtccccggaccttgcgggcacttttctctacggccgaccggacccgaaagtcccataaagaagacgtccgcaggttctacacactttatgaacttgaagcaacgaaggagtaacctgaagaactttacggactaattataccgatctttttccggcttagcccgaaaagcttatttctttttggtcgtcgttcttgcttttttcttctcactcccggtctttggagtttcttccttcgaagtttccggggcttcgattactttccgggtttctttcggttctttttcttctttcggatgtcttgtcttcttccggtccgtttcttcttctaccctccgtataaaatcgctcagcacattcatataatttataaatgcctcgtaaggagtgtcgtagggagtaaaatattggtgtatcgctccatcagaaaatagcttggtgcacatataatagaaatgatcgctagcctgtaagcaatcgaaatcatgggtaagtaccggatctttgagcgcattgactttatttttcattttataaagctcctcgaaagcttcattctgcaattcatttcccaaccaggcagtgacatcccgttcttcatcggcccatgagatcgggtaagggacatgcaaaggagctaccggttgatgttttgcggcagcctctttaggagtcagaaattcaaaattggtagaagcaaaaatctgtgccggcagagctgctataaaatcgaaaatcccggtatcgcctccctggtgttctcccaaagtttcgtagtccataaaaagattgacaatctctccgtcggcagcattcagccaggaagcatatttatcggcagtcagcggccattgatcccaacctttatcggaaaaacggaaagcgatatcgtcgcttagtctgaaatttttcagcaacagcttcaatttcggattaatcgaattggtatagacataatccgggctcttccaccccaggatatgccgtgctccttcggtcagcatcgttttatatcccatccgggcaaccatctcaccaatctcgtcggaatagatcagttcggtattccggaaagtcaccggtttcaccccgaataattctttcatcagatcagcatgttgtttcacctgttttttaaattcgccttcatccaccagcgaagccaaggaatgggaataagtttcggccaatatttcgacacatccggtagccaccaattctttaaaactatcgataacctcaggggcatattcacggaattgttcgatagccattccggagatagaaaagctcactttaaaattctttccgtatttccgaatcagctccagcatcgtccggttggccggtaaatagcaacggtcggccactttacgggtaatcgtacgattggcaaaatcgtcgtaataatcgctattcttgcctatatcgaaaaaatgatattttcttaaacgtatcggttgatgcacctggaaatacaaacacaacgttttcttatccatagtagtcatattttaattgttattgttttatctttttaattcttcataaatcgtttttaagagatacgctgcattttcccattttaaagtattcacctcattcaagccgtatttagctgcaaattcagctaatgccggatacgccagcaaagcatagatagcatccgccaaggcatcgacatcccaaaaatcaaccttgatcgcatgtttcaacacttcggccactcccgattgtttagagataatcgtaggtacccccgagcgcatcgcttccagcggagaaatcccgaaaggttcggataccgaaggcatcacgtagacatcactgtgggcaaacatcttctgtacatcctgaccacgcaaaaaacctgtaaaatgaaatttcgttgcaatcctcagtttagccacccttcggatcgagcggttcatcatatccccgctacctgccataacaaaacgtacattcggataacgtttcagcactttattcgctgcctcgataaaatattcgggtcctttctgataagtaatccgtcccaggaaggtcacgaccttttcttttacccctctctcgacttccatttcggaatacgactgaaaatcaacggcattatgtaccgtcaccactttatccggattgatcccatagcgggtaatgacgatattccgggttagattactgacggtcaccacccgatcggcttccagcatcccctgccgttccaggttatagaccgtttggttcacattctcaccactacgatcgaattcagtggcatgtacgtgcaccaccagaggttttccggacactcttttagcagcgatacccgcagcataggtcaaccagtcgtgagcatggatcacatcgaactgttgttgtcttgcaatcgtagcagcaaccagagcataacgagccacttcttccatcagattagccccgtatttaccggaaaattgatatttgtttttaaattcaatccgattttcttcgcttccttccagaacacactttttcacctcccgggtaaatgtctcgggatccatatacggcatcagattagagcctacctccataaaatcgatatttttccaatattcctccacatcatggtattggtacaaagactccacatcactggcgttaataattttggcagcactctgatcttcatcaccgctcgctttcggcatgacgaagagcacttcaacaccttgtttagccaatccccgggtcaatcccagacatgcagttcccaatcctccggcaatatgaggtggaaactcccagccaaacatcaatactctagttttcatataattataattaattttttttgcaatcgtgcgaaaccttccttccccttatcgtgtttccctatccgaagttttccacttcattcctctcgtctgcctcttccccatctatcatctgtcatctatcatctttacaaaatttctccagcaaagccatacttctcagaatctcccccacactccaggcttgcgatatacacccattcggagtataaggaggatttccgtcataaatttccccgatagaacaaaccccatacacagtcatatcttcttcgaaattggccaataattcgcgggctgttttcgcaaattttttcccataaagccggaaattagcttcgatataaggtccgagcagccaaggccaaaccgttccctgatggtaagctctgtcccgggttgcctgatctccttcgtaggtgccttcataggccggattcttaggtgccagtgtccgtaagcctttcggtgtcagtaattcgttcttcacgacatcgagcacgccatgtttcatctcgtccgacaacggactatattcgagcgaacaggcgatgacttggttcggacgtacaaaaacattctgtccgcctccattgacaaaatcggccaaatagcctttttcttcattccagaatactttcaggaagctttcttttactttgtcaggcatatctttccactctttcacgaacttattatctccggcctgcccggccagtttcagggtgtagcaaatagcattataccaaagagcattgatttccacctgatagcctccgcgtggagtaaccggtacgccattgacaatggcatccatccaggtcagtgcttttcccggttcgtcggcccagatcagaccgttatccaccatcttcacatattcgttgattccatcccggtaagctttcaaaacggccttcatcttcgccccgtagctcttccagacagcagcatcgtcctgaacggcttctccatactcctgaacggctttaaaaaaccacatcggagcatcgaccgaattgtaggaagcatttttatctttaccgatattcgggaacaaaccgttattcagctgacggatcatcgtgtcgagaacttctttacaagtcctgacatcattcgccgcagccagggtcactcccggcaaagcaataaaggtatcccttccccatcttccgaaccaggggtatcctgccatgatctcggtttcttttcctcttctcacgataaactgggaagccgaatatttcagacaactcacaaagctattacggggagccctgttatccaacaatttctggaatttggttttcaaccgtccggtagacaccgcatcgacagaagcagaaaaaatcacactttcccctttctttatcggaaattcgaaataccccggtacgaacaaatcttccctgaaatcatatccccggttttgttcttctatgtattcgatgttataataccagtcgggagtagcgataaactcgttcttcttgctgatttgcatattcaggtatggaaaaccattatacaatttggagcggatcccgttttcaacttcctgatatttggtattgaccatcatattcgctttcgacaagcaatggatattccggtaagccaggaacggtttcaatctcaacgtcgtatcggaatgggcatccagcaaagtataacggatcaggacctgaggttcgttgtgtaccagaataatctcttttttgagctgtacgcctcccacccggtaagtcagggtaaataccggttcgtactcgaaatcgacaatatatttatgtccccggggttcataattacccggatacttatggatacccaaattaaactcacgtccatgctggatgaccgtctcgtccaggttcgacagcaacacatgattctccccatcgaattcttctataggcaatatcagtaatccgtggtacttccgggtattacatccgataatagtagaagacatatatcctcctgcccggtttgtcgccaacacttcccgcttcagtgaatattccagattcaccaattcatccttattaaatttcaaataagccataataacgtctttatatctattttattttttcattttaaagttttcctcctgcaattgcaggacaacagccgtacgggaaggaatatagagactcaaccagtttcgtccttcccggtaaagggtaaaatgttccagcccgtcgtcgatccggttaaaaccggagaacaactgattgtcggtatccaataccggcaaatattttcccgcttccacctcgaaccgatagtcggagaatgaactttggggattaaaattaaaaacaaacagataagcgcctctccggaaaaccaatatctgtctctcattatctcttacgacaggcagtgggataggtttaaaaaagccgtctttctttgctaaagaaatcatcgctttatcgaattcgttcagaaaacggaaacgcaaatccttgtcgtctaccagactccacagccggcgggcatgttcgtagctccaattatttccttcccgtggaaaatcgatccattcgggatggccgaattcattccccataaaattcaggtatccgtcgccggcagtggctatcgtcatcagccggatcattttatggagcgccatgccccggtcgacccgaaggctatggtcgaaaacactcatcgaagtatagatatccttgtcgaccaaacggaaaaaaatggttttatcccctaccatagcctgatcgtgactttcggcataactgatggtatgctcttccggacgtttgttggtcagttcgtaaaacatatccccgacatgccactcctcatcttttttatcttcgatcaatttgatccaataatccggtactcccatgctcatacgaaaatcgaaacctaatcctccctcgccgacaggcatcgctaaacccggcataccgctcatatcttcggcaatcgtgatcacttccggattcacctcatggatcaacttattggctaaagtcagataggtaatcgcatcttcatcctgattaccgtcgtaataaaatttgtattccgtaaaatcacgccctaaaccatgatcccaatacagcatactggtgatcccatcgaaacggaagccatcgaaatgaaattcttccagccaatatttacaattcgacaacaaaaaaccgatcacttcattttttccataatcgaagcaacgggaattccacaatcgatgttcaccccgttcaccaggataaaaatactggttataatctccggcaaaacaactcaatccttcggcttcattcttgactgcatgagaatgcacaatatccatgatcacaccgataccgtatccatgtgcctcatcgatcagacgtttcaggtcgtcgggtgttccgaatcgggaactgaccgcataaaaattcgatacctgatagccgaaagaaccataatagggatgttcctgaatccccatcagctgaatcatattgtaccccaaatctacaatccggggcaatacataagcccggaattcattaaacgtagacacccggcgattctccatgctcataccgatatgagcttcgtaaatcaaaggatgctcccttcttcctacaccggaataacgccaccggtaaacttgttcgggttgccagacctgcgctgaaaaaattttagtcagatcgtcctgtacaacccggtttacatacccgggaatccgttcacctcctccttcgggccactctacccagaacttgtaatccatcccatgccagagggcttcttcgggtaattccaattcccaaacccctccctccagccggtggaagctaaaattctcccttcgttgccagtcattcgattctccgatcagataaatcgccgtagcatgaggagcccattcccggaatacccaaccttttccaggaagccggtgcaaaccaaaataaagatgattattaaaaatgtcggcaagtctttttttccggttggtaaattccaactctttcagcacactgcgttcatggcgacgccggataacaggaagaaaaggttccagcaaaggatcgttgactgtaatatcaaatttcatttcataccgtttaaaatatttccccgataaaatatgcatacctattcgtccaccacctcatactatcgcacctccactccacacattctattcattaacttcctttcacatctctgaaaatcttgaccaaagtttacgataaaatattattatttcagctattttaccggatacaaacaaacattatacgctctatcagcggaaatgttccggttaacggaggaaaaaagcaattattttttccgattccgaaaagaaatcctcgatcagacgtagctatgttcagttcaattcagcattcgaaagatagcaaggaatccgcatattcacaaatttttatcaatattttaacgacaaaaatttgcaaattacacacttgttacttttagatgacaatttttacacacttctgctaaattattacgacaaattgaggaaaaatataccaaacagagaagtcaaaaaatattttactatttttgcctgtgctcattaagcacatctattatgaatccttttttattaacgacagcttattttccaccgatagcttacttctcttgtcttaaaaaagcagaagtaacgtatatcgagcaatatgaaaacttcggaaaacagagttaccgtaaccgttgtgaaatcatgaccgcaaacggcgtgatcgcattgaccgtcccggtggccaaagccaacagcaaaaccctgataaaggacctgaaaatcgtgtatccgactccctggcaaaaattacacttccggggtatcgaatcggcttacaaaaattctccttattacgaatattatatcgacgatttaatgcctttttttgaaaagcaggagacttatcttttcgaccataacctggccatcttaacgactatactggattttctgaaactgaaacgggacatccggcttacaacggattatatcgcgatcggggacatcaattacagggatctgcgtaacgctatccaccccaaagcttcccatagacaacccggttgtgattatatcccgaaaccttatcgccagactttcagcgaccgttttccatttaccccgaatctgagtattctggatctgcttttttgttgcggaccggaagcgggagaaatgatttgaaaaaaaagagttgtaagagttacagagttaaaagagttacagagttacagagttaaaagagttacagagttacagagttagaagagttgtatgagttaaaagggttcgactttatggccttttaatcgttcaggattcgtttgatgactttcaggttatgggtataacgtttcaagtcttcgttgaaaattccctgatggtcgattttgtccacccgtaccctcccggaagcatggatgatccggttttgttcccaaataattccgacatgagtgatcgctccggtctcgtctccgaagaaagccaggtcaccgggcatcgcttcttcgaggaaggaataattctgtccgagcgtcacctgctgcgaagcatcccgcggcaaatcgattcccgccatccggtaaacaatctgggaaagccccgaacaatcgatcccatagggtgatcgtcctccccaaagataaggcgtattgtaatacatcaaggcataaccgataatcagatccctcagactatcgatgccgacatctttcattttactgaccaaagtataggtatctcctccgatctgcatcttcttggtcgtggcatcgaaaaaaggaaatacactacccgaaaccaccaatttattcccgtaatcaccgtctttcacgactatattaaacacttccgtagccaatacagatacctcggctttgtatttaccgataaattcttcggtgacttcaagatacattttccgatcgatccacccctcgtaacgatcatgcaacatcctgacatatacccatttctcatccacctccagtatttcaaatacctcaccgaaaagaatctgagaaaccatctcactccgttccgatttttcactccgcatgggaactatactcaaatctgctataccgtaagacataggaatactgaattaatatacgattgtgcaaatttacaaaataagtatcaataactgggctgttaaaacgcgtaaaaacatcgttaaaggataaacggtagcatatcccactgccggcatatcatttccggcaacaccattcgaataagccaatgcaggcggatcggtggtactcccggcaatcaatcccatcaaagtgaagtagtttatcttataacaccaacgggcaatactgccgactatcatcaaaggcacgaaggtaatgataaacccatatccgatccatgcaaaaccaccttgattcaccaccgtatccacaaatccgacccctgcatccaaaccgacacaggccagaaacaaagagataccgatttcgcgcaacatcaggttggcactcatcgtcgtataagtaaccaatttataatggggtccgaacttactgatcaaaatagcggtaatcaaaggtcctcctgccaatcccaatttcaccggttgcggaattcccggaaaagtaaaaggtatactccctaacaaaatacccaaagcgatccccagaaaaataggtaccagattgggttcccgcaacctccggagtgaattacccaatattttctctacacttttcacactatcttccgttccgacaaccgtaacccggtcaccgatctgcaattccaaccccggactagccaccaaatccactccggcccggtttacccgggtgatattgacaccgaatcctccgcgtaaatgaagttgagccagcatttttccattgatttccgaacgggtaatcatgatacgtttcgaaaccaacttggaatccagcttctcccactcagaacgatgcatctctattttttcaccgataaaagcgattatcgcatccatatcttgcttggcagcaatgataaataatttatctccggcctgtagatgtgtgcgtgaataagcgatctccaaatcattattctcgtgcaacaccctggaaatcacaaatttcttatcgatcaacgtagcgacggcctccacttctttaccgaacagagccggatttttcacccggacggaaacatgggtcgcccgtgcttctttttcttccagctgactttgggcagattcagtctctttatcgaaagaaatccggaaaatataacgaatcaggatgagtgctgcgataatccccaccacacccaaaggataagccactgcatagcccatagcgatttcggtaccttccttaccggtcatatcgaaataagcctgttgcgcagcccccaggcccggcgtattcgtcaccgccccggagagaatacccaccatcgtagtgacgggcaaaccggtcacgacatataaaacacaggtaattgcaacacccagtacaatcaccaataccgctagtaaattcagggtaagcccgccttttttaaaagaagcgaagaaaccgggtcctacctgtaaaccaactgaataaacaaacaaaatcagtccgaattctttcaggaagtgcaaagcatgcgcatccatccgcattccccaatggctgaaaataataccgacgaacagaatccaggtaattcctaaagaaacacctgctatttttacttttcccagatatatcccgataaagataacgatagctaccaataaaatcgaatgcccgattcccgatccgaaaaataaagtatgtatccactccatatacaaatcatcttaaatttctaagagcctacaaaaatagaaaataatctgcaaaatttcttctttgcaactaaacacatcttttttcgtttaatattttgcaatcgacaatgcttaaagtaatcggtatgacaaacgacttattatatttgcttttacgggcttccatcaatgcctcgctcagtgaccgggatgcttttatcgaaaaggtatccaaaattatcgaacaacagactcataaagatccggaagcagcccgtcggctcagtgatcatatagcaggagctatggaagggctgaacagcactttattattgcgtcagttattcactccccgccgggataaaaagcttactcaaactctcgatcaactcacaacagctgtagaaaagctgaatgctttactggaagatgcttcgtttcctccccaaccttctaaacccgaagagcaatgagaattacagatgtatacgtagggtatctgaagatcaccagaatcattcaaatcggtagtattctggtcaaacacggttttaaggaaatgatttcccatacttttctggggcgtcgtatccgaaagcgccgtatccgccaacataaaccagtatataccacccaggaacggctgcggctgaccatagaggatctgggaccaacttatatcaaattcggtcagatcctggccgaccggccggatatactctccgaacggttcagaaaagaattgaagaaattacagaccaatgccctccctttcgacgaccatctggcgatccgcctgattgaagatgaattaggggccgaaatcaaggatgttttttcagaattcaatccacattgtatcgcttcggcttctatcggccaggtgtataccggacgtctgaaaaacgggaaagacgtcgtgatcaaaatccgccgcccgaatatcgaccagaaaatcaaactagacttatacctcatgcgctatctggccaagaaattagccctggaataccccgaaatggctgccatcaatatcgtaggagtcgtcgacgagttcggcgaaagcatattcaaggaattgaattattataacgaagccacgaacatcctgcgtttccgggatatattcaaagacaatccccggatctacattccccatgtcgacatgaaacatacgacccaccggatgctcattatggaacggatcttcggtatgtcgccggacgatccgcttcagctgaaggctgccggactcgatccggtacaaatagccctcaacggagcggaagccttgctgatcatggtcttcaaggaaggttttttccatgccgaccctcatgcgggtaatttattcatcctgccgggcaatcggatcgcctttatcgacttcgggatggtcggagctctccgtccccgggaaatggattttctggccaacctttccatcggtttcgcccgccgggatcctatcggcctggccgactccatgatccggctttgtgatcaacgttttttcgaccaacgggacgatttgattttcagcctgcaacaaatgattaaacgcttctcccaactcccgatcgagaaattcaattacgccaagatgatccaggattgtatcgacctgatcaccaaatacggactttgtctgcctaccggtatttttatgctggccaaagcgttggccacaatccagaaagtggccgaacgtctggacccggacatcccctttgccaagctcatcatcccttacgccaaagaggttgtcatgactcaattttctccgcgaaagatggccgcctcgcttttccaaaccttaaaaggatatgccaccctcctgcaaaccgctccgggagatatcagcgagatattatacaaactcaaacaaggcgaaatcaaacacgagttacaaatcacggatgttcctgaattccggaaaatgctccggaacggagcctcacggctcgcttatgcgatacttctggtcggcctgtttatcggagcgatcggaatactcgataaacgccccgacctgaaatacggccattttctactctttgtatcctcttttttaattttcatcgttatgctaaaatggatactccggaaaaaaagggattagaagggaaagattggagattagggattaatttcattatctttgaatcgttttatctttaattctaatttttatcatgattcgaggttttggaagcgataatttttcaggcgtattaccggaagtattcaaagcactggaagaggcagcctatgggcatcagcattcttacgaagaagatgtttattctgaaaaagccatacaggatttcaaaaatgtttttggagaaaatatccgtgtatttttcgtctataacggtacaggggcaaacatactcagcctatctgctttcacccattcctataacgccgttatatgtgccgagaccgcccatatcaatgtggacgaatgcggagcgatcgagaaacaatcgggctgtaaactactgaccgtcccaactttcgacgggaaactgacaaccggtcttatccaaaaccacatgcacggtttcggagaacaacatcactcacaacctaaaatgatttccctgactcaatgtaccgaattagggacggtttatactcctgccgaattaaaagaaatttgcgattatgcccatgcccatcggatgtatgtacacatggacggagcacgtctttcgaatgccgtcgcctatctgggatgtgatccccgcgacatcacctcccgggtcggtatcgatgtattgagtttcggaggtactaaaaacgggatgatgtttggagaagctgtcgtctttttcaacccggaagtcgccaaagaggtacaatatatccgtaagcaactgatgcaacttcactcgaagacccgtttcatcgccgcccaattttcggcagtcctgaaacacgacctttggctaaagaccgccggacatgccaaccggatggcccggatgttagccaacgaagcggctaaaatcccgggaatccgcatcactcaagaggtgcaaggcaatgaagtattcgctatcatcccccgcgataaaataaccaaattacagtcggaatgcttcttttacatttgggatgaaaatgcctcggaagtgcgttgggtctgctccttcgacacgacagaaagtgatattatcgaattcgtcaatttactcagagcagaaatctgttgaaaggatgccacatcaattgattcaaacagaagacggtagtataaccttatatgttcctgaactgaatgaacattatcattcggtacacggagcgattcaggaatctattcatatttttatccgggccggactggatttttatctgacctccccggaacatcggccgcccaccgaagtcccgttgtctattctggaagccggtttcggaaccgggctgaatgcttatttaagcttattgcggagcgaagaactccagctcccgctcgattatcacagtgtggaaaaatatccgttaccgcccgaagaagtaaatcgtcttcattatccggatcaacttcccgctgccgatcccggatcattcgccatgctgcacgacgccccctgggattgcggagagcagattacccctttatttcatttacacaaataccggacagatttccggtctatacaatttcaggcccgattcgatatcgtctatttcgatgccttcaacccggaagtgcaaccccatctctggactccggaagtattcagccggttcgcccaagcattgaaaccgggaggaatcctggtgacttattgtgtcaaggggatagtcaagcaagccttacgcgaagtcggtttcaccttaaaacgcctgcccggacctcccggaaaaagagaaatgctcagagccaccaaacccgaccgaatatgacatcactagaaataaaacaactactcgatgaaaaatatcaggaatattgccattccgatttttttatccataccgatcccattcaaattcctaaattattcgaagagaaagaagacatcgaaatagccggttttctggcagcctccctggcttgggggcaacgtccgaccatcataaaaaagtgtaaggaactcatgcagctcctggattatgctccttatgacttcgtcctgcatgcccgggaaagcgatttcacccgtttcgaacatttcaaacaccgcactttcaacggttatgactgtagttattttttacgttccttagcccatatctaccgccatgaaggagggttggaaaatgtcttcaccaccgcctggcaaatacacggggatatgttcgaggtattacgccattggtatcggattttcactacccttccggccgagccccgggtactccgccacatcgcgtgtgtagacaaaggctcagccgccaaaagagtgaatatgtttattcgctggatggtgagacacgaccacagcggtatcgatttcggactatggaaaggtatcccggcctccgccctattgatccctttagatctgcatacgggccatgtaagccgcgaactcggtctgcttacccgtaaacaaaacgatgccaaagctgtcgaagagcttacccggcgtcttcgtgaattcgatccggtcgatccgatccggtatgatttcgctcttttcggcctgggggctttcaaataagcaggaataattaatcgttaaagttcgtaaagtcctgaaccctgcgggcactttcattaacgtaacttccggtgccggccggccgccccagtgccgtaaaaaaatgcgctcgcaggatccatcgactttatgaacctcatgaactttataaactcctataattcaactttttttgaagaaacaatatagaaatgaagagtcaactttgattctcccgtactcttttctccaaattcaaggttcccttcagagcacttccaataattcttcatctgtcaaagggatggaagtagctgctgttatgacagaatcggcaaggcgttgtttacgttcctggatagccagaattttttcctcgagtgttccggcagtaataaaacgatagacgaataccgcccgtttttgcccgatccggtgggcccggctaacggcttgattttcagcagcgacattccaccaaggatcgagaataaatacataatcggcctcggtaagattcaagcctaccccaccggctttcaaagaaatcaggaagatccggcattccgggtcggcctgaaaatgccggatagtctgttcccggtcggcagtcaagcctgtcagcatcgcatatttccatccccggaccattgtttcttcagctaccattttaagatattttacaaaagaagaaaaaaccaacaccttgtgtccggaagcaatcacttctcccaacatacggaatacctcactaaattttccggaatttccttcatacccagtttcgaccaaacggggatgattggcgatctgacgcaatcggatcagagcttttaaaaccataaaatcacttcgcaattccccttgattctctctctcactcaagatataatttctcacccgggactgttcctcttcgtataccttccgctgttcctcttcgggttcacaaacgaccaactcggctgtgagatccggcaaatcggccaacacttcttctttggtacggcgtaaaatatacggagcgatcagtttacgcaaagcttcgctcatccgcccttctacatcggccaatataggacggataaaatgatcgcggaaaaaacgctgtgatccgagtaatccccggttcacccaattcatcacagcccacaaatcggtcagtgaattttctatcggtgtacccgacaaagcccaaaaacaccttccctgaatacgcatcatagcctgatggagctgagaccccggattctttaacatttgtgcttcgtcggcaacgacgataccgaaagtcaggcgggacaaaatatcgatatcgttccgcaaagtatgataagtgatcaatacgacatccgaacgttgcaggtatgaacgcaaatcgatacggttagttccggcatagatagtcacagtcagctgaggagcgaatttccgaagttcattccgccaattatggatcaaagaagccggtacaaccaccagacaggtatggtataccaatgaacgatctccctcatccggcctgcttacctcttccggggcatcgaacaaactcagttgttttccgctgtcaggccatcggtttacaacaggcttttttactccttcctgcctgtatttcaagatcagggcaatggcctgaagtgtttttcccaatcccatatcgtcggccagacaacctcccaagccacatcggtacaaacggtacatccattcataaccgaaacgctggtacggacgtaaagtcacctgaaaatcaaagggcagagtcacctcttcctgcaaattctccggcaatgaaaaatgacaggtcgtctccgcccagttttttaataaaatatactggctgcggtgaaaaaataaggaagtcccctttccttgggcaaataaaagcaactcggtataggtagcgaaccattcttcaggaatcaggaataaggtgccgtcatcgagtaaaaactcacgtttacccgtcagaatatggtcccggaaacgaagcaaaggaatccggcgcccatcagtcagaataacttctgctttcaattcgaaccaatccatcgtttccgataccgaactatcgatctgccaggctccgatataataggcccggcgcaatgttttctgagtgaagccgatccccatcgctttcaactcatccccatgtgtctgtacccaggtcacggtcttctgccaggcatcggcaataacctccccgctcactttgtcccgatcttcggtttctttttcagtcttccaggtcatcacagtaacttccggcaaatggaaatacccttccgtatcgttcctgatccccaaagcaaccaattgccgggcttgcagctgttcccattccggatcccggctgaccttatagaaagcatagcggtctccttccgtatataattccaccaaagctttccgggacgaccagccgggaatatattgattaccgtatttatattccatcaccaggaccggcatgccgagtatatcgcgttcaagtgacaggaaggcctgtttttctacttcccggacgatcacgtcgaaaccttgtacctcgatctcttcatgccgtacatttttcaggataaaacgccggaaatagatactttcgtttgccttggggatcataatctcccttttctgcaaaaaaggttgcaaacgctgcccgtcgaaatcttccgggaaacggaatagctgcctgcctgaaaccacccggcaaggccgccgggtcagcaccttcaacgcgtaatcactgggataaaaggtcttttctccatctgtcaaacgcaaaatataacgggtaaactcccctgtcctttcgaatttcaacaatgcccgcaaaggaacggatttaagcatcaggcgctgattcttataaaaattatctaaacgactggttttcaaaaacaaaggacaacccgcttcggtcagttcatccagtacctgtgcgacatacttatcgatataaggccggatatcttcacggatatacgcttcctccactttttgcagaaacatacgttcatccttaaattttttccggccaaactgtttgaaaagcataggggtatcgtacttacggatcgtttccgtaatctttctgactacaggccatacttccaggtcttcatccccgatataccgacctatactttgaaaaaaatcaccggcatctattgcccggttggcatacaccatccagcaatcccaacgcttctcatatgataagataaaaataatccgctccatcgcttaaaaaagagagcgcaaagatacaaaattatgtgccaaaccatactcccgtcaaccgccgaattcctccgaccgcatcaccaccgcttcgtatggccgtaaagatactaccttatctaactgaggcagatcgccatagttgcacattaaaatttccgctccctgcatatcgattcccggataagcctcagcctgtttggaagagaaattcagtacaacaagatagtgatatttttctcctttacggagataagtataggtccggggattttttgcatccaacaaggtatagccggcataaacaagatccggagaacttttccgtaaagcgatcaattgccggaaatagttcaataccgaccagggatctttttcctgggccgcgacattgattttccgatagtcggggttcactccgatccagggcattccggttgtaaaaccggcttgtcccgagttatcccattgaaagggtgtccgcgcattatcccgggaagtctgttgctgcatctgaagaaaccattgcgtatctcctttgcgtttttctatctgtttgtattggttcaaagtcgcaatatcccgataatccccgatccggtcgaacttcggattacacatcccgatttcatcacctgccaaccaataaggagtgccccgcatcgtcagtaaaaaagtcgccagcatcttagcggcatatactctgaattgcgggcggtcatctccaaaacgactcaacatccggggctgatcgtgatttcccagataaatggcaggccatcccttcccgaccgctttatcccaaccggagaacatttttttcaaagcgatcaggctatagccgatacctgaatcgggacaatcggccgttgtataattccggacttccgaagggccgaatccatataacatatccaattcctgccgctcgggcccgacaaatttttccacttctttataagtaacggccgaaccttctccaacggtcattatatcgtatttactcaatacttcgcggttcatttcgtgcaaatattcgtgcaaatgaggtccatgtgcataagaagaaaacaaatccggatacttcttccggtcgataggcgggaaagccgggtctttagcgatcaaaggaatagaatccatccgaaaaccatcgattcctttatcgaaccaaaaacgcatcatatcatacaccgcttctctcacctcccggttttcccaattgagatcgggctgtttccgcgaaaaatagtgtaaataccaggcccgggtatgagggtcgtaagtccaggccgactcctcgaaataactcggacgcaagggaggagtttcctgttccaccggccaccagtgataataggtataatacggattcttccgcgacttgcgggcttcctgaaaccagggatgctcgtcactggtatgatttacgaccaaatccagtatcagttttaaattccgggcatgcacttcccgaagtaacaaatcgaaatcttccatcgttccgaactctttcataatagcccggtaatcactgatatcgtatccattatcatcattaggcgaagcataaatcggattcagccaaatcacatcgactcccaggcttttgatgtaatccaaacaggaaatgattccgcataaatctccgattccatcaccattactgtctttaaaactacggggatatatctgataaaccaccgcttctttccaccaaattctgttattctgttccatatctgtttcggttaaaacgaacgggttaaattaatttataaagttatataccctacgaacacttttttacggccacaaaatggccgatcatggagtccggtatgaaactgtcgaatgacacgccgttcgatactcttttaacgtcagaaaagatcagaagtttctaaataatcttatcataagaactttatggcgtaaaatttcgttttaaacaggaaaccaatacaaaaaaatatggaaaacggagtcatgatgcaatatttcgagtggaatatgcccaacgatggggatttgtggaatcagttgaaacgggatgcctctcatttacatgcgatcggaattacggctgtctggattcccccagcctacaaagccctgaaacaagacgatgaaggatatggtacttatgatctttatgatctgggagaattcgatcaaaaagaaaccatccggacaaaatacggtaccaaacagcaactacaggaaatgatcgacgagctgcacaaaaatcaggtcggtgtctatctggatgccgtgatgaaccacaaagccggagcggactataccgaaaaattcatggcccgggaagtaaaccccgaccaaagaacagaacaactcggtgagccctatgaaatcgaaggatggaccggtttcaattttccgggccggggaaataaatactcggatttcaaatggcactggtatcatttttcaggcatcgactgcgacgtagctaccggtaaaaaaggaatttttcagattgtcggtgaaggaaaaacctggagtgagggggtagacgacgaaaacggcaactacgatttcctgatgtttgccgatatcgacttcgatcacccggaagtagtggaagaaatgaagaaatgggggatctgggtcagccaggaattacacctcgacgggatgcgtctcgatgccatcaaacacatcaacgatcaatttatcgcacatttcctcgaagccgtcagagctaaacaaggacaacaattttatgccgtaggggaatattggaaaaacgataaagactcgttggacaaatacctttccgaggttaaatataagatagacctattcgatgtccctttacattatcattttttccaggcttcacaaaaaggcagggactacgatttacaagaacttttcaacgacaccctggtcaacgaccatcccgacttagcggtcacttttgtagacaatcacgattcccagaaaaacagttccctggaatctcaagtcaaagactggttcaaacctctggcctatggcttgatcttattgagaaaagacgggtatccctgtattttctacggcgattattatagcattaaaagaaagcaatctcctcaccgtccgatcctggatattttattggacgcccgtaaaaaatatgcccacggcgaacagctagactatttcgatcaccccaatacaatcggcttcacccgtaaaggggatgaagcccatccgcattccggcctggcccttctgatctcgaacggtgaagacggagataaaattatgcaggtaggcacagaacaccaaggagaaatatggcacgaaattaccggtaaccgccaggaagaagtaaccatagatgaagagggaaacggtaagtttacagtatccggtagtaaactggctgtttgggtcgtaaagatctgatccggcaggataggccggcaatctctttcctccggtatgagtacaagacaaactgtctgtaaacgatagcatgccttgtactcttttctctagtcattccctgtccgcccaaccccgcctcccccggtattgttatcccaccgattttttcatccgatatccccggatatacagggaaaaattttaataatttttcctatttttgcaatggtaattttaccggattttaaaggtagatatcattccacggttttcaatgaatacttcttttgcagacatagaaaaaaaggagaaccggaaggacctgattatttcaatatgtgtattcttatcggggttctcctgttttgcccagctctactatttccagcctttgttaccggatttagccaaagattttattctctcggccagcgaaagcagtttcgctatttctttttcgactttgggaatggtcttcggtctttttaccaccatgttcgtggccgaccgcattccccggaaaaaaatgatcggtaccggtttactcagttcgtcgatcttttccgttgcggcctctttctccccgacctttcttccgctgattttgctcagtgctgccaaaggttttctattatccggagccacatccgtatccatggcttacattgcggaagaggtatcgtcccgcaacaaagggaaaatcatgggtctgtatatcgccggaaacgcattgggaggtatggccggacgagtcatttcatcctggatcggagccctttacacctggcggatcgcatcggtcagcatcggtttgatctgcgccttattcgccatactgttcttactgttcagcccccgctccaccaactttatgccccgcaaggaaagctttcataccctcatcatagcaaatctccaactgatcacctcaaaagcattgatccctttctacctgaccggaggattgatcctgggggttttcgtcagtttatacaattacctgggattctatctgaccaaagcacctttcaatttcccggaacattatatccactatatttatttaatgtatatattcggtattttcgggtcgattgcgacagccggactcacccggtacttcactcattttaaggtattaaaagccatgtttttagtttcagctgccggcattttactattatacatcaccgacttccgggtcgtgactttaggactggctgtatttactttcaattttttcgtcgtacatgttttatgcaaccgtattgtcagcgattacaatctctccaagcgttcggtcactatctctatttatctgctcacctactacctgggatccagtttgctgggttggggtacgggtgtgatcctggatacctggggatggcaatatttcctggggagtctgatcctgatcctcctgataaattacggtattgttatcggaggtataaagcgcatgcgagccgatctttcttaggcttccggcccttctgccaaaagccggttatatatattgaagtcctccggcccgaaacagacgacaatcacctgttcaaaaccgggataaacagccaaaaaacgagtgatctcccggaacgcgatccgggcagcctcaagtttgggataacgatatactccggtactgatacaggggaaagcgatggttttcaacccgttctctactgccagccgcaaactgttacgataacaggaggctaacaattccggttcatgatgcccgccgtcccgataaaccggtcctaccgtatgtatcacatgagccgccggcaaacgataccctttcgtaatcttcgcttctcctgtcgggcaaccgttcaatttccggcattcctccagcaattcaggtccggccgcccgatgaatagccccatcgacacctcctccgcccaacaacgaagaattcgcagcattcacaatcgcatctacctttaaatgtgtaatgtcatccaaaagaatttccaaacgtttcataatccgatttagtttataaacttcacaaactaaaatttatcgtaccgataaattttcagccctgtttcaggtatcgtggtgaaaatatccgctgtccccaaagtgtttgcaggataccacgcaatgaaagatataccagaaatgccaaccacaggatatgattatcggttcctcccgcaaaacagtaataaatcaggaaaaaagcctctgctgcgactgccatagcccacagcatctggcgggtagccgtagctccgatcaggataccgtcccataaaaaagcactgaaacctgctaaaggaatggccaatacccaataataataatctcctgccacccggatcacctgttgatcattggtcaataaacttaaaaaatttttccctcctacgccatacaacaaggtaaataaaagtgacatcccgactccccaaccgaataaattgcgcaccgcatgccggagctgtttcagatcacaagccccgatataccgcccggccagcgcttcggcagcataggcaaaaccatccataatataggaaaaaagggtaaaaagctgcatcagcaaagtattcactgcgagaatagtatcgccctgacgtgcaccggtagaagtgaaaaaagtagtgacggcgattaagcaaacagtccttaaaaaaatatcccggttaacggcaaaaaaacggcgcatagccaccgattgtaaactattgcgcaaaacgatccgggaacgcaaccacccgtaacgctttctccacaataacaaagccatagccaatcccgaccattcggccactacggttcccaaagccaccccttccaccttcatgcccaggacgaacacaaaacagaggctacagacaatattgatgatattgaccgcgatagcgatatacatggggaaacgggaattctgcattccgataaaccatcccttgaaaccatacatcgccaatacagccggagccccccaaatacacacccggaaataggtgacggcatattgttctacctccgggctggtatccaataaataaaaggccagccgttcgacaggatattgcaggatcagaatagcggcagcagaaatcaaaccgacactgaccgcttgtaccaatacttttacctctgcatcggcatccttacgtccataggcctgagaagtcaacccactggtacccatacgcaggaaaccgaaattccagtagaggatgttgaacaacaatcctcccaccgcaattgcaccgatataggccgccgatccgagatgcccgacaatcgtgacatccaccaaaccgagtaaagggactgtgatattagatacaatagaaggtatcgccagttgtaaaatccgtcggttcatcccatcaattattttcgtataccgtagctccccaatccaaagtataataataggtattcatatcagaccattccgaaaaaggaatatatgaagtcaggccgctaaacttatcggcaggcacctcatcaccgaacaatttttcggtagctgccttgtagatcacaacccggtctagttgtttcttaaacgagttatattcctcttcggttgtcatcttccggatatagtcgccgaaatcgaaaaataccataggcaatccccccttactcagcggataatgccaggctctcacatagtcggtcttcccggctaaaagagtgcgtaccttcgctaccaaaggttctaattcttcggtctttaccagcccgaccaccgccgaacgccacagggaattaacctgatatttattgtaatggttataatattcccggcaaatctgtttcatagcctcttctcctccccaaagcaaaggcatcattttttcatagggaaacccgtcggaaatcacctctgccggagaggcgatcatataatcggttttatttctcaattcgtaagccacctcgatacctcccataaaacatacatcccaaaggataaaactgaaatgtccgggcaagcgggcagccatctcccggatatccatataagccttccccgttgttccgggatgttcgtcttcggcataatatttcgtcctcggcatatccggatcaggcaaccgcatcgcatatccccccgggaaggaatattccggcagcacccaccccagaccatgcgaccacaataccaacccataggaagaggccggatatcttttttgcacttcctttaccacccttgccaacacttcgggtgaagccgaattttcttctgtataagtctccaaggtatccagacggcaccctttcccccctttaacggtcagcagacgaggcacatcataccggggatcgatataaatcaccagccgtcctgccgtttgttccatccctttcaggatagactttatattggtttcaccgtctttattcagattattatcggctgccatataaatcaatacggtacgttcgccgtattccggctcgatcttatcggaatcatggcaagcgctaaagatcataacgctatatatcagaaagaaaaaacgaattttactaaataccttgaacttcatcgggctttatgctttaatcgatatcattattttgcgtgtaaagatacaaaaaaaaaacgataaagcattatatttgttccgtggaatcgatcggcacagaagtcaccggctccttgcttcccatcgataaaaccctatattttcaaattgtaaaaaaatgcaacctgtcatttaccctatcgagaaaaagaagcttatcgccgagctgactgaagaacattttatgcggaagacgaataaaggcggtaatgaaatatataccttcgatgctcattctgctccaaacctgatgcaggaagtcgggcgtatccgcgagcttacgttccgtagtgccggaggtggtaccgggaaagaaaccgacatcgacgaattcgatgtcgatccacaaactccttatcagcaactgatcgtctgggatccccaggaacaggaaattatcggaggctaccgttatattctttgtgaccatctatcgctcaatgccgaaggagaaccgaacctggcgacaaccgaacttttccgtttttcagatcaattcaaatccgattacctgccgaaaatgatcgaactcggacgttctttcgtacatccgatctaccagtcgacccgcatgggacgaaaatctgttttcgctctggacaatctctgggacggattgggagccctcacggtagaacatccccagatagaatattttttcgggaaagtgacgatgtataccagttttaatattcaggcccggaatatgatcctctattttatagataaatatttcaaggatacagtaggtttagtggttcccatccatcccctggatattcaaatcgacgaggagcagatgaaaaaaatctttatcggtaataattataatgaagattacaagatattgtcccattatgtccgggaattgggagaaaacattcctcccctggtaaatgcttatatgagtctgtccccttcgatgaagatgttcggaacagccatcaaccccggtttcggcggagtggaggaatctgcgatattgataaaaattgcagatgtatacgaagccaaaaagaaacggcacatttctacttacatcccccgtattctcggaagactgaaagggaaaaaatgaccgaaagcgggacattcaataataacataaagctagccaactgattcatatttaaaacattgtggatcagttggcttttttgtatctttagatattcccccaaaaataagattcggtagcccaaacggaagaaatatccggactaggatatggctaagatacggaatactacaataaatggcgtatgaaataatatcccgttctagtttctctctcactacaaaactaaatttacgataccgagcaattcaagaaccggaacata

SEQ ID NO: 5797 - DNA, 27313 bp, Unknown
  gut microbiota DNA sequence
taaaacatgcttaaaagaatcggacattcaatttctttctgaaaataaatgcacccaactgcaattttcacttgattctctaattccagaaacattaaatcgaatgttaggaataaataacaaatatattgaaaatgtaaaacagactctacaacttttagacaaatatgatataagagttgcaatacattcaattttaacacaaaggaattctacaaaagaggactttatatcaatatttcactttataaaaagtctgtccaacattctttattggaagcctgatataggcggagaatctatatatgtaaattccgccattcaagggacaattgctcccacaaaggaggctcaagcatctatatctgcattgtgtaaaaaattacagaataaggctaactttccaatcttatcttcaggtcttgataaagaagatacaaactcttccactaagacttgggctaagtttaatgaaagaagtgtttgctctggtaattatctccaattatttgttctgccagatggaaatgttactatttgtgaagaattatactggcatcctaaatttattgtgggtaatattttagaacaatcacttaatgatatttggaattcagaagcagctttgaatctttattatctcaaacaatctaatatatcagatgaaagtccatgtaagacctgtaaagactatgaagcttgtagaattcctaaacaagtatgttatagagatattgtaagaaaatatggcacaaaacattgggattatcctgacgtaaattgtccaaagtccctatgaaaaagtatttatacattctttctttttgttttttgcaatgtgtactaacgggctttgcacagaacaaacctacctcaatgtcagacacaataaatctttctgaagtaactgtattagcagaaagaccatttgttcaatataaagctgacagaatgatagttagtgtagaacatagtaaattgttaaaggcacgttctctttctaatattttgaatttgattccgggtgtaaattatgatggagaaggtggtattaccattatgggcaatggtatcaaaatatatgaaaatggaaaattggtaaggttaagtggggcgcagctcaaaagatatttatcatccttgcgcggtaatgatataaagaatttggagttgctgcctcaggcaacagccgggtatgatgcagaaggaggcacgggtgttcttgttattaaccgtcagaagaaacatgagtacggactatcaggttatgtgggcagtgaatacgaacggaaaagcaagaatctattttcggaatttgcaggggtaacctattcgtgggggaacgttgctctttatgctaatatggcgttagggcagtcggcaagtcatagtaagatatccgaaagcgactatggacaaaacattacaatcaacagtatatctgaaactacagataaaagtctttattatatgcctaagttgggcatcgacttttatatatctccgaagcattatttaggtgtagaatggtcgggcaactatgcaaaggattatgccaatgcctgttgggttcattctaccgttaccgataatagtcctaatcaaacaaatattctaagttatgctccatactctttaagacctaataccaataatgttactttaaattatgaatggaaaacagatacactgggcagtaagctgaaccttcttgctgattatgtaggagaaagagaacatgatttgtacgagtatgagaataaatacaccttaggtataggtggggatagtattatatctaaatcgcaaccctcattcgaacacatcaacatatatagtgcacaggtagattttacaaagttcttcaaccgccatcagtttacgcttggtgtcaagtatgtcaatgccggtatcaattatgataataagctatatctcggaaacacgacattaggaggagtgttatcggaagatgttgaccaacgggataatttcagttatgatgagcaacgatatgcgatatatggaatgtacaggtactcctcacgaccttgggattttcaagtgggactacgtgacgaatatacagaatggaatacccaacaaagagttagaacccaattacataacaaccaaaaaggcaataatttcttcccgtctttctttgtgagaaaaaacatgggacaagggaatgccctgtcgcttagttatacgcaatcgataaaccgtccgtcgtatcagatggtaaatccatttgtttttcatctgtccgaaacatcttataaggaaggtaatcctaatctgaaaggcgaattgctgtacaatgcaggattacaattcgttttgaagtcaagatatgttttctcgttatctgcattttttattgataggaaaatcaatgaggtatacgaacagatgaacgaacaacaaacgcgctacacattaagaaatgatggcaatttaaagaaattagctttatacatggaatttcctttcacgtgtggtatatggaatagcagaagtaatgtcgaactaagtgagaacttttatcggaacagtaccaaacgtgttaatgactttgggcttgtcctgtcaagttttaatcgtttcaggttgtccaagcaacttactgcaatggctaatttacgctatatcaggcattataaacaactttatcttattcagaaatcagattactttggagtagatatagagggggattatagttgtttgaaagacaagctgaatatcaattttggtgtaaaagacttgctgaatagcagaggaaagaatcaacaaatattcaagaacggtgactttgagcaccgtacagactttgatttcatttcccgaaaattctttgtcagcgtaacatttagtttttctgccgggtcaaaacatgcaatccagcatgataagatacactctaatgaagaagaaaaagaaagaatgtaatgaatcacttcccttttattaagcaacatgatgcgatggagtgtggagttgcatgccttgcgatggtatgtaatttttttagaatcgaatattcaatagaatatctttctagaatttgctttgcaaccacagaaggagtctcattacttggtattaatgaaacagctttacaacttggattacgaactatcagcggaagaatcagtattaataaactttgggaggctcattacccttgtattcttcattggaatcaaaatcattttgtagttctgtataaggttaagaaaggcaagaccttctacattgctgaccccgcaaagggacttgttaaatacaatctcgaggaatttaagaagcactggattagcacccactcgggcggtgaggaaaagggtatcgctatgttcttagaacctactcctgcattttatgaaaagcagacagacgaacagccaacagaggaacgctcgtttaagttcctctttggttacattaagcaatatcgtaagtatttcgggcagattgttttaggcttgctcgttggcagcttgctgcaactcattctgcctttcctcacacaatcaatcgtagatgtgggcattaaaaaccagaacatcggctttatttggctgatactcttgggacagctgatgcttaccattagtcgaactgccatagattttatccgccgttggctcttactacatatctctttgcgtatcaacatttcattggtaagcgactttttcatcaagctcttaaagctgccaatgtcgttcttcgacaccaagctgatgggcgaccttatgcagcgtatgggcgaccacaaccgtgtaaactcgtttctgacacaacaaacgctcagtattgtgttctcgcttttcacctttgtagtattcagtatcgtgctgctgtcctataattggcttgtctttgccatcttcatgcttggcagtctgctttatggcggttggcttgcactatttcttaggcgcagaaaggtactcgactacgaactctttgagcagcaagccatcaacaataataagacttacgaatttattacctccatgcaggagataaaactgcaagactgtgagcagcgcagacgctgggaatgggaggacgtgcaggctgatttattcaacgtacagatgaaatcgctaaagctccaacaaacgcaggaggcaggcagcatcttcatcaacgaactaaagaacattgttatcaccgtggtggcagcaactgctgttattcacggacaactcacgctgggtatgatgcttgccgtgcagtacatcatagggcagcttaactcgcccgtggaacagctgatgagtttcttctactccgtacaagatgtaaagataagccttgaacgtatcaacgaaatccaccgtatggacgatgagaacggaaagcaaggattggagacctctgtgaaagaagaggataagggtatagacatggaaaacataaactttaaatacgacccacatgcactgaaaactattatagatgatgttagcctcactatccccaaaggcaaagtaacagccattgtcggagcgtcgggtagcggaaaaaccaccctcatcaaacttatgctgggctattatcccgtattgggaggtcaaataactattggtggaacagatgtaaacacacttaataaaaagtggtggcgcagacaatgtggcgtggtgatgcaggacggcgtgatattctctgaatcgatagctcgcaatatagccgtagacgataaggagatagacaaacagcgattgcagacggctgcagagattgcttgtattcacaattatgtaatgggattgcccttaaaatacaacacaaagattggtcgtgatggcgtgggtttgagtcagggacagaaacagcgtatcctaatagcaagagccgtatataagaaccctgattatattttccttgacgaagctaccaactcgctcgatgccaataacgagcgtatgatagtagaacatctggatgagttctacaaaggcaagacggtggttatcgtggcacaccgattaagcacggtgaagaatgccgaccagatagtggtattggataaaggcaaagtagtggaaacaggcaaccacgaagcactcacggcaaagcggggtgcatactataacctcgtaaagaatcaattggaactgggcaactaataatagagaaacactatggcagacagcaagattgaacttcgcagcgaaaaggtaaggcatatcattggcgagataccgtcaaggattgtccgttatggtatcacaatcatcacctttgtgatattaggactgctggtgggcgcatattttataccttatcccgagaccatcagtgcaaaggtgcagataacaaatgcccatcaaggcacaatagactttccttataaatacgtgaatacgatagcaagaggaatgacagcgaacattgaagttgagggttacgatgcagaaacatacggagttgcaaatggtgtaataacagccacatcgcatacaccccgacaaacggcagaaggcagcgtattcacggcacaggtaaggataacgtcttgcaagtataaactcgtcagcggaatgacaggcacagcatctgtacttgtaagcaatgaaagcgtacttcaaaggattgtccaaagaataacaaatatcatataatttcctttttaaccgtaataaagcggtgaaagaagaaaggcaaatgtagttactgcgtagtaccattgtttcgagtactttactacacgttaatcctttttctttcaacgctttatcctttattgtagttatgtagtaagatataatcagtgaaagaaaaaggaaagataagatataatcattagttattcgtgttgccgagcagaaatatcggcgttatcatggatgctggttgcttcaatctctgacagacataccctctgaataaatgcgcttccatgctgtccaacagaaaggacagggcgatgatggcagaaagctgatagagcggtgcataacctttgataattttagcattgatgtcaaaatctattccccgattctctatagctgcaaaatttacatttgcagaaggcaggccgatccccggagacaaggtataccgatagagcagatcttttgtctttttcttatagaattctaatgtccctgaaatacggttattcttaaaaaatccataatccaaacccaattcataagaaacagttccttcccatttcaggttattattacccatcgatcctgggacaatagcaggctgatccaggtattccgtagcatcatacaatgttctccagccatattcatccacatatcccattcctacctttccaacgctggcacgcaattttaaaaagttaatcactttattatgccggagaaatttttcttctgtcaaattataagctacagccaatgaaggaaaataactccaacgattgtcaggagagaaacgagacgaaccgtctgcacgccaggataccgtcaataaataacgatcattaaaactataattagcacgggcaacgtaagataacaagagagcacccttgtcatatcccatctgatctttataagtaactccctgccaaattgaagtctgagttttatcatcaggaaaatcagcaaaggtcatagaggcataagaatttttggaatctgtcaaagttcccaccattgtaatatcaaaattgtgtttctttatacgtttcccatacataatctgtcccatcaattcctgattttcagacagacgttctgtattcgtcaactgacctttctgtcctttgtatccaccactcccatataaagtcatactcggataaaaatcccgccctttactttgtttatagttataggaatattgtaatctcagactcagtcctccgaacggtctggacactaaataagaggtaatattagcccccagatcccggttcacattatctctttccttggcttcaatcattggattagattcaaaccgttcttctccctgatacatatatttatgaacataataacttccatcttcgttgtaacagggtaaatcgggccgggcttctgcagcaacgttaaaattttccgtctgtccgcgtttactaagatcccctctgaaagtcactcccattttcaaccatttattgagatcggtatcgaggttcaaattcaggttatgacgacggttggaagtattcaccagcatcccctcctcatctattaagccataggaaacagaataattggaagagtgtccccctccccttacgctgatattatgtttatgtaccctggcaggctgcatcaatagtttcatccagggagtattcacctccccaaaatatcccggagtggtatagtccttataataacgataatcactcaaattcgtatacccctgctcctgggcagaattacgggtggcttccaatagcaaaagtttaaattcttctgtattcagaacattaatatctgacaccaactgacgtgttccaaaggtataatcgtaactgatcaacggtttctcattccggcttccctttttcatcgtgattaaaatcactccggcagatgcccgggaaccatagattgccgatgaagatccacccttcaatacatcaatacttttaatatcagaagggttcagctgattgatagagaaatcggaaggcataggtacctcatcgacaacaatcagaggtgaagtattcccggataaggaagcacatcccctgatttgtatctgtacttcttcaccgggagcaccactaccggtcagaatatggagccccgacacctgtccctgaataatagtaccaatgtctgcggcagcagactcttcaatcaaacgagtatctacactggaaacagaaccggtcaaatcttttttctttacaacaccatatccaaccaccactgcttcttccagactattctgttcttcttccaaaattacattacactccggaccggtaaccacaatttcctgagttcccatccctaaaaatgaaaaccgtaaggtcaaacctgtcttaggtaaagaaattttatagttgccatcaacatcggtaaccgtgcccatagtagttcctttcaccaacaccgtcactcccggcaatgcctgtccccggttatcggtcactcgaccgttcactgtacactgttgctcctgcgtctgttttttccggatcaccactgtttctccctcgatggtatactccagtcccgtcttccgcccgataagcagactatcgagcgcctgttgcagcgtcaccgactgtaaatgcacggaaatatccgtatagggctgcaagtccttagaattgaacagaaaattataacgcgtctgactgcgcaatgcttcgatcgcacggatcaaagatgttttttcaaccttcaggttgacccggggtgccgttttctgctgggcggtagccggaagattcaacattcctcccagcaacaggcagagccaccatttcagggccatccttcccaagcaggaaatttgccttagataattttttttcatacgtttgtaaaattaaaagtgattgttgagcaatcggcaatcctgtacacgggagatggagtcagcatcgcccgtgtttcttaatctatcggaaggtatcgccttttgcgtaaccttaaattaaactatttcaatcgctatcagtcccaccggtatgccgctccccaagccagacctttgttccttgccgttcataacggatgttccatgccttggaaagcatatccagcgcctcgtcgagcgtctgagaacggttcatataaatgtgtacccgcgattcccggaacaagctgtggtcgtacaccatttccacattataccaacgtgccaattcgtcgatcacctggtccaacgaagcgtccttgaatacgaactccccatttttccaagccaatgtggacaccaggtcggccttacccacgatcagcgcatgtgcttcaccggctgcgatccggcattgctcgccgggttgtaacacaacagcctcctggcccctggccacttccaccttcccatgaaccaaggtagccacagcttcctctcccccatacgctttcacgttaaactgtgtacccaatacccgcaccgtcccctcgcggaaatccacccaaaacgggcgttctctttccttcgccacctcgaaataagcctcgccttccagaaagaccctgcgttcgccgtctccgaaagcctccggaaaccgcagccgcgtctctgcattcaacatcacccgtgtcccgtcggccagcaccatcctatactccccgccccgcggcaccatgatttcgccataacgaacggtatctcctcccggtccgcttgccaccgcttcctgccggatcactccccccgtatccacacggaatccgggaatcgaaccggacaacctaccgggcccgagttcatgcctgctaccatcggacaacagcaactgcacagcctgtaccccctgttcctgcccatccggcatcatcctgccttcacgcgtacccggcaaccatacgctccaaccaatccctaccgccaaaagcacacaagccaccgcagcagcccaacggaaaatcatcctgcgacgccatatagacacaggcatcgtctgccaaatccgccgcatccgctgttctatttccccatcggggatttcctccccggcatagaacccccgggcatcttccacaaatcgcttccgttcagccgacccgcctgcccaggattccacttcctccctttcctcccgggaagcttttcccatcattacttttttgattttatctatttccatacctcgtcattaaccgtctttataagtaaaacaaccttacacaaaaacaggggacaagaaaaagcatattttttttaattttagtaaaaatatgtccgatagcccgaaccattcagaaagaaataagattccaccaaccacacacaataatacctccggtcaacattttgaagaataatacgaaatagctgaataacactgatccggaaatggaatcctttaaattttacccaagacagaccataagaaatacaccacaggcaatgcctcccgtatagctttgtaggccctcttgacatgggtatgcacagtgacttccgaaaggttcagttctctggcaatctccttatagctcatatccctgaaaatcttcatttcaagcaccttgcgctgttgctccggaagtttacgcaagcagtcctgcacctttccgaacaggtcctctccctctgcgtattgcagtgaacccatataaatcaaggcttcggtaagttttgtccggttggtatcttccacacggagatgcttgtaataattcaggcaggaatttttcaccgaagcataaagataagtactcacccgtgtatcctccggcagcgttcccagaacagaccaaaaatgcataaacgtatcctgcaccacatcctccgccatctccgcattcataagataagagaaggcaaaacgatataaccggggtcccatttccttgaaaatccgctcaaaagcccgatgagaccgtcgccttaaatctcctgccaattctgcatataaaacttcatcaccgtcaccactcatagcacagacgttactgaactgcaatattggttaaaataatttacataaacaatccccatgatcgtttttccgcggatttcaacagtggaaaagtaaattttacccggatcgaaagtaaataaacgcaaaccagtagtcttcaaccgataaagcccgggatgttccaatacccacccggcctctttcccagtaaatgaccgttcacatagatctcactccggttataaatcccttcaaaataaagaaaaaccttttcttaccgtttatctgcaggaatccgaaaaaaactaagcagaagcagagattcgcaacagatgcgacaaaataattcctaaaacaaatttacacccttttgtattcataacttcactcttttattgaggatccacatcacaaatgacccgaagtgttccccactgtttttcttgtttcaatattctgatttcttcacgaagcctgtttttcacccccgaacaagagattccgttttccagcttcaataacaaaatcagccgatgatacccaccgattttactaatctccggaacagcaggcccacacacccgtttgcccagctgcccgcgcaaacggacagccagccggttagcggcattccgtaaaggtaccacctctttatgtcttagttccacctgaatcatccggccgaagggaggatatacaaacaactcccgttctgcagccaattgctcgaaaaacgtccggtaattcccatcggtcagcatggtatacactctgtttttaacatccgccgcctgaataaccactttcccccggtcacctttccgtccactacgcccgctaacctgcaacaacatacaataaacccgttcctccgccctgaaatccgggaaattgaccatactatcggcatctatcactccgaccagcttgacatttgcaaaatccaggcctttagtgaccatttgagtcccgatcaggatatcggtcttcccctgttcaaaatcttcgatgacactcctgaaacgagacttactactcatcacgtccaggtccatccgggctacccgggcctgcgggaaaagccgtaatacttcttcctctatccgctccgttccgggtgttctttcccggtaatgcccctccccgcaaaccgaacaacggtcgctcatcgacacgatagccccgcaataacggcaaacgagtacatggcgctgcttataataggtcagactcacatcgcaataacggcatttcgggatttccccgcaacggtcacattgtacataggaagaataacctctgcgattctgaaataaaataacctgtttgtgttcgctcagcactttctccatctcttccagcaataagggagagaaactacctttcatcagctttttacgccggtattctcccacatcggccaaacgaatttcgggcatctgaattccaccataacggctgttcatctgtacatacccatattttccggtaagcgcatgttgaaaagactcgaaagaaggcgtcgccgaccctaacaggactctggcttccgacaatttccccagcataaccgcagcatcccggccattataacggggtgcaggttctttttgtttgtaagaagcgtcatgttcctcatccacaataatcaatcccagattccgaaaaggcagaaagaccgacgaacggactccgagtatcaattgaaaaggttcgtcgctacattgcttccgccacaattcagcgcgcatattatccgacataccggaatgataaattccgatacggtcaccgaaaacccgttgcaaccgtcttacgatctgtacggttaaagcgatctcgggcagcatatacaacacctgctgtccccgattcagatattcctgtatcagacgaatatatacctccgttttcccggaagaggtcaccccttgtaacaaaacacaatctttttcaaggaaaaaatcccggatgcgccctaaagcgccctgttgttctgcattgagctgccaagaacttcctccggcgtctccgtctcctcccaaccgacttatctttctttcttcgaccttcaaaatcgctctgtcacacaatcctttgagtgtagcggccgattgtccggtcaaacgcaaccactcccctttttcgatttcagttttaccccattcgatccatctgcaaagcatagcatattgggccggtgctcttttcaagcgatccaacaacgcccccaattcttcctctgtatactcttttgcccaagtgacgatacgctcctttttttcccggaacaagtcgtccactgtttctttaatctggatgtaattccgggccaacagatttctcaccaacggaagcccgtttttaattttcagatatttctccgcttctttcagcgaaacatattcgccaggctgtaaaaatcggagtaagattttttcgttcgtagtcaaccccgcataatccacttcctccgtggtacgggtaatgctggtaaaactctccaaacggaaagccaccggtaaagccgctttcatcacttcgccgggagtggccatatagtacccgccgagccacaataaaaacctcaggtgcagagccgaaaacgaaacctgtttctcgatgacatcctcgataggctttacctgatatccgacaggcgcctggtcatgtatacgaccgaccaaagcggtataccgcttgttaccggcaaacgacaccaataccaatgtaccctcgcgaacctcgctttccagagacacaggcaccgtataggtatacattccttctaccgccaggggcacgatgacatcagcatatcgcataaaaatattttaataccatttattcacaaaatacccgaatgagaactcattcatcatgcaataataacaaaaataacggtaagaaagcgggatgctcctaccgttatttcattaccaagaccagattctattaaatagacagaatccgcaccagattcaataattcaggattcaggtttttggtatgcttgatcgttttgttaaaaggaacatgaacaatctctttattcatgattcccagcataatgctcttctgatcatccatcaaagcatcgacagcggcagcacccaactgactggccaaaacccggtcgaactgagaaggagaaccgcctctctgcatatgtcccaatacagacacccggatgtcatactcgggatgtttctgagccaccttttcagcaatgctgtaagccccacctgatttttcaccttcagcgacaatcacgattccactggaggttttcggattataatctttttcaataaaatgttccaaatcggtcaagtccgtttccacttccggcaccaacacagcttcggcaccggtggcgatagcggtacgtaaagcgataaatccggcatcacgtcccatcacttctacaaagaaaagccggttgtgagcactcgccgtatctttaattttatcgacagcttccactgcagtgttgacagccgtatcgtatccgatcgtcgaatcggtaccgtacaagtcattatcgatcgttcccggaatacctaccaccggaatgtcatgttcctgaatcaatagtttagcaccggtaaaagaaccgtctcccccgatcaccaccaaagcatcgattttatgctctgccaacatctgagcggctttggtacgtccttccggtgtacggaattccatactacgggcagatttcagaatcgttcctccccgctgaataatattgcttacatcattggatttcaatcttttgacatctccctcgatcaatccctgataaccaccgaagataccatatgcttcacagccattaaagatagctgtccggactacagccctaatggcagcattcattcccggagcatcacctcctgaagtcagtactccaattctttttattcttcccataattaaatcatgtaattcatttattgtagttctattttatgtcttatttcttccatcacccatgccggtgtagaggtcgccccactaattccgacactttgagcattctccaacatttccggctttacatcctccgccctttgcaccaaataagtccggggattcacttcacaacaagtagcgaacaattgctttccgttcgaactcttttcgccactgacaaagatgacaacatcatgtttctgtgcgaactctctcagctgaggtatacgattggccactttccggcaaatcgtatcgttcaccaccacctgtgccccgcctttctcttttagcaaagctgcaatagcctgaaaaccttccagacttttggtcgtctgtgaaaataaaatcaccggacgcgaaaaatcgatctgccggatatcctcgggattctcgatcaccaaagcctccccattcgtctgtccgaccaagcccacgacttcggcatgcccgcgttttccgtagatgaccacctgtccaccctgttcccgggtttgctcataagctttccggattcttttctgcaaattcaataccaccggacaagaagcatcgatcacttcaacctcattcttttgagcgatctcgtatgacaccggaggttctccatgtgctctgaacaatacccggcaatgttgcaatcgtgcaaactgctcgtgttctatcgttttcaatccacgtagcctcaaacgctctacctcgaggtcattatgcacaatatcaccgatacaatacaacatcccccgctccaattcctgttccgctttgcggatagcattcactaccccgaaacaaaaacccgaatgttcatcgatctccactctcatattctatctttcatttatcctcctgcttcttcctccttcttcacctattacttcatacttcttccaactctcctcccccgctgccagcttttagcctttagctctcccgtctctagcaaccttgagcctcccaacctatagcttatagcctatagcttttttagctctcttagcacgcacaaagatataataattttcaataaattatctgtgtaaataaatatgattcagcctaaaaaagttgcaatcgatagaaatcccttttcataaaccaaattctaaaattttgattatttttgcaaaatacatacatcatatataaatttttaaccatgaaaattcttaaaatatccactattacagtggctgttctcgtcgcagtgttcattatcatcgcttgtatttttccgccgatcgccaaaaactacatcaataaacatagtaaagagttgatcgggcgtcagatcaacatcaaaggactctacataaacattttcaccggctatgcccgtatcaccgatttccaattattagaagccaacgatctggatactttcgtttctttcgataccctcagtgtggatatgtctctacatcgtctgttagcgaatgaagtcagaatcaaccacattagtctgaccaatcccagcgtaaaggtacttcagcaaggcagtgagttcaatttcgacgatcttttggccctcgggtcaacggatacgttatccgccgatagtcctgctgcccagccggtggcttcttctactctacaatcgccggcctccgacagcctttctccggcctctccggccacaacttcggcaaatccccttgccattgccctctataatatcagcatacagggaggtcatatcctttacaaagatttagagcgtaattcggtttggcaaatggaaaatttcggacttcagattccgggggtttatttcagtggtcaaaataccgatgtcggcatcgcattgaatttcaatgacggtggacatttgcaaacggctatccaatacaacatggaagcaggcaattatctattggatatcgacctgaccaatttctcaatcgctcctatccaaccttacctgacagatttcacccggatcagtacaatcggcggaatcctgaatactcaccttaacatcgaaggtaacgccgaacatgtaaccgaattagtggttcgtggcaatctgggtataaaccacctgtcacttgcagacgccagtcacaaagaagtcttggctaccgatagcatttatatcgatatggaaacgatcaaccccggaaaagctatttttcattttaacacgatcgctgtcaacggtatcaaaaccggtttcgaactccgtaaagacggaaataccatgagcgacctgttcccagaaactcccgaagataccgtccggggggcggcagaacaaactccagctgccggacctcaaactacagcaacagcccccgatttcaaagtcagcaccttccggatcaataattcgcttttcaccttcaaagatcagaccttgcgtcaccccttcactttcagtctggaaaatatcaatctggttgccgaccaactgagtctcactcaagaaaataaggccaaagtcagcagtaccctcaaaaatggagggaccattattttcaactacgaagggaaattagacgatctcagcaatacagatatcttactcagtatcaataatctggatttaaaaactttcactccttatagcatgcaatatttcggttatccattgcaaaaagggatcctttctttcagcagcgtgaacaatatccgtaagagtatgctggacggacgtaataacctgaatatagccaaatgtgaagtcggaaataaacacaaagatccgaaacccgattataacatcccattgaaaacagctttatatctgatcaaagacaaagacgatctgattcgaatggatttacctgtaaaaggagacatcaactctcctgaattttcttaccggaaaatcatttttaagaccctgaccaatttattggtgaaagtagccgtttctccggttaactttctggcaaattccctcggtttctctccagaaaaactgaaaaatcttccattcgaagcagtacagaacgactttactcctgaacaattgactcaaatcaaccaattagccgaaattataaaagccaaaccggagatgaccctactcctggaacaatttgtcaatgtacagcaaagtaaggtacaattggccgatttctatgtaaaacgcaattattatctacagcaacaccctgagaaatcacagactaccctgttaccgatcgactacagtaaaataatggaaatagatacgaaagacattcaatttctcaattatgtcggaacccaggtcagtgaggacaaaaaaacggcttatttggatgaccaacttctttcactggccgactcgactcaactgaaccaactgacccaccaattaatggacagacgcaaccaagtcctgaaagaatacctgctccgtcaggaagtcccggaaaaatgtattcgtatttcgaccgcaactgcagaaaaactcgttgcttataaaggtaagaaccaatataccatcggtttggtattcgcaggtgacgaacccgatccggaattaattgcggaagaaaccgaaaattaaacagtgacaaaagtttcaagggatacaaaagtttcagaattgctccaaccgttgtaacttttgtaccccttgaaattgctgtaactactaaaatatcgttttttataaagtttatcatccctgccaagtatttcgttcattaaacttttacttctatcagccgcccctacggccgtaacaaaacacccgcttatacactaaatttattgtcccgataaatttataacgaacgaatatgtagccctatggtcaaccggatttcctgatccgtatatttgttagccaaaggctgggcagtgataccattttcattgtaaaaacaagtttcgtttttagaataacggcgggtataagaaagatccccgaagaacaagcccacattcaatccaatccctccggcataggtgtatattttattgaaagaagcaacatcgtgtttatacggactttgttgaagtccgtatcctcccctaagactcacccgactgttcacccggacctccattccggcccgaagattatgggtaggacgataaagagacctgatcgcccgattaatcggatcataatcgacactccgggataaagtttttattttatccttttcccagtcatcctcataactgccgtaaatccacttcgcaggacgcttgtacttcgcagagctataatcgacatattcataatccacatccaacatcacgtgttgccccaacacaagtccccaacaaagaaacgctctccagggagtccgtacattagccagataccgataaggatcataataggttccataagccctattggatatttcatactcctgtttatcccgtccgacggaaggatcggtaggcgttgtaaaataagtatgaacagaattttcaagtgtatactccatcgtaaaccaggtcggcaaatgaatagcggcccccaatcgaatagccggtaccggacgatagataagtcctagtttcaaattgatccccgtactctggtacgacggtattgccggaattcataaaaaaccagaagtgaaggagtattttcttctgcaatctcggaataaagaatacgttgtttatcataggtccactgtataccgagtaccgctccgaggtataatttatctttataattcgttcctccggcaattgaaaactcgcctaggtaacctttttcccggatctcctgatattgatcgacccattcggttgtttctccatcggtttccaaaatagaatggtaactttcattttcgtcctgatataacaaataggtatcataaaagggaccggttgtaaaaatattcaattcatccggtttgtatccctgactttgccaaacatagacatccgtcagggaagtcggggaatgatacacctgctgccgggtattttgaatattgttcgaaagatcagtatacgaaaagcccaggttaaaacctttccaatcacttttttcatccttcacgtaccctgacagtacccctcctaccgttccgatcagataagaagctttccttgcagtcagctccccggattcattcccggagaaattcaataccgaagtataggtaacactagatttacggaaaaccccgatagcggcaggattcagattccaggaagaaatatctcctcccaaagctccgaaagcaccgcccatagcagctgcccgagccgatcctgcataagacaaacgggaataattcaatatttccgtctccgtctgagcataaatcatctccactcccaacagcagttgtaaaaacagtataattcttctcataaaccggtcgaactaataaatattgcgacaaattaatattttcagccaggaaatcattgcatttcttaaaatattttccgcgttttatctaattttaagagtaaactaaaaaccttacctcatgtaaacgttttaagttgcatttttatactaaataaatggatataattgcaaatcgtcaattttatatgtaaaatctgttaaatcgtaagttaaaatcgatttttacttcacccttttaggctctttaggtgttttatagatgtaaatttaatataaaattgaaggttgatatgaagtgtagatttttattaacagtaggggtgattttatggagtacctggagcggttttgcaattgaaaaaacgacggtaagtctggataatttggtcaaaacatttgaacaaaatccggcaaaccctcaaacgaccatgcaattattaaaagaattgagtaaacaagggaagtcgggacaagatatactgaatcgttatttcaaaacccaaagtgaagccgattacttcaaagattacaattggatgatcgtacgggattatgtgaacgacatcaatgcacctcagctcaaatatgtttttgaaaatcaagataaattcatccagcatttttccaaagacgatgtttttcagaaattagacaatgtgttggtaaaccatttggaacaactctatctccagaataaggcagattacgaaaaccaaatgaagcggatcaaagaaaccggatacgagcactacgatgttgtattggattatttcaatatcaaagaactacggttatccggaaatgccgaagattatttttacaaagcccggaagttatttcgctatttcccggaaaaccggaagatgatcaaagaaatcactgccggagctctggaaatcatgaatgatgtttcccgcctgaaagtgatccaattatgggcaggaaaaactgtcgaatcgaagtccgacttcgacgcgatttacaattatgtcaaaatctccaaaaaatgcgggttcaacgacattgcaaaaaaatatgccaacatcgccaataacctggctaaccaatctcaaaatcaattaatgaaacaacaggccagtgaattgatcaggatgttgaattaagattctggcaatacaattacaacggtgccaacagtttaaacgggaacaagggtttaaaacagagtggcaccgttttttagtttctatagttacaacggttagacttgacttctgaaatctttgtaacagtggagatttaattgtttgaaacgtaggtttatttcgttactaattcgtctccggtgatcggaattggcgacccggtcgctcctgtcggtcgtctatctttttctttcactgaccggcggaactcctcacttcgttcgtcaaacaccaccggtcggacgttcagaaaaagcaagacgacactcgccagagctccaatggtctccaatcccgatcaccttcgacttgcgttatcactgaattacagattagtcttgatttgagaaatatcaatctccctggaaataagccggatgttccggcttcctattgttgtagatttccgcttgtatttcctttgccggttaagctctgccgtaagatgaagggttttatgcctgaagaccattggagcaggaacgagggtccggttaggttttccgaacgcctgaccggtggtgtttgacgaacgaagtgaggagttccgccggtcagtgaaggaaagccttagcggaccggtccaggcgaaccggtctgacggtataaaacccgaaatcggaatagaaagaaaaaattatacctacgtttaaatccgttttatatcctctagtctttctttgcggaagctctccggtccaggtggttgtccaaagcatttatttcatacttcgtgctctttttcctaaaaatttcctcaataattattagctttggagatctaacaataaataacatgaagaatctattttccacccttatcctgagccttttggccctcggctgtacccaacaacagcctgagtccctgcgtttagcgactttcaatatccgttacgataattcgggagacggtcccaatagctggccacaccgcaaagacagtatatgtgcttttatccacagggtcgatcccgatatcatcgacatgcaggaagtcttgcatcaccagctggaagtcttgaaaaccggcttacccgaatatacagttgtcggagtcggccgggaagatggaaaaacagccggagaatatgcaccgatcttctttaaacaagcgaaatataccctattggaccagaatactttctggctttgtgaaaaaccggacagtgtcggaatggtcggttgggatgccgctttgacccggattgcaacctgggtaaaattacaagataagaagacaggacaaatccttatggtagtaaacacacatttcgatcacataggtaccgaagcccgccggaacagtgccctgctgattatcgaaaaaattaaagaaatcgttgggacttctcccgctattctcaccggagattttaatgtatcggaagactgggatgcctataaaacaattaccaacaacgaatttattctgaaagatgcccacaaagtggccggaaaacggacaggagtggatttcacttaccataatttcggtaaaataccggccgaaaaatgtgaaaaaatcgattttatcttcgttaccccacaaatccgggtaatcagttcgtacatccctttctcacaactcaacgacaccctattcttatccgaccataaccccgaaatcgtcgaattggagataaaatagagttgctgagttactgagttgctgagttgaaagagttgggtcttcccctttaacttactctacaactcagtaactctattaactctgcaactctacaactcaataactcagcaactcttttcaactcttctcctccagcccctttatcattgttttaaacaacggatcttcttcgctccagccacacgattttatcgttcggcgaatcgcctgaagtccttgtttacattgtgcaggagtaccctttccgataagcattccatttaattgtaaagttgcattaaaacgttcatcaggtatcaatttcgaaaaattacgcctatacattttcaaagcctttgtcagatcattgtccacataagcacgggtaaagccgatgatatccaataaataatccatcctttccacacccgatttttcaacaatcgaacgatattcctctaaagttgccggatcttcagggcgatttttaaaaatcatatcattacaatgatttccaatcagaggcaacagatctccccatattttagcattcacttcctcttttcctacgttagtctcgaaatcgcttttatgtttaagcaaatacagatactccggagatttcatctcccggacaaaacgctttaccaacggccaggtagtagccgaagatttcgaccggtcgtccaaagtctcccaatattcatgcaacactttttgcatatcgtctttcatataagcatccgaaagcaatccgatatattctatcataaattgcggattccgttcgccttgccggtagcggtgattgaaagcgtataacgaattttctccactccccagctgcacctgtttcaaaaattcctcagcagtcatgcctcccaccattttgtgtctgacttcgcctgctgcatccagaataaagaaagtcggatatactttcactccatatttcccggccaattccttcccctcttcctgctccatatcttgcttataattgacaaaacgggtattcatatactccccgatatctttccggctaaacacctccttcaacatcttcttacaaggtccgcaccaactggtataacaatccataaaaaccagtttattctcttcccgggctttctgaaataccgctttgatcccggtttcctcaaaaacaacctgactctgtaccggtaaggtcccccccaacaacaccgcaatcacacttaatacacttattttcataaccttaaaattcattctgactattcagtgactacttctgaaagatagtcgagtatctctcctccccttaaatcccggcggataatatatccttccggatcgaccacaaacgaatcgggcaatcctctcagattataagcatctaccaaaggactttttttcattcctttcagatcggtcagacaaagccatccgatctcctctctcttcatatcccgaatccattgttcacgttcggtatccatcatcatcgtaatgaaaacaatattccggtccttcagttgctcataagctttccggatatgcggaatttcttttttacaccaaccacaccaggaagcactgaattctacgaataaatattttcctttaaaatcagccagcgtataagttttccccaaagtatcgaatacctgaaaatcgggaaatactttcccggcagtcaataagcggtcattctcggcaaactgtttcatctgagcgacatagtaggaattacggaaggaagaatcgaaacgttccacgatacgctccacccgatcaccggacatcggggaagaatactgactggctaaatacgctaccacctcactatgcgaagcttccggttctttctcaaatacacggtcgatcaaaacctgatatagcgagtcccgcaccacactcatcgaacgcacttttaccatatccgctttgtaaaatgccagttgaatagaatcggtcagcacagttgcctgcttgtattcgggcaaatttttcaggaactgctcacaagcgatcaactgttcattcaaaggagcattctccacctttaaactccctttcatatcttcccgttcactatatactttcattatagtcggttgcagaaataacctgaccataagcataaaatttggctgatattccggcttaacatcaaaaaataacatacccaattggggatcgtccaacttccctttcaacttatattttccttcccggatttcacaactgtccaagagtaaattcgaaggaggacaagtgtacaacctgacccagccttcgggtaaacctttaatttcacccataatcgtgattattccggactcacgattttcacaacctgttccccccaatcccaggatcagactgaacaagagtatccattgattcattttcatcattccggttactatcgatttcacaaaattcagacttacttataattttcgcggatcacttgtatcgtttcctcccctcgggtatttttcgaaacgatacgtccgtcccggtccagaataatcagacaaggaataccccccacataataatcataggccatacctccttttttccacgacatgacatccgacaaacatttccagggatggttttctttcctgacatcttttacccaatcttcccttttcttatccagatacacggaaacaatctcaaaatcctttccctgcatttctttgtaaaccgcttcgatataagggatctccaccttacaccaatgacaccaggaagccgtaaaatcaagcaaaatcatcttccctttgaaatccgacaaacgatatttttgtccatttacatcctcaagcgtaaattctggtgctatctgtcccccagccataaccctttcccgccgaatccgttcctgcatcctttccagatagacagaccattctatatccggagccaaacgctgcaaagcgttttccaactcatcgacagacaggaatgaaaaataactatgaagcgtatataccattgctgtactcttcggagcaaaatccaaggcaaacaactgatccaaacagggctttaccattccgtcaaactcggtacacttgattttataggcaacggaatcttcggtacgtgacaaactgtcccgctgccattggatctttttcagatgtcggaatacctctgcagaattgattctttcccattctgcctgtacccggctaccggtaatctctgcattctccaattttttttccacctcggctttcacccgaatcggagtatttgcattttcggcaagcaaacggaaagagtaagtaccccacttgtcgcatgcagcattgtctatcgccagaaatgtcagctgtgtcggatattcgatggaaaaacgataagtgaaatgtccatttttcacctcaactgtatcaacatcataatcatccaatgtctctgtcataacacagaaaaagccgtccccgtaccctttcacctctccctctacaacacattcttttgctttgggtgaagtgcatgaaaagcaggcagcaataaaaattgctgccccatatatacaatttttcattcgtctgcttatttgaacaatttgttaatatactcgatcatgggttcccggcgtaaatccctggccatgattttcccttccggatcaatcagataaatcatcggaatccctttcacatggtaattttgggccaccggaccactataggctttcaaatcggacactaccggccaaggcaggttatactctttcacatctttctcccatttttcccgatcctcatccatattaaccgtaaacattacaaaattcttgcctttggtattttcgtaaacggtcttcagatagggaatctccagcttacaccagccacaccaggaagcactgaattctatcaatacgtattttccccggaaatccgacaatttatacaccttcccgtcaatatccgataacgtaaaatcgtatgccggctgtccgggctgcactttcttctccttttcccaattgtcccggcactcagccacaaatacattggaattcagggaagcatcgaatccggccaatgccttacccattttatccaaatcctccgcaaaatactcccatacgtaatggggagccacctgactggtcgcataaccgggcaaagaaacgatataatcgaacaacttgttgtaagcctcctgataatggggggtcaatgaatcatatctggcacggtcgtctttaaaggctttgctccgttcatacctgatccgaccgaaattccggaacacttctgctccgtttttctctatcctctgatattcgtcatttgttttactgccggtgatttccacttgtttcagattattatagtcccctttaacctgtacctgactgttatccaagaacattccgaaagacccctgcaattctccatcttccttcaccactacaaaagccacccaatgcggatcggtaacttttcccttgaacacggcctttccgtccttcaactgaatggtatccgtataccaggtcgtcggatgcgggatacgctcacttacataaatctgttcgttttttgcatttttcaaatcaatagtcacttcataaccgcccggtttggaagtacaggaacagatataaaaaactgttacaatcaaaaataaaaatttctccattt

SEQ ID NO: 5798 - DNA, 70819 bp, Unknown
  gut microbiota DNA sequence
ccactttaccccacttttttattaaaaataacgcattcccaagcaggacaagtatatgaacgacgaagtacccatataatccgcaaaacgaattgtgcacaattcgttttgcggattatagtatttggcaacacccgtaccccgatttttaatcagagaacggctaagcctttcgaaggctatgctttccctaaggttcctccatatatcagctactataaaatcaatttaaacctatattaaaaccaatttatctaacttttaatatggatttaatgtgaatttaacctgaatttaatctggatttgaagatacgaatcccaggcggatcactgaaaacaaaagaaaaatcaagcaaatccttgataatcagacattagcagggatttcttttttctggcagatagcagaaaatagccgtttcaagcatattgttggtgtgcaaatcgtggtacataaatcaggctgaaaaaagtcccacgatttagcttctttctcactgattcatagcattttgcatggtcgtactttggaagagaatacatagttttgtaactctaaaaacgatgtaaaaatggctagaaaaaccttcaatgtgctattctttatcaagaaagccagattattaaagaatggagaagcacccgcgtgcatgagaattactgtaaacggctgtatggtagatgttttagtaaaaagaagctgtcctgtaaatctatggaatcaggcaaaagaaaactccaaaggaaaagatcgtatgtcggtggaactgaaccactacttggaaatcacacgctctcgcatacaccaaatttatagagaactggaatccacaggtaagactattacagtcgatcttatgagaaagctatattatggggtggatgaagatagtaaaacgctattgcaagtattcagagagcataacgaacaaagccgtaagctaatcggtaaggacttcgttagtaagaccgttcaacggtatgaaaccactacccgatatttagaggaattcataaagaaagaatatcaattatctgatattgccctaaacaacttggaagccaactttatttctaagttcgatgcttttttgaaaattgaaaaaggttgtgcgcagaattcagctatcacccgattgaagaacttgaagaagattatccgtattgctttggaaaacgactggataaagaaagatccgtttgcttactatcgcttcaaactggaagaaaccgatcctgagttcctgacgatggacgagattaaaattattcttgcaaaagaattcacgattaagcgagtagaacaggtacgtgacgtttttatcttttgcatttttactggattggcgttcagcgatgtgaaagatttatcacccgaacacttggtaaaagacaacaaaggggagctttggataagaaagaaccgccaaaagacaaaaatcatgtgcaacattcctgtgctgcctgtagcagcttctatacttgataaatataaggatgtggcagagtgtaccggaaaacttttacctgtattgtgtaatcaacgcatgaacagttatttgaaagaaattgccgatgtgtgcggaattcataaaaatcttagcactcatacggccagacatagctatgccacttccgtgtgccttgcaaatggcgtaagtatggaaaatgtagccaagatgttaggtcatgcagataccagcgtgacgaaacactacgcacgggtactggatcagaatattctaaaggatatgcagaaagtgaatagctgcttgtcggaattggctatataaataaggcagtagccaatatagaaaaaaggattgggaataatgaacttcattttctcaacccttttcttttaaagtaagttttccagaacccaatatgaagcattgacaaaggtaatttccgtatttagcctgttcaagtccaagccttcggtttagataaaaatcttcctctcattgcatttcgagcgtatttttatctaaagacttgcacagactaaatacttcactggaaaagtcaatgattcaaattaaattccgaaaaacaatgtttttgtgagtggcagattattctttccaactttcaaaataatgcttttggagcagtttatcaatatcgctctggcgatagatgattttaccttttatctggataaaggggattagccctgtatctcgccactcttgcagggttcgcaaactgacattcagtttcttggaaacttcattattagaaagaaagcgttccccgttcaggtggggcttgtaatgcttaactatagattcaataccgatcagcatcgaatcaagcgaagaaataaactctttaatttgcagggtatctttatttattagttccatgactgaaagattgttttattgaaatattgatttcaagattgctatatggctgattagttgcgcagatagtcaccaagtgatgaaatgctaagtacatcttttgccggatcataatctacatagagtcgtttggatgcactggtaataaaatactggctaccatcttgctgtatctcataagtagcgggtgaagcttgtttagtggtttccgatacatatataatagaaagaaggtactctttatcgctccgataaatgattatcgtaggattcagattaatgctttcccatgtgcctacaatggaaaacagattgaaggacggataatcttctttagttcttttcataaggcgtggtttgtttgggtgactgattttgtgtttcactgtccgcaataattctttcaatatcggaagacttataataaatcttgctccctatttgagaataagccagtcgcccactacttcggtaatattgcagcgttcgcttgctcaagcctaacaacaggcacacttcctgactatccagccagttttctactttttgagtatgactgctgcacaaactctctatccgtttggcaaactccgtgaagctctcgcagacatacgaaaatgttcttttttcgatggttactacttccatacatttaatttttaatggttaataaaacgtgttgattctattttcatcggcaaatgaaagaagaatcaagagccgttttctaaactgtccgagagtggtataaaaagactgtttatggcaaaatgacacatgaataatttattagtcataatactcttgcggcacaactatcaaaatgaatccgagttaattaatggcgacaagctaaatagataaaaggtagaatgacagaaaagagaagttttatatgatacatttttagcatattcgattaatcattactaaaatgggaatcatgaaaagattaaagtagtttttacacatgatttataacctgcgtattaataatagccatggaaagaggtcagaataagaataacaagaggatacggtagaggcaatacacgtacttatgactatggtttggcgtgaagtggctctgctgatagttacatacccttttttgtatccctacaaatagggattgttttatagaaaacacccatttgtatggattgttttatttttgaaatacaacgtactttgtattctaataacaggaactacgttctgacctatgcaaacaacaaaagaatatacacataaattattgttggaaacagcaaggagagcctttttcaagaagggctttaaggctgtgtctatgcgtgaaatatccaaattgtcgggtatcggtctgagcaacatctacaattattatccttgtaaggacgatttgttggctgacgtgttgcatccgcttttggaggcgatgaacagtatgctggaagatcataatcgcccggaggccttttctttggatgtctttacctccgaagaatatcatcgctcatccatgaaggaggtaatgaacatcgtaagacggtatcgtgaagaatttaagttacttttttcatctatccaagactctcgtttcaatgattattgggaacaatggattaaaagaagtacagtaatgggtatagaatatatggaaggtatgaaaaagctctaccctgatctgcataccgatatttctctattctttatgcacttcacctgctcatggtgggttaatatgatgaaagaggtggtgcaacatgaagagctttccagtgaagaaattgaatgttttattggtgagtatatccgctttagcacaggaggctggaaaaggctcatgaatgtaaaaatagaaagatgaaaacaaatagaaacatccacacatcctcctgcctacaatgcaacccttgtggaagcggttgtacaattgtggacaatcggatttctttcgtattcgattcggaaaagaagcactttagccatcttctgttcgacccgacacccgttgcttgcatgggcagatgcggcaggtcttgtcaagcaggatttcgcttggtgcaggaggctaaataccgcaccacttcggtagaacaactaaaaacaatcaatatatgagtatcaccaacatcatctgtaacggcgaaataacgcttgtgcaaggagtaaacggacttttcctctgcgaggaatcgtgggtaacacaaagcagaaaatccgctctgcccagagaggctttgaacaaagagactattagaattaaaaaagaatgcatcgatattgaacgtccagagactgattttccagacttaacttagtaacagatgtatgaaacatcccatttttaataataataattcatcgtatcaagcgagtcgcctgcaaagagcgactcgctttgtttttgaacaaaatagattttcgttctcttttgaagtactaactcccaatctgtcatagccatgtcacaacaagtatttgttccatttcttctgacactgtttgccggtatatccaccggcataggcagtgccattgcttttttcgccaaacgcaccaacacgtcgtttctttctctatcgctgggcttttcggcgggagtcatgatttatgtatcgtttgtcgaactgtttacctcttctgtgcaaacacttgtggagatgcacggcaaatcagaaggaacgttttatgccacgctctctttcttcgggggtatcgtgttgatattgctcatcgacaagctaattcctcgctacgagaatccgcatgaaatgcaccgggtggaagaaatgagtgaaaaagcgaaaatacaattagacgtgaagcccaaattgctacgtgttggcatggtaacagccttggtgctggctatccacaatttcccggagggtatggttacgtttcttgctgccctaaaggatgtgaacattgccatacccattgccatcgccattgccatacacaacataccggagggtatttcggtatccgttcctgttttttacgctacaggcaaccgcaagaaagccttttggttctcgtttttgtctggattggcagagccggtgggagccgtcataggctatctcgtgctggctccgttcctcgacgacaatgtgttcggcatcatcttcggcatgattgctggcatcatggtatttatctcgctcgatgagctgttacccgcagctgaagaatacggtaagcaccaccatgccatctacggtttggtggtaggcatggcggtcatggcactaagcctgctgatgctgggttagcaagaagaagtaatatagaaacaataaataaaaaacagaaaaagatatgcatacatctcacacttaccactgtcatgagcacgatgctcacaaagagcatactcacgggcgtatattttttaggtatcgcgcacagcaaataatagacatatcatattagtaagaaaagacttaaaaacaaagaataattatgagcataataaaaaacatctttcaaaacttccgcaaacccaagaatagctttatgggcaggtgcattgtgaaaatgatgaaccaagggcataaccggatttctctttggtgcattgacaacttcgtaaaactttccggtggcgaaacggtgctcgatatcggttgtggcggtgggcaaaacgtagctaatttcatcaaacgaactcatggattagtttgcggcatggattattcacccacgtgcgtggacattgcgagtcgcaagaacaaggcggctatcagtcagggacgagcatctatagtagaagcgaatgtttcaaacattccttttgacgataaccgcttcgatattgtaaccgctttcgaaactatctacttttggaatgatatagtggaaaacttcaaggaagtattgcgtgtattgaaacccgaaggaaggttctacatctgcaacgaggcatgcagcgaggaaggcaatgaaaagtgggtgaggaatatcgacctgcgcatttactcacccatagaaatacaaagaatgctggaacaagcgggatttataaatgtgacctacgacatctcgccggagagccaatcgcaacgaatatgcgtgcaagcgacaaaacaaccgatgatgaaaccaatagacagatgagcatcaataaatataccccgatacatcgggttctgactacctatccgcagttgattcatcgactggtgaaacgagacagtcgttatgtttctttaatcaatcctgtatcaacttgtacgttggggcattgcactactattgagagcattgcctttacagtaggagacgatatggagactcttctcacatacctcaaaggagaaatggaacgagaagatatacagttcaaatattgaaaattactactaataactgcccgaaagggcacaaaacaatatcgatttatgcttatactttataacaaagcagcccgcaaaaatctttccaagccgaaggaagctgccaaatggtatcccgtgctacgttctacgggtatgttgaaagaacgtgaagtgcccaaactcattgctgacaaaacgacactcaaccccaaagaggcgatcgccagaatagagtttaaggatgttgaggtacttacacaaaaagtaaccgaaggaaactcttcaggtacaacacctatagtcgtttccacgccggaagctcccgatcccagcatttaaggagaaaccaacaatcatataaataaacaatgaaacagaaagtactattttctctattgatactgatgctcatgagcatcagtgtatccgcccaaacaggtggggggcggattgcgggcgtggtcatcgacaacactgacgaagatccactgcccggagcaaccctctttattgaggaactgaaaaagggcgatgtaaccaacaaatatggcgagttctctttttcagacattcctttcggtacttatacattcaccgtgaagtttatgggctatcaaacagcagtccaaaaagtaaccgtaagtaaagagaatgtaaagaaaactattatccgcctgaaagccgaagtcaaatcgctggacgaagtggtggtgatgggcaaaagtgaagcccgcaagattcgggagcaagccatgccggtaacggtttacagtatgagccagttacaaggtacaataaatagcgtagaagatattctgactaagaccgtaggcgtaaccattcgttcgcagggagcagtaggcagtgcctcgcgtatctctgttcgcggcttggaaggcaagcgtattggattctttatagacgaagtaccgatgaacgataattccgatttcatcgacatcaacgatatacccatcgacatgattgaccgcattgaaatatataaaggtgtggttccagccaagttcggtggatctgccgtggggggtgctgtaaatatcgtgattaaagagtatccacctcgttacttggatgcttcgtattcgttcggtagcttcaatacacataaagcaagtagcgtcttcaagcggaatctggtcaaacaaggaatagagttgggggcagcgttgttatacacccattctgataatgactatcgtatggaattgcctcagaacaaaggtaagttcataaaacgcgaccatgacaaattcaaccaatcggggggagggatatcgatgaaagcccgtaaatggtggttcgatcagatggagtttgaacttgaatttatccgaaacagcaagcagatacaaggcgtggtagagaacatacgctctgccgaaagtagtgccggagcttacaacttcgccattgatttacagaaagacaatttcctactcaatggacttgacttcagtagcggcacgggctatgcctattctcaatacaactttgtggatacagctaggcttcgctacgactgggatatgaatccttatccgcctgtttcggcttacggaggagaaataggagttttaccctctgacatgaaaatgcgtaagcataccgtgggaaataagaccaatctcaattacatcatcaatgaccggcactccatcaacctcaactcattattcaaatgggcattggggaagccctccgatccgttgttggataaagcggtggggcgacagataaacttcgactcacacatgacgagctgggtattaggtttgggttacgactataaatcccccaatgacaaattcctcaactcgctgacgggtaagtattattactattccatgaatacgaaaataggagatgtttggaattccgtacccaaagaagtggatatgcagcagcacgattggggtgtaagtgaagccttgcgctaccgcttcaccaaagagttgttggggaaagcctccgtaagctatgatgtacgactaccgacagatgccgaactcattggcgacggcttccttattgctccttcgggcgacttgaaacccgaaagaggaactaatgctaacatcggattgatgtacgataaaaagattggttccggattgttgcaggtggaggtaaacggattcttctcttacctgcaagatatgatacgctatacgcgcaacttcgtgcagggcagatacactaatttcggtgagatgcgtaccttcggtgtagaggcagaagtcaaagcagatgttacacgctggctttacggatatgtaaatgccacgtttcaagaccttcgcgatacacgtaagtacgaaccaacgagtaacgttctcaatccgtcgaagggattgcgtatgcctaatattccctatttcttagcaaatgcgggggtagagtttcacaaagagaatctcttcggagggaaaggtcagaatgtaagactatttaccgatgcttcattcgtagaagagtatttcttcgatttcgaagtaagtcaatatcaagagaaacgcattccgcgctctttcaagctcgacttgggattagaatactccatcatgaacggtgggcttaccttctcggcaaaagcatccaaccttacgaatgcccgcctgttcagcgagtttaattacccgcttcccggcagagcctttaccgcacgtatcaggtacgtgctgaaataaagctaatcacaattcaatatattattcaacaataaaataaaaagtaaaatgaaaaagagaatcaacggagtattactcctcctaatgagtatcactatgctgttttcagcttgtagcaaagacccggaaacgaaaccaatcacgaccgatccggaagtaaaagttggcgatatacttgtttacaccatgcttatgaatcccggtggacagaccgggtcaggttggatgcagttagcagatggagtgtctcccaagaaactgacaaacaaaaatgccgtgcaagtcggttacggaatgatgccagtgtgcaacggtaatgatgtgtacacttttcctgcgttcggagcacaaggtgatgaaaatgtagtaacaaaatgggggcgttcgggaactaaactcaccaaaacggcaaccatgcctattccccttaattctgttccaagacacatctcttttgttaatgcaacaaaagcctatctgatatcacttatcggcaagttatttatattcaaccctcaaacgatggaactaactggtgagattgatctgtcctcttacgctgcaccgggattggccgtaccgatgtttggatctccgtttgtgcataatggacgtttgtatgtaacactgaatcagacagacatgacattccaaccggctaccgaacctcagatagaactcgcggtaatcaacactcaaacggacaaggtggagcgtgtcatctatgaaaaggcgagtggtatcggtatcggggcttatacctatgggcaacaaacctttatcgatgaaaaaggcgatatgtatctgatgtgcacgggcgcatacggcatgaatcctaagtacaagaccggtatcttgcgcatcaagaaaggcgaaaccgaatttgaccctacctataattgggtgttgaacgatcaaacaatcgaaggcgaatcgggcaaaaccgtttggctgcttcaatcacaatacgccggcaacggaaaaatgtatgccacgatggatattccttcttattgggcaaacccaacatctcccaactggttcacggataaatcgctcatcagtgtagagatggatatttacaataaaacggtaaaaaaacttccgataccgatgacgtcaagctttggaggagcagtggagaaatacaagaatcttatcgtgtttgctattaatggcagaaatgatgtgggcttttatacgcataatcctgcaaccggcgaaacaagctcggatgccgtagtaaaggtagatggagctcctgcatatttccattggtttgaaaactaagtaataatcaatcactcagaagaggcaaaggtgagagttgaattatcggcctttcctttgctctcattttttagcccaaacatttattaatcttgtttctccattcagaaatggctattcaagggtttcaatatcacacacaataaataaaatttcgtatgccaataaacgatttcattcaatttcacttcggttggctcaatgcatggataccttcgtttgcattggtgctgatacaacttttgtatatgattctttaccgagaaggtggcaaacgtgccgtagatacatcttggtatacctctaaggacaagcggtacgccactttaagctttgtgtttcagggaacattgcttttggtgtcgctctttgtccctctccgcataggtacaccgctattcacggtggggtgcgtcttgtttgcctttgcacttgtcggatttatggcagcctttcatgcttatgcctctacgcctaaaggagaaactgtcgtacgaggcgtttaccgcctgtcgcgcaatccgatgtacttcttctatgaagtgggagcattggcggtttgcattgcctcggcatcgttgtggttgctgcttgccacaattcctttgatcctcgtcacgcatggcgttatcttgggtgaagagcgatactgcatgaccacttatggggaagactatgcgcggtacaaagcgagaactcccagatacttcttactcaaatagcaaccttatgaacaatctctctcaaatactcaattccgccacgatggggcagccccgtcgcttgcgtccgctgataggctggacggttgcggagtacttttttcgtggcgcaccgtatggggcaatgctgctcgtggtgtgggaggtattcaaacctctgcaaaatcccggcacaccgctcaacctcgtgaacataggttgggcgtgcctaatgcttctaatttctctcgtttgcctttggctcattagcaaaaaggcataccttgtagcctataaagacggctacgacatttgttgcgatggtcgtttggaagtggtcaatcacctgcgccaactgccgatgagtttcttcaatagtcgtgatcccggcgacatcggggcatacattgtcagcgactataacaacgtggagatgctcactactcaccttatcggtcagttctttggcgggctggcgatgcccatcgtcgctttggtttcgctctcattcttcaactggcaattagctttggcggcagcagctgtcattccattggcataccccatgatgtggctcaccaatcactttgtggcaaccttgggcaagaggcatcaaaaaataaagaccaatgccgcttcgcgcatgatcgagtatatacaaggtatccgcctgattaaggctttcaacctgagcggcaataagtttgaacgcttggaacgagctttccgtgatctaaagcgggagagcatccgtttggaagcggctcccgcacccagcatcacgctggcttccactctgctcaatggcggcctggttcttattatgctacttggcttctcgatgttgttaaatgccaaagtctccatgcccgtttacatcatgttcctgctggcaggatcggctatctatgccccactcatcaacgccttgacctttatcgccctcatcaactacatgaagctgggagccgaacgcattgatgctctttgcaaaacgcccgtacttccggagggtataatagaagatgttgtcaactcagagatagagttccgtcacgtcagcttcagctataatgccgatattcccgtacttcgggatgtatcgcttaccattcccgaaaaggaactgaccgcttttgtgggaccatcgggttcgggcaaaacgacattgacacgactcattgcccgtttctgggatgtaagcgagggggaaatcctatttggcggacgaaacatcaaagactacaccgtgcatacactgatgcaacaagtttccatcgtctttcaggatgtgtatctcttcaacgataccatttataacaacatccgcgtgggacgtgagacagctacccgcgaagagatagaagttgccgcacgcaaggcgcaatgccacaacttcatcaccgctatgcctgatggctacgaaacgatggtgggtgaaggaggtagcacactatccggtggagagaaacagcgtatctctattgcccgtgccattttgaaagatgcgcccatcgtgttgcttgacgaggcaaccgcttcgctcgatcccgaaaacgaggttcacatccaagatgctatcaacgacttggtgaaagaaaagactgtagtcatcatcgctcatcgcttgggcacggtgataggtgccaataatattgtagtgatagaccaaggacgggtggtgcagcaaggcaagcatcaagctcttttggcagaggaaggactgtatcgcaatctttgggaggaacaacaacgggtaaaaggatggaagttcaaacaatcgaataaacagtaaggctatggatacaaataaacgcaagaccgggctggcacggttgatagaaatagccggtactaaacgtcggctgctcatcggggcgatgttgttggcagttatcaccgccatcgtgcagtttgtgccgatcatagcggtgtacaatattctcatcgagttggcagagcatgcgcttgatccctcattgattgacaaggcatacatctggctgtggagctatatcgccttgggagctttcttcgctttcggagtgctcacgtttgcttccctcatgctctcgcacattgccgctttcaacattctgtatgaaatacgaatgcagctagtacaaaaaatggttcgtttgcccttggggttcttttcccgccgggcttcgggagaactgaagaaaataatgagcgacgacgtggagcgcatcgaactgtttattgcccaccatatccctgacatcgtaactgccctactttttccgctgattctcgtcagctatatgtttgccgtagactggcggttggctatcgtagtattggctgtgctggcgatggcattctatgtgatgggaagaatgtacaccggcaaaaaaatccgggaggtttccaaacggtatgtggagaccttaggcagaatgaatgctagtattgtggaatatattcgcggtattcaggtggtgaagaccttcaccgaatcgactaatgcctatcgcaaactcaatgacgacatcaaggagtaccgcaaatttgccaacgaggtaaacgtacaataccaacccacatatgtaggtttccttaccatactctcttcggcactgctcttcatcattcccgtggcagtgtggctgcttgtggggagtgcctcgtatgccactttcgtgccggtgctactcatgttcctgtttttcggcgtggctgttttctttcccgtgcttaaactcttgtggataggcagctttctgaatcagaacaacatgggtgtacagaagattgatgacattctctatatggacgaaatcgaagagcctgacattccccgacaccccaaagacgcttcagtggaatttcgcaacgtctcttttgcctacgacaccacgccgatactcaaagcgatatctttcatctcccatcccggtacgataactgcattagtcggtccttcgggagccggtaaaagtaccgttgctatgcttgccgcccgcttttgggacgttcaaagcggagaaatcttaataggaggagtgccagtcaaagagattcccacttcggtgttgatggacaacgtcgcttttgtctttcaggataatatgctcttcttcgataccatcgaggagaatatccgtatgggtaacaagactgcaacctttgaggaagtggcacgggctgcctgtgccgctcaatgccatgagtttatagaatccttgcccaatggttatcagacattggtaggcgaaggaggcatctacctctctggtggtgaagcacaacgcatagccttggctcgcgccatattaaaagactcccctattatcttgctggacgaagccaccgcctttgccgaccccgaaaacgaaggtaagattctggcagcattctctcatctcatcaaaggaaagacggtattggtcatcgctcaccgattgtctacaatcaccaatgccgaccgaattctgtatgtagataagggtgtgatagccgagcagggaacacatgagcagctacttgctcttaaaggagaatacgctcgtatgtgggaaacctacaaccgagcaaagaggtggacgattggtggaaaaaataaccgtaaattataaatacaacaaaatataaccggtatgaaaaaactcattcaaaccgctggctacgggagaattgtatcaacgcaatcctcagcaaagcaacgcaatttatcaatatgtaaatgtattaattatgaaagacttatcagatttgagatttttccgactattatcggaacactcacagaaagagtttgccgtaaatgattttacggccgcattgcaagaacttgccaatcacttagtaagtattgctataaaggaacaggactacgctgtattattacgttacttctcttttggactaaacaggctcaagtcgtatcgagtacaatttgagcagggggaaaaacgccttgtcattgcttattgatgaagcgataggacttgtaaatacggaaatccgcatactcaatatgcaaattaaatatccggttcaattccaaaaccggaagaataaacttccactctcgccgctctaccttacagacgaaacctatcttattgagattatggagatagttagtggattgttcctatctaaaagagtggtaacgcgcagtggtacagaagcaccacttacagaaatcggaagagcctttgaataccttttcaatattaaattgggcgatgtgcataagaagcatgaaagtgtcgttagtcgtaaaccatcaaaaataaccgaatttttagatacgcttcgtaaagccattaatgaagaaagcaaaaagaaaggctatctataaatcaactatttaacaactatttatggggctgtccaaaaaagtgaagtgcaccctaaaagttggacaggttaaacattatccagttatagaaagagttcggtattgtaccggactctttccatttaaccgggatttgattcttttattgttgtaataatcaatatattcattcaaagcctttataaaggcttccggcgactcaaatttctcggcataaagcaattcggatttcattatgccgaagaagttttcagccatggcattgtcaagacaattgccttttcgggacatactttggattatattgtaatcctcaagacgctgtctgtatccgaagtgttgatattgccatccttgatcagaatgtattataagcccgtcaagattatcggcgtccttcgcgcagctctttctgctcctcggaagtgattttcacgccgcctatctcgttcgggatgtagatttcccgcgcgccttcaggggagtcggggttgtagcgggtgtaggacgggcggcccgtcgcctcgtcgagcttcacgtaggaggagaacagttccccgtccttgcgcttcatgccctccacgaagatggccttgcccgcattgaggccttccacctgcttcttggtcagttccacgcctcccaggtactgccggttgaagagcttgtcgttctcgaagatgaactccacgctcctgcgctcggcattgacctgaatgtgggcgtcgaacgggttgcccgatctggccgtcattccttcgatgaatatcttctttccttcacgcaggtcgttctgttcctgctcggtcagtttcaccccgctgatttcacgtggtatgaagacattctcggctttcatcgccaccacctcgttggtgagcttgtcgatgctgatgaaagaggggacatactcgccgttgcggttcttcagttccacgacacgccccatgttgcccgtctcgagcaggttcttcttgtcctcgtcggagaagatgtgcccgaagtaaggacggtcgaggtcgggtttctgccggataccgtggatgcccagcacgatgtccccggagcgggactgctggaacgagagcctcgcgtcggtgcgtagtacggcggagccgaagttcatgctgatgggcacgacctggttggtcttgtaacccttgagcatctggtcaagtagtccccgttcctggagttcctcacgggagagcccgaagttcttcagctgttcccagttgatcatggactcgttgtagcggtactggggctgttgttgttgctgcgtgccgtcgccttgggcggcctgccgctgtgtttcattttcttttgacatttcttcttgattcttggggttgatactttggttttccttgtcgcgggggacaatctcgtatttcttgagaaattcctccactgccttggtctgctttcctgccgcgatgtcttcgactgcctgcctcacttccgggttatccagcgtgtcttccttgatggtaaggataccgaagcgtgtcgggtccttgagctggctccagaagttcttcaggaaattctcgaacatgctggcgtagcggtcgattttcagaaaggagtttgtatgctccttgtctgccggaaccgtcttgtacctgccgtccttgtcaatttgggatactgcctgtaaaatcagttccattttgtcgaggataaggatgatgtcgctcatctgttcgttctcggcgacttgcggtttagggggatcgtcccttccatttttctttgccataactttggtttttagggttgataactatgattgtcagtgcaaatatataggatgatttctgatatatgattgatttacaatatgttgtactatgtgtttcatcgtttgtcatcctgtttcaccgcgggaggaaaagcgggaggcggaaaaacgggaaagtcaaaggaaaaagtaaggaaaagcaccggattaaaggggcggaaaagggcgggcacacacgaatggcaagccccagggtaagaaaaacggcaggaacgccacgaaaccggcaaggagaaaaccgtattatgcagagttgcgagcgagctgtctttagtccccgcttccttgtgccgctctataagacaggaagaagattttgtatggggaatgtgttgacggcgtaatccattggaacatcaagtccggcaaaataccgctgtcagattgttttttatcttgtcctatgcgccgtaggtcgcttcgcttgctaagtcccggccgtctccacaactcggacggcgataccggaacgttttttcgggtgaaaaattaccgcagggaattttttgcgcgaaaaccgcaggctcgaacgtggaaggtatcgtccctccgagttaccttttcaatgggacttgacaagggaagcgcggctatgatggatttttatagaggaatatggaaaaatgcacatttagcccaagataattgcaatcattttgcgtaagtaatcaggaaatgattacttttgcagaatcattgcatcgtgtgatatgaaaaaggatatagaaaacttgtcagaatggattgaaaacagggaaatgaggggttactacaccttcaccaaggaagatattgaaaagcaattcccttcattgggcaaggattatatgaaaacctatctgtcccgtttggtcactaaagcgaaaatcatttcgccctggagaaatttctatgtcatcatgcctatagagtattcgctgaaagggattatccctccggtcttctacatggatcagcttatggcttatcttgacaagaaatattatgtagccttattaaatgccgcagctttttatggggcctcccatcaaagggctcaaactttttcggtagcggttgaactaccttatatgaggagtacttctaaaaatggcacatccatattattcttctctaaaaaagaaattcaaacggagttcataagaaaacacaaaacccaaactggatatatcaacgtatcttctcctgaactgacagctattgacttgatagaaaacgaaaagagcgtgggtggtctgaaccgtgtctgcactgttttgaacgaattggtagatgtcgtgaatctggacagcctgaatgactccttcttcaaagcatcatctacaccggtctttcagcggttgggatatatcatggaacatatcttggagcgagaggatttggcggaaactttatattccaaaatggaggtcgcaggattaaaatttagaaaagttccgtttaaggtaaacaaaccgacaggatattgtgaagttgataaaaaatggaaagtgattattaaccaagaaatagaaatagacgaatgattcccgaatttgcaatcagagaatggggcgaacaggttccatggacagaaaccgaacaggttgaacaggatttgttgatatgcagagccttgacagaaatttataaggacccataccttgcatcacatcttgcatttcgtggtggaactgccctgcataagctgttcctgtcaccccagcccagatatagcgaggatatcgaccttgtacaagttaaagcggaaccgataaaagaaacatacgaccgcatcagagaagcactttcttttctcggcgagcccaaagtcaagcaaaagaaacataataacactttaatttttagacttgaatcagaaattataccggttgttccgaacacctcaaggtggaaatcaattgcaaggaacatttcaatgtgctaccaatgcaggaagttccattctcagtttcaaacaaatggtataatggagagtgtcatgtcttgacctatcagctggatgaattggtggggactaagttgcgtgctttgtaccaaagacgaaagggacgtgatttatatgacttgtataaagcattgaccctatcagatgtcaacatagctcacgtattggcttgttaccaaaagtatatggaatttgtggtagatcacgttcctacttacaaagaatttattatcaacatggaagataaaatgcaagatgatgagtttttgggagataccaagcagttgcttcggccagatgaagagttcaatccacataaagggtatgaggtagtccgcacacttctaatagaccggttacaaaagtaatgcaaagcccattctttccatccttatcagaagaatgggctttgtaggctttcacctttccctagctttgtctttcccggacaaagtatcttcaaaaattcctgttgtttttcaggaaaaattagatatttttgtctggcatgaaaaatattaatttcaaatatctataccgacgcaccgaacaattgctgatggttccggagactgtatggccggaagccctgaacgaaactaattccggaaaggaattgtatcggaattatctgattcccattactatggttatctcgataatggttctgttgatcaatttgatcaattataatttttggcaagctaccggtctgacaatcattaatctgatagcaatgctcatcggtaactggttcgcctatctgattacacgggaatatttgtgccggaaactctctttcgatacgaacctggccttaaatctgaccgtatacagtggagtgattttcattatttttcatagtattggaaatgctctgggaaatatttttctaggccaactttttacgttgctcagttttacttttatacggacgctttacaaaggacttggccaaatcccccgattgcatccgggccagaaaaccaatattctcgtcatcagttcactggcgattatttgtattccagtcattatcaatcaacttttgatgatcatctttggaatttctgctttcaatatttaatttttcagtttatgcctaacgaagtcaatatacgaaacaaacgagcctccttcgactacgaatttctcgaagaatataatgccggcatcgtacttaccggtaccgaaattaaatctatccgggccgggaaagccagtctggtagattcctactgcttttttaaccggggagagttgtgggtaaaagggatgcatatcgccgaatacaaactagggacttattacaatcacgaagaaaaacgggaacgaaaactactgctcactcacaaagagctgatcaaactgcaacgtaaagtgaaagaatccggcctgaccatcgtaccggtgaaagttttcctcaacgaaaaaggatacgccaaactccggatcgccctggctaaaggcaaaaaggaattcgacaaacgggaaagcctgaaactgaaagatgccaagaaagatatggagagggcgatgaaaaggtaaaaggctaaaagctataggctaaaggctgtaggctaaaggctgtaggctaaaagctataggctaaaggttattcgaggagataaaagagagaggttaaaaagtggggagatagaagttgagagaaagggctgtaaccgttataactgaaaaaacaaaggatagacttgaatactaaaattctgataaacaatgaaaaacacaattattttactgaccatgctattattcagcggtattggatttgcacaggaaagcaacaacggcaaacagttgtgggcaaaatcttttctgaacgaaaaggcaccggaactaaccgtagaaacctggatttctaaaaaacccgatactgagggaaaattcgtcatcatcgacttttgggctacctggtgtggcccctgccggaaagcaattcccgagctcaacgagattgccaaagaattttcgaaagatgtcgtcgttatcggcatttcggacgaaccggtagaaaagattaaagcgatgaaagaacccgttatcgaatattattacggagtagatactaaaaaaacaatggacaaaatcctggaaatcaaaggtattccccatgtcatcatcatcgatccgaaaggtattgtccgctgggaaggttttcctctgctcgaaaatcataaattaacccccgaagtcgttaaaaacctgatcgaaaaatacaagtaaactaaaaaggacgattctatactttacagatagagttgtcctttttcaccatactattgattatatatatccgatccgcaaaccattacagcagttttgtccggtattctcccctataattttattacgcaacaaattctacacacaatttactcccactttttaccttttaccttttactttttactttttattgcctaccttcgcatcgtttgtgagtgaaagattttaatctaatataacaacattatggttcaaggtataaaaacagtatcatttgaagaagctgtcaaagtggtgaaatcgggcgaccggattcatattcacagtgtagcttgtgcacctcagggtttgatccaggctttgtgtgcccgcggacgtgccggagagctgaaaaacattaaattgcaacatcttcatacggaaggcgctgctccttatgcagagcaggaattcgaaggtgtattccagctggaatcgtattttgtcggccacaacgtacggaaagcgactcaggacggttgggcagactatattccggtacacctcagtgaaacccagaaattaatccgtatggggattactccggtagatgtggccatgattcaggtatgtcctccggataaacacggctatgtatctatgggtacttctgtagatgccaccctggctgccgttcaaacggctaaaacagtaattgcggtgatcaaccctaacgtgccgcgtgcctggggagatgccatcatcaaattatccgatatcgatatcttctgcgaagacaacactccgctgattgaagctaaaccggcacaaccatcggaacaggatattcaaatcggtaaaaattgtgccggcctgatcgaagacggtgcttgtcttcaaatgggaatcggagctattccgaacgccgtattgtcacagctgggtaaccacaaaaatctggggatccacaccgaaatgtttgccgatggagtattacctctttattataaaggagtaatcaacaacctgaataaaaaatacgataaagggaaaatcgtttctactttcctgatgggttctaaagcggtatatgactttatcgacgacaacccggcagtagctatgatggacgtaggctataccaacgatccttatatcattgcccagcaaccgaaaatgactgccatcaactctgcactttctatcgacctcaccggccaggtaaacgccgactctctgggatgcaaattctacagtggttgtggaggacagttggactttatccggggtgcagcagccagtgaaggaggtaaaccgattatcgccatgccggctatcacagccaaagggatcagtaaaatcagtccgaccctgttgaatggcgccggagtggtgaccacccgtttcgatgtgcattatgtcgttacggaatacggggtagccgacctatatggaaaaaccttacaggatcgcgctaaagccttgatccgtattgctgctcctcaatgccaggaagaactggacaaagctgcattcgaacgcttcggaagtcacttccacttcattacaaaataaaaagtaaccttatacaaagaggctgtccctaaagtataaactttttggacgtctctttgtttttcaacctattattcgatcttatcttcattgctttacctatggattggaatcaacttttatcagcccatcgttatcatccgggaagtaccacttcgttgtttcattcgcacgaccgttcgcaatttcaacgggattacgaccgcctgatattttcatctcctttccgtcgcttacagaataaaacgcaggtatttccccttccgggtaatatttttgttcacaaccgtctgactcacagccttgaagtagctagtgtaggacgttcgctcggaaataaggtcagccaattcctgaaacaacagcaagtagagatcgaaaatccggaaattctggaagaaatcggaaccattgtcagcaccggttgcctggcccacgacctggggaaccctcctttcggccactcgggcgaagaagcgatttcctattttttcagtgaaggtgaaggcctgtatttcaaaaaattgctttccgacgaagaatggaatgacctaagccatttcgaaggtaatgccaataccttccgtctcctgacccacagcttcaacggacgccgcccgggaggctataccatgacctataccaccctggcttctatcgtcaaataccccttcgaatcgacaaaagccaatcccaaaggattcaaatacggttttttccagagtgaaaaagacattttccggcaggtagccggggaactgggaatccgccagctcggtgaccatccgctgcaatatgtacgccatccgctggtataccttgtcgaagccgctgacgatatctgttaccagattatggatatcgaagactcacataaactacgcatactttcttatgacgaaaccgtcgctattctggaaagcttttatgacaaaaatgaagacaaagaagatctgaaaatcatcaccaaaactttcaagacggttaccgacaaaaatgaacggattgcttttttgagagccggaatcatcaataagctgatcaatgcctgtgccgacgtattctgccagaattacgaagcgatcatgaagggtgatttcaacagtaccctgatcaaacaagtcagcggaacgaacaaagaagcctacgatgcctgcaccgccttagcttacggacgaatctaccatacgaatatggtaacccagattcaaattgccggtttcaaaatactcggaaccatcctcaaagaatatacggatgcagtactgaaaccggaaacttactacgcccggaatatcttatcgatcatgcccgaacaatacaaggtcagtaaggaagattctatgtatacaaagattcagaccgtagtggattacgtctccggcatgaccgactcgtatgccctgaatctctatcgcaaaatcaaggggatcgatttaccggagattaaataaaatcgggaaactttatattcaacgatccttacgtgctcaccccagcaattcctttactttagccgagatcgctttaccgtcggccagaccggccaattttttggtagcggtgcccatcacttttcccatatctttggcagaagaagcacccacttcggcaatgatagctttcaaagcttcagtcagttcagcttcatccagttgtttcggtaagaattcttcgagcacggccacctgcccgctctcctgctcgtacaaatcttcgcggccctgttgtctgtaaatttctgccgattctttcccctgtttggctaatttttgaatcagcttgatacattcggcatcatcgatccggtcattggcccccgggcgggttttggcttccaaaatcactttcttgatattacgcatcgtctccagccgaactttatcgtgagctttcatggcatttttaataccatcgtttacttgttcttctatcgtcatcatcttaatttattacaacacattcaactgattcatcagtcttaaattcaacaagaatatcccgcaaacttaaaaatcatattttttaatgattcaatagttgataaggaactgacaattcttaaaacttttatgcttagaatctcattattaatactgtcttcctttattttttttgcaaaattaaaattaatattccaaaacttattcacagtccgccaataatttaataattgttatgtatcaacaaagttttttaagaccaatgaattcaaaagtaaaaattataatggtcatattcaaatatgccaaatataaatcataaaaataaatatgattgtgagaattctcacagcaataatctatggcagtataaaagaacgacagactacatcggatgggataaaatgaaggactttccagggaattcaaaaatcggggccattgctttcgtaatcgaaaataaagcttatgtaggcttaggcagatctcaactcaacggaaccgtctatctttgtttcggtcataatgctcacgaatatagccgggatgtttataaattcaacccggaagagtttcgctttataccgttaaatactcttttacctgatagatatccgggaattatacgttcctatgcttctttttaactatcgacggacaggaatatgcttatattgtaggaggagaattaggattagatgcagctccaccttattggtattgttgtcgttataattacttgacagacgaatgggaagaagcacctccaatgccaaggactcatccttatgtaacaacattcacaaaggacaacgccggatatgtcatatttaatgatatcgcctataagtttgtatattagtacaaaaaacaagaaatctattattcgaagtagcttatattgaaaagtggttattcccgaaatgagggtaaccacttttttattttatcctatttttgtataataaggttattatagatataatctgagaaaacgaaccgatcagaaccagatgtgaatataaaacctaaatgatatccgtttcgtaatctgataatagattagtaacctcttttatccgatagagtcgatagccattggtatatcattgtcataatataaattaacacatataattccgattggcacaaattttgaagtaaatttggcacatttaagaacaactatgaaactattacttcttgtcctgctactgttggtagcgatccctgcatttacacagcaagattctgtaaaaatcacgacaccgggagataccgtcgttgtgaccgagacctggaccgtacgccaactgaaacaatttgcccgccagcaaaggcgcgattcgatccgtgcccataaaaaagtatggctttccattcttggaggtccttcctataaccccgaagcttcgctgggagtcggtggcgccatgttgatgactttccggatgaaccccgacgataccatcagccaacggtcttttatcccggtaggcttcaatatctctatcaacgggactttcgtcgcagcaggagccggtacgttgtttttcaatgaaaataaattccgtatttacatcaaatacggttatcgtaccgaaccggccaatttttatggcgtcggctatgatgaaatcaaaaaagccgaggaactaaaggaccgttacgataaggattcggtgacctttcataaagccagcatacagttctttccccgttttgtgtgggaagtgaaaccgaatatatacgtaggtacgcttctggatttcaactataattatacgaaatccttggccgactggatgaaaaccaatccggccatcctgaaatatggtaaccgttatcacaatatcggagtaggtgctttgttccaatacgatacccgggatgatgtcgctacccctttcgagggcgtattcctaagcgcaatgggcaccctgtacgggaaatatctgggcggaaattacaattatgaaatgctggaactggaataccgccaattccgtcaggtctttaaacgccggagcacgctggcctggacagccaaaacccagatcggtatggataacgtcccttacagcgaactgccgaacttcggtaatcccttcgatctgcgcggttacgcctggggtaaataccgggataaatcgatggcttacggcattatcgaataccggcacatgtttatgtcgcaggaagcttatgcccggggcgccttttggtcgaagttcggaggggttgcctggatcggtacgggtacgatcggaaaaaccccggccgactgggataaatggaaactcaactatggtatcggacttcgtattcagttacaaccccgcaaaaatttccgtctggatatcggcaaagaacccggacagaaatggggtatttatatgaatatgaccgaagctttctaatcgttcccacagcacatgagaagctctgtaaaaaataaaatcatctggacgatagcccttccgattatcttcggaaatctggcacaaaccctgatcgccttaaccgatacggcttttctgggacgggtcagtgctgtcgctttgggagcttcgatgatggcaggtatttattattatatttattcgactttagcctggggattcgccatcggtatacagatcatcgttgcccgccgcctgggtgaagggcgtctggaccggatcggggtgattttcgagcacgggttgtttttcgtgctttttctgtctacaggtctgtttctgatacaacattatttcaccaacgatattctggccaggatcatccagtcgcctaatatctacgccgctgcagtagaatatatggattaccggcattacggtattatttttgtatgttttaattttttgttccgttctttatatatcgggctgtccgataccaaagtcatcagtttcacgacagccatcatggctatggtgaatatattcctcgattatgtcctgatattcggtaaatggggtttccccgaaatgggtgtcggtggtgcagcactcgcttctgtatgtgccgaaatatccgctacatttttctttatcgggtatacgctcgtcaagcttccgctaaaaacttattccttattctattttcataaactggaaggctggctgatgaaatcggttctgaaactggcttttcccaccatgatccaaaagttactttctttcgggacatggtttattttcttcgctctggtcgaacatatgggcgagacaccgattgcggtgtccggtattgtgagaagtgtttatatgctcgttatgatccccgtatttgctttcggtgcaacggccaatacgctcaccagccgcctgatcggcgaagggaaacaaaacgaagtgatgccgactgtcttcaaaacgatcggacaagggctgatcgccattctgccggtactcttatgctgtttgtttatccctcatacggtgctctctatctacaccgacgatttggtcttagccgatgcctctattccttctttgctggttatctgctgtgcttcgatcgctatgagcttcggaattccactcttcgaagccgtatcaggtacaggtaatacgaccaatgcgttgatactggaatctgtcgtactgatcgcctacaccttttctgtctggtttttcgcttcttacatatccacccgcgtagaatgggtatggaccagtgaatttacttatggaaccctcatcggtctggtgtcctggcttttcatgagattcgcttcctggcagcgtaagaaaatctgaacatgtagaaatttagtatttttgatacgggattcagccagtggcttttgcgaatcaagcggaatactttatctttgcataaaagtcgcgcaacagataactaacgacgaaagcatgagtatggaaaagacatatgcctatgaagtagaaaaaatctttacttcctggtatagttcgctgtgttattttgcctttcggtatgtacaggacgatgaaacggcccggggcatcgttcaggaggtttttgtccgcttaatggaaaagcgacagtcagtccaaagtgagtaacatctgaaaaactttttatatctgaccataaaaaaacgattgtctgaaccatttacgcaaccgtctctcgcgggaacactacctgagttatctgaaacatgaaggagaacaggacgaattcgaatgccggatgatcgaaacggaaattttcagccggctgagaaaagcaatagaaaaattaccccgggaatgccgtaaagtattcgagttgtgctatttcgaggggatgaataacgagaaagcggcccaaaccctgcgaatcagtattgaaacggtaaaagcccaaaagaaacggggcaaacagatactgcgaaaaaatctgcaagagttgtacccgctgttcgccttattattcggtctgtgatttcggttactttttccttaattaatccgaagtcaccggtaaaataaaaaaattcattttcatttacccctttttgcatatcatcgtgtaataatacaaaatggttgcaaaatgggagtaaaaaacgacattactattatccggcttattctgggtcattgggctgggaaactatccgaaccggagaaaaaagaactggacaactggctggcacaatcggaaaaacaccggatttatttccaaaaatggtgtgacgatgaacggcaaaatgagttgttgtccaaaatcggatgctacgaccccggggaagggtggcaacaggtggtccgtaaaagaaacatgcggcgcaaccgccggtggtggctggtagcagcagcttctgtcgctattcttttcgggggactggcagtctaccggtatagcaagattcctgtttctctccccttagccagcgaggagacctctatatatcccggaaaacgcatggcccggctgattaccccttcaggcgaaacagtattattggatacactacggcaaacggatacacagcaaatgaagttgcataacgatcagggacgggtggtcattcaagccgcttgcggagatgcaaacggtgatcaacctgtttaccattgcctggaagtaccccggggtggagaattcagtttcctgttgcccgacagcacgaccgtatttctgaatgccgagagccgtctgcgcttccctgaccgattcgttccggggagtgaaagaatcgtatatctcagtggtgaagcttatttcgacgtgaagcgtgatccccgttctccctttctggtttgcctggaacactcggcggtaaaagtgacaggtacttccttcaatgtcaaggcgtaccccgacgacacgaacgaagcgaccaccttgatcagcggaaccgtatcgatggggatcggcactacggaacaatggatcgtcctgaaaccgggcgaacaggggtattacgacgctacccggaaaacactgttgcagcaaaccgtggacgtgaattattatacagcctggaaagacggcgtgtttgccttttaccggcaacccctggaagaggtcatgaaaacactgggatgctggtatctgttcgacacccattatcagaacgaagcattgaaatctattctttacacggggaaaatcaatcgtcatgcttccatccgggaggtcttgcacaccttcgagctgatggacgaacttacattcgacataaaaggaaaggaggttattgtcaggagaaaataaaaaaagcaaccgcttcttcttgcacaagaaccggttgcaaacttgtataaacaatttacaaatcgttttaacacaacaaatttatgaaaaaaaacaatcggttgttgccggattggaaagattccggtggcttgcaacaagtaagcagaatgatgaaatgtgtgctattctttatgctgacactcgtgtgtggtgtccaggggaaagtgtattcccaacagtatacactggacctacatctgaaacaaacttctctggaagaagttttcaaccggatagaggcccagaccggactgaaatttttgtacaataccctgctcaccgactcaaaagggaaagtggatgtcgaagcccggcaggaagacatccgcaaagtgctggatgaattattgaatcccctgggtctcacctatatattgaacagtaatcatattgtggtcaagcaagcagatgctgccgccccacaggaaaaaacggtgatcaaagggaaagtgacggatagcaaaggcagtcccctacccggcgtgacggtacggatcaaaggaaccaatatcggtgtcgtttcggacaacgacggccactacgaattaactttacctgccggaaccgatccgacactgatattttctttcgtcggtatgctttcgcaggaagcaaaatatacaggccaacgtgagctgaatatcatcctgcacgaaaatataggtggattattccacggatttctatgcgctgctcttcctcgccacaccccgtgacaagcatcccgaaaagttcatgtggccggagtactacaaacacattgcctcaccgcagaaatatacgacggatgtcgtatcgcaatttccggaaggggtcagaatgccgggcgtgtacgccgagtttaccaaccgggagtcaggggaaaaagagagatataatccggacgatgtgattacctttttacacaacgaccatctgataggcgaatatctgcagaacaatgagtttcgccgatatagatcctacgaaccatattcggcaggtatggaaaaatacggcaaatattttgtaacgccctctctcaaagcacgtatcgaagcgttaggagctcctctgtatgacaccaaagccggttccccggcggcggattttacctaccccgacgtggaaggcaatagagtatcgctgtccgacttcaaggggaaagtggtactggtagacgtctgggccacctggtgcagcccctgccggaaggaaatccccccatctgaaaaacctgaagaaggagatgcacggcaccgatgtggtctttttaggcgtttctgtcgatgaagcgaaagacaaacaaaaatggctggatttcatcgaaacagaggggttaaaaggtatccaactcttagccaatggctggagcaaaatcacaaaagactataaaatcaacggtattccccgtttcatggtctttgacaaaaaaggcaacattgtctcagcagatgctccccggccttccaaccccgaattgaaaaaaatgctggaagcggaactcaacagataatcctcacccgattctatctgaaaatcaagggctgccctgcttttaccctcttttcctccccactctcccgtcagtacctttctttccctacttatttccaaaaattaaaatctgtacagaaaaaactttatagacattcatttttgttttgcataaataatcctttacaaaaaatttacagacaagctctttttatccgttccaggccatcttccaaaacacaacggggacatccgatattcatccggcggaatcccctgccctcttcaccgaattccagaccgtcgttcagtccgacttttcctatcttcaccaatcgttctccacaggcttcatgcgacaaaccggtcccccggaaatccagccacaataaaaacgaaccttcgggtttcaatactttgatctgtggtagttctctctcgaaataatccaaagcgaactgtacattcccttccagataccgggtcagttcctccaaccaaccggccccataccgataggccgctttcaaagtaacgtgtccgaagatatttcccaagtccaggtgcaaagtcgttaattcacgattgtatacctccagaatctcagggttggaagcaataatcaccgaattcatcataccggcgatattgaaagtcttactcggagccatagcggtcagcgtacgggcagcgatctcctccgacacagaagccataaccgtatgccgatgtccgaacaaagccagatctgcatgaatttcatcggatagaatcaggacatcgtaacggcagcacaattctccgatccttgccaattcctcacgggtccacacccgtccgacagggttatgagaattacacagaatgagcattttcactcctttttgtaacccctgttcgaagcattcccagtcgatcacatacttttcggtatctcttattaaaggacaacataccaattcgcggccattatcctttactacggcatgaaacggaggatataccggagtcataatcatcaccttatcgccggacttagtaaaagcccggacagaaatcgccagtgaagtaacaatcccggggctggaagacaaccattcttcctttacctcccaacgataccgctgtttcacccaattacgaaaagcatccttaccgtcatccgaacggaacgtataaccgaaaatcccctgttcacaacatttacgtgctgcctcctgcacctccgggggaacccggaaatccatatcggccacccacatcggcaacagatccgcacaaccgaaaacatcctgcaaaccgtcgtatttcacacaatcggtgttccgacggtcaatcatttgatcaaaattatacctattcataaaagttgttgagttactgagttgttgagttgctgagctgctgagttattgagttactgagttgctcttgggagctctaatcgttattcctaatcattattttctaatctttttattaactttgcacgtacaaatataaatttataaatctacaatgaaaagacaaaatacggtaatctatatctgtgtcattatcacactcttgaatgtagccggattattgtttattgcctgcaaaagtaattcaccgatcgcaacggcttctactccggttcaatcctcaacttcaggttattatagcgatgcctatatgcccgaggccctgacttttgccggagagaccgtaccgttgcaacgcctggatgtacaggaagcacttcggaaagaactgatcgtcaattcttatttacattcacataccattcagattctacaaacggctccccgggttttccaactgatggaaccgattttggaaaagaacggtatcccggaagatttcaaatacctggcggtcatcgaaagccgtctgaaccctcaggcccaatcacctgccggagcagtcggagtatggcagtttctgaaaggtaccggaaaggaaaacggtttggaaatcaataatgaagtagacgagcgctatcacatcgaaaaatcgacagaagccgctgccgcctatctcaaaaaagcttatgagaaattcggttcgtggacactggctgcagctgcgtataatgcaggcgcagctatgatttcccggcaaatggacctccagaaagaaacgaattattacaatctcctgttgggagaggaaacggaacgttatgtattccggattctggccctgaaacagattatgaatcatcccgaactgtacaattttaaagtaaataccgtttatactttcgaaaaaacagaaacagtagaagtgaaaggtcctgtcaaaagctgggccgattttgcgcaagagcaagggattacctataaaaccctgaagcgtttcaacccctggctccggaaaaccgatttaaaaaatccacgacacaaaacttacacgatcagtatccctaagaaaaaagaactgtacaaataataaaaatcacgttagatgaggcacggtatttgtttatacattttttgttattactttagctaagcattaaatgtataaatatgaggacagtcaatattacttgtgaaaatacacaccaggaatacgaaatagagttaggcactacacttagagatgtaaaaaagatcatcttcccggaaaaccataatcacatcctcggggctttggtcaataatcagttacaggacttgcagttcgttgtaatgacccctctgcgggtcaacttcatcgatgtcacaaccctggacggatacagcatttattcgcgttcgttgattttcgtactatatcaagctgtagcccaattatttccgaagaaaacacttcgggccgaatattttatttcgaacggcattttttgccggatcgtcaacaaagaaatcgtactgactccggcaatcatttccgaactggaaaataaaatgaaagaaatcattcaagccgactatccgattgtacgggaagaaatccctaccgacgaagcagttcttattttcagaaaaagagggttgaaagataaagcagacttaatggaaacccggggaaaacttttcacttccctttattatctgaacgatcttcccgattatttttatgggaccctggctccttcgaccagttgtctgaaaacattcggtctgatcccctataaagaaggtatgctattgcaacttcccgaccggaccgatccgacccgggtactgcctgtcattccacaagataagttgtatcaggtattcagtgaatacaaacgctggggaaaaatccttgaagtgaccgatatcgggcatctgaacaaaatcgtggagttgaaatattcaggtcctatgatcaaaatcagtgaagcactccacgagaaaaaaatttcgcttatcgccgataaaatcaaggcccggcataaaaaggtaaaagtgatattggtctccggtccttcttcgtccgggaaaaccacgttcagcaaaagattggccatacaactgatggtcaatggcatgaaacccgtcaatctttctctggacaattacttcgtcaaccgcgaatttactccgagagacgaaaaaggggaatacgattatgagtctatcgatgccctcgatatcgccacctttacggataatatacaacggttactaaaaggggaagaggtcgaaattcctaaattctctttcgaaaccggacaacgttattatgacggtgaaaagctaaaaatcgcccggaacaatgtgatcatcgtcgaaggtattcatgggctgaatccccaactcacccggttgctgccgccggaaacccttttcaagatattcgtttctgcgctgacctctatcgctatcgataatcacaacctgatcaatccgacagataatcgtctgatccggcgcatggtacgcgattacaaataccggaattattccgccctcgataccctgaaacgttgggaaagtgtattgctgggcgaacaaaaacatatcgtaccctaccaggaagaagccgacgcgatcttcaattctgctttgatttatgaattaggagcattaaaaacacaggctgaacctttactccgggaagtaacccaacagcaccccgaacattccaaagctttacgcttattgaaatttttttcttacatccgggctgtaccgacccgtgaaattccaccgacctcgatcatccgggaatttttaggaggaagcagttttaaatactaaaaaacagtaaatatatctctttccttgcaaccagtgaggtgactttcatcgtaaaaatgaaaaaacatttacgatttttacgatgaaatttcgttacctggttttcatatcgatactttctttttgtctggcgtgtcagggaaaaaagaaagctactctttccgatctgccccggccggtaagggtgataaaagtcgaagccttaggcactttcgaccatcaatataccggaaccgtaacagcccggaatttcagtatactggccttccgtttgccgggtaccctgaccgaagtcaatgtcaataccggccaaaaaataaaaaaagggacggtgatcgcccgaatcgatccctatgattaccaacggcaatatcaaaccgctttagccaattataaaacaaccgaatctatctacgaacgtaatcagcgcctctatgctgccaatgccgtagccaaacaaaacctggaaatagcccaaaccgattatattcaggccacttcagccctgaatatggcccggcgtactctggattacaccgtactgaccgcaccattcgacgggtttatcgaacaacgcttcgtcgagaatcacgaagaaatacttaccgggcaatcggtcgtccgtctggtagatcctaaagacatcgaagttaatttcatgcttcccgaaaccagtatccaactactcgacatcccgaaaaagatctatgtcgaattcgattcccaaaaaggaaaacttttcacgacagaggtcaaagagtatatctattcctcgaacggttcggggataccggtgactctacttattacggacaaacagttcgccccgtatcggcaaaatgtatttccaggattttcgtgtaaagtgatcgttgaagtcgacaatatgatatccgacaaattcgtccttccggccagtgccttacaagaagcacaccatcaggaatatgtatggatcgtcgacccggcaagccatacagctcatcgtcagcaagtcaggataaaaaaatacaacgatcatatccttgtcgaggctggcttgaacccggacgatctgattattatagccggaatagcttccatccgggaaggacaaaaagtgagacctgtcaaaaaccagtaaataaacacccaaaataagaccaatatgagctttttaaaagaattcaaaacttttgccatgcgtggcaacgttgtagacatggctgtcggtatcattatcggaggcgccttcggtaagatcgtctcttctctggtaagcgatatcattatgcccccgatcggactgctgatcggaggagtaaagtttgaaagtctgaaaatcgtcctgaaacatgcacataccgatgccgttacaggaaaagtcactgaagccgtcagtatcaattacggcaattttatcaatacagccctggattttctgattatcgccttttctatcttcttattcgtcaagctgatcaacagtatgaaaagaaaagaagaaactaagcccactcctccaccggctccaagtaaagaagaacaattgctgaccgaaatccgggatctactgaaaggaaaaaacagttgaaagggctggaaaccaaaaaaagctcccggcacatcaccgggagctttttatatgaccgattcattttatcctagaacagtccaccgaaccgatacccaaccgacagctggaatacacggtttttattgttcccgtcatagttatccttatcgaaagcattactcaaccccagattataacgggccgagaacataaaatcatcccaattataagaaagcccgatagcaaaattcacggccagtgtatttatatcattcattttatgtttgaccgtcgtatcgccatctttatactttgctttagcattcagggcaaaaccgaattccggtcccaggtcgacgctcaactcatccaacacatataacttggccaataccggaatattcaggtaattagcccgcaatttaattttattaccatcgattttatcccgggctccctgtcttgaatacaccaattcgggctggatagcaaaataatcgttaaacctgaattcagcgaacccacccacatggaaactcagtttatttttcttatcggaattcgaaatattggtcatattcaaaccgactttcggtccgaccacaatttccgtctgtgcctttgcaccgacaaccatcaatacaacaacaactagtgtaaataattttttcatactttaaattgtttttaattatctaacatcgcctaacaaaaactatgcctttccatacgcaaatctctcccgattgttaatctataatttaactttaaccaccattttcttcattttaccgttcccgatgcaaggagcatgagcatcttccgggaaaaagatcacaaagtctccaaccggcagcgtaaaatacaaagcaggccgttcctgataaaacaggatatcattttgtacctgatagccttcttcttcttccatcgccaagcggccccgctcttcccacccgaaagtttcctcctgcaataaggggatctggatatcgataaaccggttatgtgcttccagtttcgccgcttccctggatttccccgtcacttcatccacattcacccaaattttatcttcttcaagtattattttcccggcagtcacctgctgccaattccccgaccgaacatattcgaatacctttttgaaatcgggatgcagaatttcaaatcgtttcgtctgtgttaatgaacctattatcattttttttattttttttcagtaggtagcaaaagtattaaaattccgtataaatcgctatctttgccggataaaaccataatatcgaaaccgaatatgcataaagctggatttgtcaatatcgtaggaaatccgaatgtagggaaatctactttaatgaaccgattggtcggagagaaaatttctattatcacctccaaatcacaaactacccgtcaccggatcaagggaatcgtaaataccgacgactatcagattgtattttcggatactccgggagtggtaaagcccagctataagatgcaggaatatatgctggaattttctaaatcggctttagtcgatgccgatatcattctttatgtaaccgatgtagtcgaaaacatagagaaaaacctggattttatcgataaagtcaataaatcggacatcccggtattgttggttatcaataaaatagatcttaccactcaagagaaattagaagcactgttcgataaatggaaaagcctgattccccgggcagaaatttttcctctttcggcaaccgagaatttcaatgtcgacaatttatacaaacggattgtagaattattacccgaaggtgaaccttttttccccaaggacgaactgaccgatttaccttcccggttctttgtgaacgagattatccgtgaaaaaattttgcagtattacgacaaagaagtaccctattccgtagaagtggaagtggaagaatttaaagaagacgacaaacggatcaacatcatggctgtcatctatgtagaacgttcttcccaaaaagggattatcatcggaagccagggagaagccctgaaaaaagtcggtacccaggcccggctcgatatcgaagccttcttcggtaaaaaagtatttctcaatttatacgtcaaagtgctgaaagactggcgtaataaagacagtgagttaaaaaatttcggatatgcaaacaaataaagtaaaaggttaaaagttaaaagctataggccgatcgattttcagccctagcttttagcctttagcctttagctttttactttatattttatgagtaacatagtagcaatagtaggaaggcccaatgtagggaaatcgacacttttcaaccgccttgtcggaacacggaaagcgattgtaaatgaagaaagcggtgtgacacgtgaccggaactacggtaaatcgtcctggaacgggaaggatttttcagtcatcgataccggtggatatgtctccaacagtgacgatatttttgaagaggagatcaataaacaagtcattctggctctcgacgaggcagatgtcattctttttatggtagacgccgagatcggagtgaccgacctggatcagaattttgcccgtttattacggaatatcgataaaccggtttacctggtagccaacaaggtcgataatcacgagcggctttatgaagcccaggatttttaccgattgggaataaaaggagatttattttgtatctcttcggtcagtggctcgggaacaggtgatttgttagaccaggtcgtctcccattttcaagagaatacgatcgaagataccgaccaccttccgcgaatcacgatcgtcggacgtcccaatgtcggaaaatcttctacgatcaatgccctgatcggagaagaacggaatatcgttacggacatcgccggaacgacccgtgatacgttgaatacccgttacaaccgttttggttacgattttctattggtcgatacggcaggattacgtaaaaaggcaaaagtaagcgaggacgtcgaattttactcggtcatgcgttcgatccgtgccatcgaagaatcggatgtgtgtatacttctgatcgatgcgacacgaggaatggaagcccaggatctcaatatcttccatctgatcgaaagaaaccggaaaggagtagttattgtcgtcaataaatgggatctggtagaaaaagacgggaaaacactgatcgaatacgaaaaaagcctgcgtgaaaaaatagctccgttcaaagatgtcgatatcatctttgcttcagccctgaccaaacaacgattattgaaagtattggaggctgccctgcaagtatatgcaaaccggactcaaaaaataaaaacatcggagctcaaccggatcatgcttgaggccatcgaaaattatccacctccaagtcttaaagggaaatacgtcaaaatcaaatacatcacccagttgccgacccatgctccttcttttgctttctattgcaatctgccgcaatatgtaaaagatccctacaagcggtatctggaaaatcaaatccgggaaaactggaaatttaccggtgtcccgattcagattttcatgcgcaagaaataactaaaagctgccttccggcagcttttatattttaacttttaaccttttacttttcatcttttaatattacctttgcatttgtttttaaaaagggaatatgggtaaaagcagcagagtacaacatgaaggtattgtaaaaagcatctctacacaaacgttggaggtgagtattatcagtcactctgcttgttcgggttgtcatgctaaaagtgcctgcggaattgccgatatgaaagaaaaagttatcacggctcaacgtcccagggaagagcttcgtccgggagacaaagtaatcgtatacgcatcggtaaataacgccttctactcggtattactggcttatattatgccgtccatattgattatcgccaccatcttttttttagagaaatccggaagtagtgaactatacgcagcgatcagcagcctcatcctactggccggatattttattatcctgtatttctgccggaataaaattgcccggaaaattaattttaccgttgaaaaaatagccaactattaaatataaaacatgagtacactagttattactattatttcgttatgtgctattggagttgtatctgcggtgatactctatttcgtagcgcaaaaattcaaggtggaagaagatccgcgtatcgacattgtcgaaggcttacttccgggggccaattgtggcggatgtggctatccgggctgccggggattagcagaagctgccgtaaaatcggaaacgatggaaggcatcctgtgtccggtaggaggagcagaaaccatgaataaagttgcagcagccttaggccgggaagtaaaagcccaggcgcctaaaatcgctgtagtcagatgtaacggaacttgtgaaaaccgtccccgcaccagccaatacgacggagcccgttcttgtgccatcgaacattccttatatgtcggcgatacagcctgcggattcggctgtctgggatgtggcgactgtgttgcagcctgcccgttcgatgcgatacacatggattctacgacattattgcctgtagtcgacgatgacaaatgtgtagcctgtggcgcctgcgtgaaagcctgtccccggaacatcatcgaattgcgcaacaaaggaccgaaagaccggcgggtatttgtttcctgcgtcaataaagacaaaggcggagtagcccggaaagcttgtaaagcagcttgtatcggttgcgggaaatgtgccaaggaatgtccgttcgatgcaattacggtggaaaacaatctggcttatatcgattacagtaaatgccgtctatgccggaagtgtgtcggcgtatgtcctaccggagcgatccacgaagtgaactttcctccccggaagacagaaaccgaagctgaaaaaaaccagcaaaccacgatcaaaccgactaacagttgtgcaacccccggacaaacggcaaccgatccggtaggtaaagcaccggtcagtgcttctcctcaggtcgagtctatagaagcacagaaaacaccagaaacagatagtaaaaattaaaaatctaaaacttatacgctgtgttaaagacattcaaaatcggtggtgttcatccacctgaaaataaattatcggcagctgggaaaatacaggttttacctattcccgaaaaggtgattattccgctcggtcagcacatcggagctccggcaacccctatcgttcagaaaggtgataaagtaaaaaccggacagttgatagcacaagcttcaggttttgtttcagctaacatacatagttcggtttccggtacagtatcggcaatcgataacatcatcgatgccgccggattatcgaaacctgccatcaccattcaagtggaaggcgacgaatggatacccgaaatcgaccggtcggaaaagccggcacataatattactttatcgaaagaagaaatagtcaaagcaatcgctgctgccggtatcgtcggtatgggcggagcgacatttcctactcaggtaaaactgacccctcctcccggcaataaagccgaagtattgattatcaacggagtggaatgtgaaccttacctgaccgccgatcatcggatcatgctcgagaaagccgaagaaattattatcggtgtacaaattctgatgaaagcgatcgatgtcaaacgggctattatcggcatcgagaacaataaaaaagatgcgatagctcatttgcaggatatagccggaaaagtacttggcgtagaaatatgtccgttaaaagtgaaatatccgcaaggaggtgaaaaacaactgattcaggctacggtcaaccgggcggttccttccggagcacttccgatcgccgtgggagccgttgtacagaatgtgggaacagccctggcggtttacgaagccgtaatgaaaaacaaacccctgatcgaacgggtagtcaccgtcaccggtaaatcggtaaaaaatccgggtaatttcctctgccgtatcggtacaccgatttcgaagctgatcgaagcagccggaggtatgcctgaagatacggctaaagtgatcggcggaggtcctatgatgggaagaacgatggtaaacatcgattcaccggtgatgaaaggcaccagtggtgtattgctgatcaacgaaaaggaagcggcccgccgccccatgcgtaattgtatccgttgcggaaaatgtgtttctgcctgcccgatggggctcgaaccgtatttactgatgaaattatcgcaattcaatctgttggaacgtatggaagaagaaaaagtcatggactgcatcgaatgtggatcatgcagtttcacctgtccctcagatcgtccgttactcgactatatccgtttaggtaaagcccggacaggtgctatgatccgtagtaaaaagaaataaataacgtcaatggtgtagatcaaatattatgaataaattactaatatctccttctccgcacgttcacagtggtgattctatcgaaaagaacatgtatggagtacttatagcgctcattccggctttcatctgttctgtgctgtttttcggcatgggagctatcatcgtcaccctgacttcggtggtggcttgcctcttttttgaatatgtaattcaaaagtttcttctcaagcagcaaccgacgattttcgacggttcagctttgattaccggtgtattactggctttcaacgtaccttcgaacttaccggtctggattatcgttatcggtgccctggtagcaatcggcatcggtaaaatgagcttcggcggattggggtgtaacattttcaatccggctttggtaggccgtgtatttttgcttatctctttccctgtacaaatgaccacctggccgcttgctcagggatttgcaggatcttatatcgatgcacaaaccggtgccactcctttagctatgctcaaagaagcggtaaaaaccggacagtccgttaccgatttattatcggccgagagttttatcggttacaagaacatgctgatcggaaacatgggtggtagtttgggtgaagttgcagcattggccttactgatcggttttgcctatatgttattccggagaatcattacctggcatattccggtaaccattttcgtcactgtaattgtattttcgggtattctgaatctttgcaatccctctttatatgcaggtcctgttttccatttgttatccggaggtttgatgttaggtgcaatctttatggctaccgattacgttacttcaccgatgagcaacaaaggaatgatcatctatggaataggaatcggcctcctcacggttgtgatccgcgtgttcggtgcctatccggaaggaatgtcgttcgctatcctgatcatgaatgctttcactccgctgatcaacagatattgtaaaccagtgagatttgcataatttatgatttacggtcccgatcgaccggtataaatcaaaaatcttaaatatattaacgatgggaaagaaattagagtctaactttacaaatatggtggtggtcctgtttagtgtcaccctgattgcttcagcagccgtaggctatgtctactcactgacagcaggcccgatcgaagccgccaagcaagccaaacaagtaaatgcgatccgcgaggtgattccgggagagttcgacaacgacccgaatgccgacgtttggaaaagccagaccgctgacggcggagaactggaattttatccggcgaagaaaaacggagaactgataggaacagcagtaaaaacctataccaacaacggattcggaggaaaaatatggttaatggtaggattcaatccggatggtagcgtagccaattattcggtgctggaacacaaagaaacgccgggattaggttccaaaatggatgtatggttcacccccaacgggaaaggaaatattacgggtaaaactcccggtacccaagggttaaaagtatcgaaagacggtggagacgtagatgcgatcacagcagcaaccatctcgtcacgggcatttctggacgctgtaaaccgggcagcagccggtttggcaggcaatgcggatgcagcttccggagcaacacaacaaacaaaataatttatgatttcagatttacgatgaatctaaaatcgtaaattcaaaacaaaaattccaattctatgaataatttaaaagtcttaaccaacggcatattcaaagaaaatccgacttttgcgcttttattgggtatgtgtccgaccttaggggtgaccacttcggccatcaacggcatgggaatggggctggctacggcatttgtactggtgatgtccaatctggtgatctcactggttaccaatatcattccagataagatccgtattccttcctttatcgtcatcatcgcagctttcgtaactgtagtggatatgtgtatggccgcttatctgccttcactgcatgaatcattgggtttgtttattcctttgatcgtagtgaactgtatcgtattgggacgtgcagaagcttttgcttctaaaaataaagcgattccttccatgctcgacggcttgggcatgggactgggctttacattgagcctgacgcttttaggaacgatccgtgaaatactgggaagtggtaaagcattcaatttcccgatcttcaacgagaattacggaatgctgatcttcgtcctggccccgggagcattcctggcattgggttatttgatcgctatcgtaaaccggatcagaaaaacaaattaaatttcagattttagatttacggcttacgattcctgtttcatttctatcgcaaagctgaaatcataaatcaaaaataatcgaactatggaatatatcttaatatttatcgctgcggtctttgtcaataacatcgtactggcacaatttttaggaatctgtccgttcctgggcgtatctaaaaaggtctctacggctttagggatgaccggagccgtaaccttcgtgatgatcctggccaccctggttacttttatcgtccagaagactatcctggatccgttcggaatcggttttatgcaaaccattacttttattctgatcattgcagccttggtacaaatggtagaaatcatattgaaaaaggtcagtccttcgctttatcaggcattaggtgtgttcttgcccttgatcaccaccaactgtgctgtactgggagttgccattatggtgatccaaaaagatttcaacttactcgagtctttggtattcgcagcctctacagcgatcggtttcggattggccctgacgatttttgccggtatccgtgaacacctcgaactggtagccatccccaaagggatgaaaggttctcctatcgcattgattacagccggcctgctggccatggcctttatgggattctccgggatcgtataaaatccggcaaatttataaccgtataaagtgagtggtatttattttataccgctcattttttatacccggcaaaagaataaatttaatatttttgcaggcataaattattcagacgacatgcaattaccgttgaagcatccgatttttaaaatactttccgggatagccgccgaaaaaggcatagaagcctatgtcatcggtggttatgtccgtgacctgttattacagcgtccttcccaagatatcgacattgtcgttcacggcagtggtatcgagctggccgaaactgctgcccggcggttaggtaatctgcgggtatcggtatttaaaaacttcggtacggccatgttccggtataaaggtatggagatcgagtttgtcggagcccgcaaagagtcctaccgggctaattcacgtaaacccatcgtcgaagaaggaacgatcgacgacgaccaaaaacgccgcgattttacgatcaatgcactggctatctccttgaatcaggagaattacggagttttgatcgatcctttcggaggcttgcagcatctggaggaacgcctgatcaaaacacccctggacccgggcctcaccttctcggacgatcccctacgcatgatgcgagccattcgttttgcttcacaattgaattttcaaatcgaggaaaataccttccaggccatagccgaataccgtcaccgtcttccgatcgtatcgatggagcggattatggatgaattcaataaaatcatgctttcccccgaaccatcccggggtatccgtttattggacgaagccggattattggaaatcttcttcccggaactgaccgcgcttaaaggtgtagaccgtgtacagggagtcaaacacaaagataatttctatcatacactgaccgtcctggacaccttatcgctgtacagtcaggacttgtggttacgctgggccgctctgttgcacgatatcggcaaaccggcgactaaaaaatacattcagggacaggggtggaccttttatgggcataatcacgtgggtgaacgcctggtcggtaaaatattcaaccgtttaaaactccctcaaaacgaaaaaatgaagtatgtacagaaactggtcaacctgcacatgcgtcctatcgttttgtcggaagaaaccgtgaccgactcggcggtacggcggttattgttcgatgccggcgacgatatcgacgacctgatgaccctggccgaagccgatatcacctcaaaaaacgaagagaaagtaaagcgttttctcgaaaatttcaagacggtacgccgcaaactcaaagaggtggaagaaaaagattcgatccggaatttccagccccccatcagcggtgaagaaatcatcgccactttccatctgcctccctgtaaaactatcggggatatcaaaaatgcaattaaagaggcgatattggatggaattatcggtaacaattacgaagaagcccgggaatatatgttcaaagtagcgaaagaacttggaatagactcccaataaatcagtctattttcttgggaacgacaactttcagtatgcccttatgcattttcaggtgaatcggcgaatgcatgatataggcatccccgtcgatatgtacacgctcgatatcgccttctacgatagcttcctcgcactgaatttccttataataggacaatttgtacagtttcgaattgatgaagaaaagtaaaaaccacaggatctcgaagaaagccggccgtttcaggatgcagatatccatcaaaccgtcccgcaccgaagcatgaggggcgatataggcattgttgccgtattgggaactattggcgaagctaaggataaaacaatttaccttcatgactttgccgttgccggtgatcttgtatttcttttccggataacggaaccatagtttaatagccgcataaatataagaaaatactcccctcaatttcaaatggttaaattcatgggccacctcggcatcgaatcctaccccactgacattcagcgaatacttgccattcatctccaacacatcgatttgagcgaattgatcggtcagtacctgtttcaatgccttggtcataaaaaccgaataacccaaatgccgggcaaaaccattgccactccccagagaaacgaccccaaaagcaacatcactaccacacaaagctcctcccacctcattcactgtaccatctcccccaaccgctacaatatgagtatattttccttcttgccgggcatcttcgaccaatttacgggcatgtcctgcatactcggtaaatacaatatcataaggaatagaatcatactccggaatccgacggatcttctccggcaattctttcccaaggcctagccccgatatcggatttactataaaaagaatatgcatattatcgatttttccctatcccataataggtgtatccaaattctctcatttgttcaggattgtaaatattacgtccatcgaagatgactttttctttcaaggctttctctataaaagtaaacttcggaactttaaattcctgccattcggtcacgataatcatggcatcggcatccgttaaagcgtcgtacatattggcagcgtacccgatacggtcgcccagccggcgcttggcttcttccattgcaaccggatcgaaagctttgacggtcgctcccgcttccagcaattggccgatcagtaccagagaaggagcctcccgcatatcatcggttgccggcttaaacgacaatccccaaagtccgaaatgctttccttttacatttccttcataatgtttctgaatcttatcgaataaaaccgtcttttgcctctcattcacccgctctaccgctttcaacaattccattccataaccatattcgtctccggtacggatcaaggccttcacatctttcgggaaacaagacccgccatatccacaacctgcattcaggaattttttaccgatccgggtatcgctcccgatcccttttttcaccgcctcgatatcagcaccgacgatctcacacaaattagcgatatcgttcataaaagaaatacgggtagccaacatcgaattagcagcatatttcgtcatctccgcagagggaatatccataaaataaatgggagtattattcaggacaaaagcatgatacaatcgttccatcactttttccgcccgggccgattctacaccgatcaccacccggtcaggccgcataaaatcgtttaccgcatccccttcttttaaaaattcaggattcgaagcgacatcgaacactacttctactccccgcttatccagctcttcctgaacagccaatttcactttccggttcgtccccaccggtacagtggatttggtcaccaccactacatattcctcgatcaaacacccgatctcatgcgccactcctataacataagacaaatcggcactaccatcctcatcggggggagtacctactgcaataaaaacagcatcggcatctaccaaggcttcttttaaagaagtagtaaagaacaacctttcgttggcccggtttttgatcaccagctcagccaaaccgggttcgtaaatcggaattcctccctgattcagcttatcgatcttcgaagcatcgacgtctacacaggtaacggtgactccggtttctgccaaacaagtaccggaaacaagtccgacatatccggttcctacaacagctattctcatatttgcaattttctttgttacgaaagttcgctcagatcaattcctatttttaacgactcctgcccctaaaggttacaatgatctatatactctgagcactttgatttattttgacaaaaatataaaaataaaccccttcacccagtatctttgtaagataattctctaattttgttagacaataaattgaaaaacgtatccggaacaggctggaaacgtaatattcaggtataaaataatctgttataaacaaatacccttgcgccatgatacacaggatgaacctagcggcactattttttatggctgttctattgctgacaggctgtacaaacaaagaaaaaaccgatttcagtaaatacatcaccggttatacgagtggagtcatcaagtcctcttcttccctttcggtctatctgggtcaaccgtccgataaaggtttccaggccggtagtaccctcccggccgatttattcaggatatctccggctataaaaggggaattgattctaaaagataaccatagtatagaattcattccggcagaacgtttcaaaaacggtacgacatacaaagtcacgttcaatctgggagcactttgtaacgtccccaagccttatgagaaattcaactttgaattcgatattgtcccgctggttacgattttcgaacccggtgttctgatcagcgaacccgatcatgaaaatgaattacaatatcaggggatgttgcaaagttcggatgaaaccgatccgacagaaatggaacaaaaactgacggccacctataacggtcaatccgtcacaccggaatggaatcatcagggtaaccggcattatttcgctatccgccatctgttaaaagaaaaagaaagtaaaacactgaatttaaaattcagtaaagacattaaagcaaccgacggcaccgagatctccatccccggtctgaatgatttcacggtgttgaatgtcaaagccagtgacagtgaaccaccggtaatccgtatctatatgtcggagaatatcgatccgaaccaggatttgaaaggtttgttcagcctggaaggagcctctaccctgaattacaaaatatcggataacatcatttacctttatccgggtaacgctatcgagaatagtcaaccgaatctgactatccatgccgggatacgcagtgccaacggtaatacgttgcataccgaatatatccggtcggtacgtctctccagcaccaaaccacaagtacaactcatcggcaaggggatcatcgtcccgggcaacaatcaggtactcattcctttttctgctatcggactgcaagccgtcgaccttgaaatcattcaggtgctcgaccaaaacatgaactttttcctgcaagaaaattcttatgacgaccgcagcgaactgacccgtacagcccgaccggtatttatgaaaaaaatcgatctgaaaaaagatcatccccatatcgacctcgataaatggaatgactttaccatcgacttaagcgatctggtcaatctggagaaaggtaatatttatcgtttcagactgaaattcaagaaatcatataccattctttcctgtgccgatgaaagtcccgactcggattatggggatacggactgggacaacccgggttcctactacagcgaatattattatccatccggtttcgactgggaacagcgcgaaaatccttgtcatatctcctactacaccggtgatcggtttgcagcccgcaatatcatcaatacttcactgggaattatggccaaacaaggagccgacaatcagtatgtcgtatgcgtttccgatctcagtaccgctgaagcgattccgaactgcaacatcagtctttacaattatcagaatcaaaagatcgattcggcaaggaccgataaagaaggattcgcgtatttaaaaccggcatctccgggctttatcgtactggcacagaagggtaaagacaaagcctggttgcgtttagcagaaaacagtgctctatccctcagtaacttcgacgtcagcggacaacatgtacaaatgggggtaaaaggattcatttatggtgaaaggggggtatggcgtccgggagatgaaatctatttatccctgatcctggaggacaagctcggtgtcttaccggaaggtcacccgatcgttgcacaactggtcgatcccaacgggcatattacccaaactttaaaaggagcgattactcccaataatatccattgttttaccttcaaaaccgaacccgaagaccaaaccggttattggcatgtcctcttccgtatcggtggcctgactttcaaacagacattacgcatcgaaacagtgaaaccgaaccgtctggctatacaaatgttatttcctaacgataaaattatcggtaccggtgtttccctgaaacctgtagaagtgaagaccaaatggctgaacggagcaccgacttccaatcaaaaagcgatcacagaggtacgtttataccatgccgatgcaggtttctccgaatttccggattatcgtttttccgataaatccaggtatttcgaaccttcgacagaaaccctattcgacggacagaccgaccagcagggaaatttttcattcagcctgaacaagatcaaaaccgaagatgctcccggaatattaaatgcagtcttcaccacccgggtatttgaaaacggcggggatttcagtatcagctcacaaagtatccgctattccccttacgatgaatatgtaggaatacgtctacctgaaaacgacgataattggtactccaccgagcaacctgttcgattacaaggcgttacgattaccccgacaggaaaacaatcaggaaatgctaccattcagattgaagtatataaactcgactggcattggtggtgggattcggaagatgaaaacctgggatcttatgtcaaccgggaatatagtagcagtgtattgagccagaaagtcaaagccaccgacggtcgttttcagttggatcttcatatcccgaaatatggacgttattttatccgggccaccgatccttcggggcatacctccggtttaatcgcctatttcggtagctggtcggataacgccgatcaaactgcagcgaccaccttacacctgaacagcgacaaaaaatcttaccgcgtcggcgaaaagataaaagttacaattccttcagcaacaggtagtgtagccatcgtcagccttgaaaacgggaaaaccgtcagcaacatgaaacggatcaatacctctgccggtaacaccaccttcgagttggaggccaccagcgagatgtgtcccaatacatacattgcagtcactctgcttcaacctcacaacaaccgggacaacgaccgtccgatccgaatgtatggagttgtcaatatccatgtagaagacccggctctccatttgaatccgaagatcaaaatggctcaggaactccgaccgggaaaagagttcaatgtggaagtttctgaaaaagacggcaaggcgatgaattacaccattgcgatagtcgacgaaggactgctttcgctgaccactttccgtactccggatccctttgctgctttctatgcacgggaagccctgggcgtaaaaacctgggatttctacgactatatctacggtgcttatggagcccgtctggataaagcttttgctgtgggtggcgacgaagccttgaaggatttacaggacgaaaagaccaaccggttcaaaccggtcgtcttattcgacggtcctttcagtttgaaagccggagctactcaaaaacacaccttcaaaatgccggaatatatcggcgaagtacggacgatggtcatcgcagctaccaatggacaatatggagcagccagtgtcaacagtacggtaaataaacccctcatggtatcggttgcccttccccgtctgttcacaccgggagatgtcatcgatattccggttaccgtttttgtcctgaaagatcatatccgggaagtcaccgtaaagatgactaccgacgacaaaatcaccctgacaggagaaaaagaacaacacatccaattcgataaaaaaggagaacaagttgtctattttaaggctcggatcaatagccaaaccgggatgtcgacacttcggacagaagcgacatcgggcaatgaaacagctattgtcaccgaggatgttcaggtacgtatccctaatccgagaatgacggagatcgaagaaaaagaagctaaagcaggagagaccgtttctttcgatacccgcattacaggagccgaaccgctttctgtcctggaggtatcctctatcccaccgttaaacctggaacaacgcctcagttacttgctcgactaccctcatggctgtgcagagcaaatcacttcacaggcatttccgcaattagctttatcctggcttctggcattaagtccggcacaacagatcacggcagaaaataacgtcagagaagtcatcaaccgtctgagaagttatcagaccccggaaggaggctttgcttactggcctggagagccgtatatttcggaatgggctacctcttatgctgtaaatttcctggcaaatgcccaaaaacaaggctatgcagtcccgattcagatgttacagcatgccacgaactatatgcgtcaggtggctaacagctggaaccgcacagaaccgtggtcacagcaagaccaagcctatcgtttgtatgtattggctttagccggtaaacccgatctggcagccatgaaccgactgaaagagacccgcttgcaacgtccggtttcacaatggctgctggcctccgcttatgctttaagtaatcaacaggaaatcgctacgaaaatgatacgcgatctgtccttcgaagtcaccccttaccgggaaacgggaggaacgttcggttctactacccgggacaatgccctgattctgcaatcgatggtcatcctgaacatgcaacaagatgcttaccgcatgttagagaagatttctaaagccatgggatccggcaattggtacagtacccaggaaacctctttcgctctttatgcagccgcccagttcgtacaaaaatacctgggcagccaaaaaggaatcgatatcacagtaaaaacaaattcaggtaacgaaaacgtcaaaaccgacaagacaatctggcaaaaacaactcgttttgcagggtgacaaagcttcggttacggtgacgaacaacggtcaaggctcactttttgtccgtcagatcaatagttccgccccgctggaagtggtcaaggaaaaagtcatgtccggaatgtcgatgagtgtgcgttattataatgacaaaggtactccgctcaacatcgaacagctgcaacagggggaagacattacaaccgaaattacaatcaaaaacacgggcctgaccggtacttatcaggaactggctttaaactatccggtaccttccggcttcgagatcatcaatgaccgtcttaccggaaacaccagtgcctggaaagaggcagaatatgtcgatatccgggacgaccgtttttatgtctatttcagcttggaacaaaatcagtctaagactttccgtttccgttgcaatgcagcgttccgcggagaatatatgttaccggcaatttattgttcagctatgtacgacaatagtatacaggctattttaccgggaggaaaagtgaagattgaatgagttgtagagttgctgagttaaaagagttgctgagttaaaagagttactgagttactaagtttttgagtttctgagtttctgaattattaagttattgagttagaagagttagaagagttagaagagttagaagagttacaaggcattagcttaataatttaaatacaaagcaagatcatatttgcaacacattgttaaagtaaatatatgactacaaacattagcctatacactcaggggtcacaccaatccaataacaaactctttcaactcaacaactttataactcagcaactctttcaactcaacaactttataactcagcaactcttttaactcagcaactcttttaactcagcaactcagcaactctataactcagcaactctataccatgaacagtaaagattatatttataaactgatagaagaaggagagcaccaacaacaggatttcaaattcgagatctcggatgcacggaaaatagccaaatctttatcggctttttccaatacggacggagggcgcttgcttattggggtgaaagataacggaaaaattgcaggagtgcgttcggaggaggaaatttacatgatcgaggcagcagcaaaattgtattgccaacctcaggtaaactgtcaaatgcagattcacgatatcgacggacacactgtgttggaagtcattgtacctcccggaacaaccaaaccttattatgccaaagatcagacaaataaatgctgggcttatatccgtataaaagacgagaatatcctcgctactccggtacatttaaaagtctggcaacaagaagggaccccaaaaggttcctttcttcattatacagagcaagaacgattactattggattatctcacaacccatccggctataacccttaatcagtattgtcgtctggcccgtattccccggataaaagcagaaaatacactggcaaaattcatccgcttcgaattaatcgaacccatatttgaaaatcatcggttttatttccgaggctgtacctgatcgttcaggctaatgtcttaataaataaagtaataccgtcgaataccatttgaaggccgatcgtagcaacgatcaatccgataatccggatcaaaggattcataaaattatatttaatcagaaaactaccgatccttcgggctttcagcataaagaaaaggttcacagctaaagccagtaaaatagcaacgatcgtgacaaaacggctatactgaacagggaaagtaactgcagcagtaatcgtagcaggtccggcaatcatcggaatagctataggtacagtggttaaatcggcaatcttaatatgttcatccactttcataaaaaatcctttcaacaaaccggacaaaccgttatacatcagcacagccccacaagtaatctgaaaagagtaaagctcgacccgaaaaacataactaaaagtcacctgtcccagataaagaaaaaaaatcagaataagcattgccgtaatcgtcgatttaatcgaaatataccgtaactcggttggagaaaaacgttcctgcaaagacgtgacgatcaacaccttctgtatcggatttaccaaagccagaatggccacgaaacaactcaatattaaattaaatttcattacttccccctattagatctgctcaacaaagatagtacaaaggaatggggtttcaaatttattttgagtcagtgataaagagttacaaaggttacagaagttacagagatcgcaaggatttaaccgcccctatacaacctcttccctccctcatgtaactcagtaactcttttaactcagcaactcagtaactcttttaactcagcaactcagtaactcttttaacccagcaactcagtaactcttttaacccagcaactctctaatacccaaaaatctgttcggtagtcagtcgctctacgggaccataagaagataattttttcatatccaattctttttcatctcccaatacacaataggtatatttgcggtctttcacccatttttcctgaaaatcctttacctgatccagggtcagtttctgcaaatcgtcgaataacattttccggcggtcactgtccaatcccaggtcctttgcttcctgataggcatcgaaaattccggctccggtaatccggtcggtccgtaaccgggcaatcaaagcttcttttgccagattaaaggcagcttcagactcaggcatatgattgataacttcatcgaatgcagtcaaagcatctcccatcttatcattctgagtagcgataaaagtagaataaatataaggcttgtccagacgggaaggctcacccaaaccggcagatgccgaataagccaatccccgggcttcacgcaattcctggaatacgatcgaattcatacctcccccgaaatactcgttatataaggtagctaccggataaatattcggatcgaatttttctccccggttagaaatagcagccatatatacctgagcagcagcatacggagctaacaaaaccttactttctccggtttctctgatcttaaaaagcgaagccttatctgcagcgatcagcttttcaggcacctgatggtaccgattcacttctgccacaacttcttcctgggtcttcgggccgtaataaaggacagtatgttcggtcttgctcagatcacgaaggtgggccaacagctcttccgactttaaattttgtatttcatcagccgaaagcacattggtcgcaggcgatttcggtccgtataaaccatattgcatcagcattctgaaatttgcctcctgatttaattttgtattcgctctcccttccagaatatcacctttcataatttccagtacttccggattgggttgagcatctgccagcagagattcgaccaattgaatcgcctctcccatattttcggataaacccgaaatagtgagataggtacggtcagctcccggacgaataccaaaatcacaagccaaacggtaaaactcttccttcacctgttccggactcaattcggaagtacccaaataatccagatagccggcagcagtggaaagataacgatcctcattatttcctttctcaaaagcataagttaaagagaacaggtcgttcgtcgggtttttcttataccacaaaggaatatcggatttgagttttccttgagccatatcttttgaaaaatcgacaaataccggttcgatgggttttaccggtgttgtccggatctcccgcaaaaaagcactactcttatcccggttggtcacaatcggagtgatggccggtttagtcattttctttacactttcgtctttcccctgccgtttattgaccacgacataattatctttcagatgagtattggcaaaatctatcagctcttgtttggtaattttactcatccggtcgagtgaagccacttcatcggcccaattcgtaccgttgacaaacgactcgacaaaccaggttgctctgtcgtcattgctttccaattgtttttgtctgtcgcgtttgttattattgatcgtcgcagcgatcaggttctcgtcgaattctccttttttcaactttccgatttcttccaacagcagtgtacgtacttcttcgagggtttgtccgtttttaggtgttccttccattaaaaatacactgtagtcagctaataagaaaggataggcagcagctcccaacattttctgttgttgattgatatccaggtcgatcaaaccggcttgtccgttgtacaacacctgagccagcagattcagggtttctacgtcctcactgtttgctcccggaaatctccacgccaaagtcacattttcagcttccggtcccaccacttctttcactataggagaggtaatcggctgctccggttgaaagttcagttcaggcaagttctgactcggtttcattccaccgaaataacggtttatcgtttcgatcattacatcgggatcaaaatctccggaaagacaaaccgcaatattattaggcacataccattgagtatagaaattcttaatattcgtaatagacggatttttcagattttcctgtgttcccaaaatggtttgagttccataaggatggtgggggaagagaccggccatcacctgatcgatcactttacggttatctttggtcagggacatatttttttcttcataaacagcttccagttcggtatgaaatccccggataacaggatgctgaaaccgatcggcctgtattttagcccagttctctacctgattcgaaggaatatcttcctcaaaaacagtctggtcgtaagaagtataggcatttgtcccggtagctccgatcgccgccatcaatttatcgtattcattgggaatagcgatcttagaggcctcataagacacactgtcgatctgacgatagagagcagtccgctgagcctcgtccgtcgttttccgatatacctcgaacaaagcttctatccggtccagcatcggtttctcctgttcgtaattctgtgttccgaaactatccgttcctttgaacatcaggtgctcaaaatagtgggccaacccggtcgtctctgccggatcgttctttccaccggcgcggacggcgacataggtctgaatccggggttgatctttattgaccgtcatatacacctttaagccattgtctaaagtataaatccgggcattcaacggatctccgggcaccgactcatacttaaagcgggaatgatccccgcacgcagcgatcaggaccagtacacccaatagccacatcgtttgaaacatttttttcatcttatcttttcattaaaattccttctcttatttcttatttttcttcttctttttctccacggaccatccgaatttcccgatcttcttgcccagaccgaaatattccccatgagtatacaccaaaggatttgcacggtcgagttcaaattttcccgtttcggggttcagataccggtcatcggcctgtacattcaccacttcggccagaaacagatcatgtgatcccagagggacgatctctttcacccggcattcgatgcatacaggggcttcttcaacaatcggcgcccgaaccactccggcctttccgggcgtgagtttcatctcttcgaatttccggtaatcgcgccctgaacgaactccacaccaatccgtagcaaaagccaggtcttcggttgtcaggttgataacgaattcgccctgtcgccgaatgatcggataagaataccgctccggccttaccgaaatataacacatgggcggattggtacaaaccgttccagtccaggccactgtaaacaaattatattcttcgggagtcgcaccgcaactcaccagcactgccggtaaaggataaatcatcgttcccggtttccaattgtgtttcatacccattcgttttccagaccgtcgtatgaaccgatcggcctgcgacaaagatacaaaaagacgaaaggcattctctcgcccttcgcgtcttttattttagcagccggcacctatgctccggctgttgtcaagctattcgaattcagctatcgtattttctataataccgatggcttccatgagttccatcttgttgatcaccaaaggtggggcaaaacggataatatgctggtgggtcggtttagccaataagcctttatctctcaatttcaaacatacatcccaagcggttttaccgttcttaggcttaatcacaacggcattcaacaatcctttaccacgtaccagttcgatcatatccgaatggattttactgatccgatcccggaacacttgtcccaatttctccgcattctcggctagtttttcgtcccgtaccacttccaaagcagcaatggacactctggctgcaatcggattccccccataggtcgatccatgttcaccgggcttgatacaaagcataatatcgtcgttggccagtacacaggaaaccggcatcattccccccgacatcgctttacctagcaccagaatatccggatgtactccttcatggtcacaagccagtaatctaccggtacgtgcaattcccgtttgtacctcatcggcaataaacaagacatttttggatttacacagttcataggcttttttcagatatccttcatccggcacaaaaacaccggcttccccctgaatcggttccaacagaaaaccggccacatcaggatcctgaagtgctttctccaaagccggaatatcattataaggaatcttgatgaatccgggagtgaaaggtccgtatccggcatacgattcgggatcgttagagagcgaaacgatcgtaatggtacgtccatgaaaattcccgtcacaaacgataatcttggcctttccatcgggtaccccctttttcatataagcccatttccgacagagtttcaacgctgtttcatcggcctctgctcctgtattcatcggtaacaccttgtcataaccaaagaatcgggtcacaaattcttcccattctcccagcacatcattataaaaagcccgcgaagtcaatgccagtttctgagcctgatcggtcattgccttcacaatcttcggatgacaatgtccctggttcacagccgaataagcagaaagaaaatcgaaatacttttttccatctgtatcccagacataaataccttctccccgttcgagtaccacaggtagcgggtgatagttgtgagccccgtaacgagcttctctgtctataaattcttgtgctgtcataatatataaagtttaagttcgtaatcgtttgcagcatgcaatttgtaaaaaaaacagcatattaaaaacaatttcccgttttttttataaaatcattttcaaaccggaatttatcataacggtgaaaacagacagaacacctatcccgcttactttctctttcgtaaaaagccgaaatatttccgcaacagttcccgcaaagtatcgaatgattcctgataagacacccctactccctgaatggtttccgtattattatatagcagcttctcgttcgtatgggagtaagccttcattttcaacgatccttgtttatttaacttcacttcgatatcgaagtctccggcaatattatttttgcgattctcgtccccggcagcgttccgattacctccgacatccatatttccgttagcagaaatcgtaatccggtcatcgagaagctgagttgagacagccagttcgaactcatccgatgtcatttctttttcccggtctccccgacggtaagcaaacccgatatctacattgctgctaaactgtgaaaaccaacgggataactgattggaaaacatctccgtcaaagtcgtcacccctgccgtctgggcttgtaaaccataatcccccgtattgtctgtccggtagaatcggttcaataccaacagagaaaacatttgtttattaatctcgtcctggctggaaaaaagactctggatataacttttactctgggtttccagtgtcgggaagtttatatcgaattttactaccggattggtcaggttatcactcagattcaggatacattccaccggaacctttcttcccgattccgtagcgatcttttcatcgggattcgactcatcggaagagagtttttctgccggtaacaattcggtaatcgtcgttttcaaattatataccgcattgatattcaacattgcctcataaggcgaaccgctccaggaaatcgttcccccgggagtaagtacaaattttttattcaccaggttgctcaaagtaaagagataatccccttttgcaatctgatattccccgaacatattcagatttccgtctttatcgaaagtgatcttaatatctccgtttcccgtagttttcagaatatctccgaccgtcgggtcaaaaatcacctgtacattcagcttatcgttgacctccaggttcgcattcaaattaatatccgatactgccgatttaggttgtatcttctgattctccggctgtccggtatggacaaaatgcaaaaaattattggactgctccgtcatgcctgccgacaagggaagatacaaacgggaatcattctccgtccgggcattgaccgtgacattatccaccccattatggttatccaaatcggccaacccactcagatatacttgaccataaaacgattcgttatctgcaaaaccggtattcagcaccataaacttttcaaaccgggcatcgaggcggtaacgattttcccaaaactgatattctccattcaacaccgcttgctgcccatgaatatctttcatataaaaattacgaaacaacagatgattatttacgatatgaacgctatcgtgaacaaaaaatttagtattcaaaacattgactttcatccctaccgaatcgaaatagacaaaaccggaaatatccggcttataggtatttcctgaaatccgcacattcccggacaaattcccggcagtctccgtgacaaaatcagaagcatagattcctaaccgctccaatcccactttttccaaatgtatgccgacatcaatcgtatccttctcgggcgtataatacccctgtaccactaagggcacagcatcgtctactctgttttcagctccgacaatgacgtttctgttatccgcatcccaatacgaacgcaggctcaacgatcctaaagtatcccggttgattccccagttatcgacattaaaatcggtaatcaacataaaatttttataataatcctgaagagtcagcgaaccggtagcgattccgaacaaaaatggccggtgtttcaaagcgatccggcttacattctccagattgaaattctcgagtttcacgaatagcttttcttcagtagattcggagagtttaccgttaaccgacaaactctcttttccccgctgcataaaaaagtcacttacatcaatctctttaccggcgataaaaaccgaagattccttgacccgccaaacgctatcgttcatcacaatgactcccggatgaatccggatttccgtgttataaccatacttttcatcgggagagaaaacgacacaggcagacaattccccgctataagtcttatctccccaattacaccagctcaatctattgtccagatggttatccgcaagcgttaactcattcctgacattataaagctggtatccattgccataaatgagccggtcggtagtatatttcatatccagccgttgcatatcccccaccagatcgattttggaatgaagcaggctgatgtcctcataaccgatcgaatcggtcgtcaggcgaagacgcaattgtccggtttcattccggtaatcggaagtaatcaatgtacccgaagctatatacaaatcaggatagagaacctgcaaaatccggccggcatcttttacctgcacggtatattgaaaatcgaacttttcaggttctttccgtttcggatacttccgggtctttttaggctgatgtaccgaataagccggtaaataattttgcatcaatcgaaaaacaaacggagcagggcgcaattcccgaaaatttcccgaaataaaaagatccacgacatccgattttaaagtagtagtattatggtctcccttctggttatcctccatactaattttatctatcgtgaatgtagctgtatcacaggtatatttgaaatccgtcagggataaattggtaaaactcttattttcctgcccggcatgaatgatctcgaacgaagtttcgagcgcctcctgtcccccttttatatccaaaccgaatgccgccaattcatcgatccgtaactgtccccgggtactcaaaaaattcagggaatcactcaaatcataagccagcaatacccctccctgcatctgctcgttctccacggtggccatcacatccagctttcccgtctcataagtcatggccactttcatatctttgacattcccttgatggatattcagacgctccactttcgaatctatatgaaacgaaggtccccgggtatcccagactcctgcataactaccggacaaactaccgtatcccagcatcgacagcccggacaactttccacagtcgacctgataaaaatgaaaatccccacccatggcatcacaatcgggctttttgtccggacaaggagcataacgaaacgtcagatttcctgccaaagccggagtaatactcttcgccttcaccataaaatccgataatgtaccttcgaaacaaatcgactcgaaatcgacaaaagaaaaatgatgcagaggttccggaaccggaatatacctatcgaaccagggcaaatagacggtttccagatcatcgggattcaaatgcgccttatacaaatcgatatgaaaccgtgtattccatacatccggcaacccttccgatttaaaacttccctgaaaaacggttttatcccctaactcaaaataaaggtcatgaccttccagcttattgatggtgttattgacaataccgctgcatttcaccgtattatcgatccctctcagcactccgttaaaatatgccagatcgataaaactcaccgacgagggccctaattcataatattgttgcatccgggtcgtaaaataacgccagtcgtgctgatcgggtatccagctgaattccagtttcatcaagtcgagactactccgttcaagttctatccgtgcatccgtaatcgtcaaattactctcccggatccgaacccgtccatccaattccttcatcctcaatcccgacttctcgataaaactcaaaccggaaacgacgatctgtgaatattcatccccaaagtcaaaatccgtaatatcgacattcaaatcccggcattccacatccgtccagttaacgccataatccaccggttcatattcttcttcacgataagtgaaacgggaatcccgcagactgaccttcttcaatcccatcaaccaaccgctctgtttttcaccgccctccccctctgtatcggcaggagcgacccgctgtaaagaatccagaaacatctctatatttgtcggcgatccttccccacgcgatatccataaattaaaatcagcctgattcaaaacaatttcaccgatcgtgaaactcttgtttacgatattgaaagaatctgcctttacccgcaaatcctggcaatataataaagtatcgtttttaaagtcttttaataaaacttctttcagtaccaaagattttaccggacggaaatcgacatggccgatctgaatagtaacaccggtagacgctttaacctgctgagtaatatattgaaccaacgcagtttgtacatacgaagtctgtaacaggagataaagcatccctgccagtaacaccactcccgttgcacaaaacaataatatccgaagaaccttttttatacccgcagttatttttagtttgctcacaaaaatattaatattgcatcagatttgaaaacgattggagttcaaagattagagaataaagtttaaagaataaatatgactgtaattttaggaatcgagtcttcttgtgacgatacctctgctgcaatattgaaagatggccttgtgctaagtaatgtcattgccagccagaaagtgcatgaagcttatggcggagttgtccctgaactggcctcacgggcacaccagcaaaatataattcccgtggtatcagaagccatcaaaagggccggtatcgaagtgaaagacatcgatgctgtagcttttacccgcggaccggggttattgggctcgctcctggtaggtacttcttttgctaaaggttttgccctggccaatcatttacctatgatagaagtaaaccacctgcaggcgcacatcctggctaattttatcaaagaaccgggagtggaaagccggcagccttctttccctttcctgaccctgctggtgtcgggcggaaattcgcagttgatcgttgtacacgattacctgaaaatggaaatgatcggacaaacgatcgacgatgctgcgggggaagccttcgacaaatgtgccaaagtgatgggattaccctatcccggcggtccgattatcgaccgactcgcgaaagaaggtaatccggaacgcttcactttcaacaaaccgcaaataccggggctcgattacagtttcagcggactgaaaacttcattcctctattttctgcgggatgaactgaaaaacaatcccgatttcattcaggataacctgaacgacttatgtgcttctcttcaaaagactgtaatcgatattctgatgtctaaattgaaaaaagcagccaaacaaacgggaataaaacaaatagccatcggcggaggtgtttcggccaattcggctttacaaaaagcagtacatgacgaagcagcccgctcaggctgggaagtttttattccgcgtctgggattttccctcgataatgccgggatggtagccgttaccggttattacaaatacctggcaggacaatttatcggcctggacgcagctccctttgcccgaaccactctcgagtaaatccgtataatccctataataacgatgttatgaaactccttgtcacctacaatattccccgggaacccttccagaatctgcctgcagattgggaaatcacctttccggaaaaggaagaattcagtaaaacggaattgctgcgcatactacccgattacgatattatgctggccatatttcatgctccgatcgacagggaaatcatcgatgccggaaaaaagctgaagctaatcagcaattatggagtgggttataataatatcgatatcacctatgcccgtgaaaagggtatagctgtgaccaataccccgaaagcggtcaatagtcctacggccgagctggcactggccctgatgctgagtgcagcccgccggattaccgaatgcaatcaacgtatccgcatagaaaaagaaagtatgtggggcactatgcgcaacctggggttcggattggaaggaaagaccttgggcattataggcctgggcaatatcggtaaaaatgtcgcccgtaaagcagaagctttcggaatgaatatcatttactataatcaccacaccgaagttcccggttaccgacgggtcgaactggataccctgctccgggaatccgacttcgtcactcttcatacccccttgactcccgctacccggcacctgatcggacagcgtgaactgagtttgatgaaaccgacagccattctcgtcaatacagcccggggagctgttgtcgatgagcaagcactggccgaagtattgaaaaaacgtcaaatagcaggtgcagccctggatgtcttcgaagacgaacctcacatcacagaaaccctctacgctttggagaacgtcgtactcaccccccacatcggaaccggcaccatcgatgcccgcatcgccatgggtcgtgaagccctcgaaaacatccgtcatttcctggcaggtaatccaaccaatgtcgtcaattaatatcatagttacagcggtcagggttaatttttccgttaaaactattctaaatgtaggtttattttgttacttgttcgtcttcggtattcgtgttcggggccccggtcgcttctgtcggtcgtctacctttttctatcactgaccggcggaactcctcgcaggctcgtcagacaccaccggtcgggcgttcagaaaaagcaagacgacactcgccagagctccaatggtccc

SEQ ID NO: 5799 - DNA, 8966 bp, Unknown
  gut microbiota DNA sequence
ttagggacatttactgaatatcccaatttagcatctacatcaatctcatcgtacgtcaaccccgctaaccattcctgctcacgcacaatctctttttcctgcctgatccggatattttgatgccggatataattcaacacataatgccgcacacaagaatataaataaccctctatggcaatatcaggcttcatctccttccgatggttccacaaatacacaaaactttcctgaacagcatcttctgccacagctgtatcccgataaagtcctaatgccacaagctgcatacttcgcgcatatttccggaacaaacgttcaaaagccttcacatcgccggcaataaacttatttatggttatctgatctaacatgatttcaattacaaaattgaaaaaaataaatacaaacacaattctacccaacaatttttttccaaaaaaataaaaatatcaccaataccattatttttcaatcacactttttatatacttttgtaaggaaaaacaacaaatacaattatggcacaacttccttctataccaaagggaacaagagattattcacctgaaatcatggtgaagcgcaattatatattcgatacgatcaagagtgtttttaaactatacggttatatgccactggaaacgccagccatggaaaacctgtccactttaatgggcaagtacggagaggaaggggataagctattattcaaaatcttaaattcaggagattttatcgggaacatctccgatcaggaattattagaaaagaatagtataaagctcaccaacaagatctcagaaaaaggattacgttatgacctgactgtccctttcgcacgatttgtcgtacaacatcaaagcgaattaacctttcctttcaaacgttatcaaatccagccggtttggcgggccgatcggcctcagaaaggacgttaccgggaattttatcaatgtgacgtagatgttgtcggaagtgattcgcttttgcatgaagtagagttgattcaaatggtcgacgaagtataccggcgtctgaaaatcaaggtgcgtttattaatcaataaccggaaaatactggcaggaattgcagaaatcataggttatccggaccagctgacagatattacagtagccatcgataaaatggacaaaatcggtctggacaaggttaatgctgaattacgggaaaaaggaatcaccgaagaagcaatcgtcaaattgcaacctattttgaacctggaaggaagtaatagtgagaagctggaaaaactcaaaactattttacaggatagccctatcggtttaaaaggtgtcgaagaactatccatggtattcgattatctgaaggatgtggacatccggaccgaaatcaaactggaccttaccctggcccgtggtttgagttattataccggtgctatttttgaagtaaaagccttagatgtccagatcggtagtatcaccggaggtggacgttatgatgacctgaccggtattttcggattaaaaaatatgtcgggagtcggtatatccttcggtgccgaccgtattttcgatgtcatgaatcaactggatctgtttcccaaagataatatgacaaccactcagatccttttcgtcaatttcggtaagcaggaagaaagatattgtttaccacttctcaaacaactgcgggaagccggtatcaatgcggaaatttatccggaagccgctaaaatgaaaaaacagatgacttatgcagataaaaaagagatacctttcgtagccctgatcggcgaaaatgaaatgcaagaaggtattatctccctgaaaaatatgctatcgggtgaacagcataatgttacaatggaagagttagtcgaaagactcaagcgataagacgaataaaacattcatcaaccggtatttatgcagatatataaaaaggaacatcgtcccctgaaaagtcacggatacgattccagatgtccatgataaaatgaaaaagaacagtgaaaacgggaaacaactttcactacatgtgatgtgtgcatttttcaatttttaattttcaacattcaattatcatggtacattatatatctccagcacctcttacattcgaggtcatcgataaaattttaagtaagaattacaaactggctctttccgaagatagtaaaaaattaatcaacgattgtaaagcctacctggatcataaaatcgagagttctgccaaacctttatatggcataacgacaggtttcggttcattatgcaaaatcagtatttccaaagaagacctcagccaattacaggccaacctggtgatgtcacacgcttgtagtcttggagaaccgattcatcaggatatcattcgtctgatgttattgctgaaagcacatgctttgtcgctggggaaatccggcgtgcagttagtgaccgtcgaacggatcatcgatatgttcaatcataatgtattgccggtagtccgtgaattaggttctttgggagcctccggcgacttagctcctttggccaatctatttttacctttaattaacgaaggagaagtgtggtataaaggcaagatttgcgatgcaaaagcaatcaatgccaaattgggttgggccccgatcgaactcggagctaaagaaggattggcactattaaacggtactcagtttatgagttctcatgccgtatatgctttattgaaagctttcaagattgccaaatatgccgatatcatcggagcgctttcattagaagcttacgacggtcgaatcgatcctttcttacctcagatccaggccgcacgtcctcacccgggtcagatcgaaacagcacgcaatatccgtactttactggaagggtccgaattccagcaaaaagaaaaaacacatgttcaggatccctactctttccgttgtatgccacaagttcacggagccagtaaagacagtatcatgtatgtcgcttctgttgtagaacgggaaattaattccgtaacggacaatcccaccattttcatggaagacgatttgattatttccggcggcaacttccacggtcaacctctggctttggtgatggacttcctgagtattgctttggcagagttaggcagtatatccgagcggcgtacttaccggctgatttcaggtgaccggggaaatattcctgaattcctggtagccaatccgggcctgaactccggttttatgattcctcaatacgcagcagcagctattgtaagcaaaaataaacaattgtgcactccctgttctgtagactctattccttcttccaacgaacaggaggaccatgtcagcatgggaggaaatgcagcgacgaaaacggttaaggttgccgaaaacgtagaacgtattttagcaatagaactgatgaatgcagctcaggcgatcgatttacagcggccaaccaaaacctcaccttacctggaagagttcctgaaagaattccgtagcatcgtccccttcaacgggcaagacagagtgatgtataaagacatcgatgccgccacagaatttttaaaacaaggtgatttcgaataaaacccagcgatttcttcagtagaatatcccccaagtcaaaaagctttggggatattcccgaagaaattctttcattcattacgatgtttgcgcagataacgtgtcaaacttctttcaccaatcaaaagaagtataaaaatccccagcaacacaaggatacgcatacaaaccccggaatacaacgaaaaagtaaaatgacgcatatcgatcatcatcacactcaacaagatcgataaaacatccagatacatcactccccggatcagtttcaatcttttacttttcaatatcttatttctactttccatattgccaataaagataacaatcctaaaataaaagacaaaacttttcttttcttaccacaaattatttttaattttatggaattccattcgtttttgcatctctaagacgataaatatttcgtatgtatcataaaaatagaaacagatgagactaagtaaacttttaatcggcatactattatttataggttcagccacttacgcacagcactccccgcaggacaccttgacggcctactactatcgatatcctcaacaagccatcaaagacgccgaggcactataccgacaagccatcaaaaacaacgatacccctttactgatcaaatcattgattttaaaaactacttttacgttagcgatcgatcacgaggactatccggcaatattaagcgaagtcgaaaaatacctttcccaggaaacggattctgccggtatagctgtcataaattcctattgtgcccagctttatgcagagtactacaataacaacagctatctgatcaaccaacgcacccccgtaaccgattatattccggaagatatagcaagctggagcagtaatattttcgccgaaaaaatcaaaaaatgtgtagcagcctctctgcttcctgcccgaaaattacaagaaactcctttgagcacatacaaagccatactgacttctttgactccagcggattcattacgtcctacactttacgactttctttgttaccgggctataaatattcttttgcaaaccaatactcccggctttgcagaaccatcttccgattctcctttactattcgctccggccgacgaatttatcgccactcctattcccgcagaactaaaagggcggtcggctaccattttgcagatatggcaagaattactccgcttccggaaaaaacaagccaatctcccggctttcctggctaccgatctggaccgtctggaatatgccaaaaaactttcttccgaagacagagattccctttatctaaaagctttgcaggaactgacccaaaaatacatcggcagtccttttgtcatcgaagtgatggctaaagaagccaatgaatatgtacaagccctatcttcctttacatttgggcaatctgccgatccacaacaactcatcaaagaaaaagaaaagatcatcaacttctgcgaaaaagggatacatttatatcctaaatatacacgtatcaacttgctacgttcgatcgtcagcgaaatgaaagctcctaaactatcgctccaactccctgaagtaatctacccggaagaaaaggttgccttaaaactgacttcacagaacctggacaatgccaccttacaaatctaccgaatcgatctcacgaccgaggcatacgaacaattgaaaaatcaggataagaacaatgtccaacgtaaagtttacgaaaaacgtttcaccttaactcccagtctgaccgaacaagataccaccatccatatcccccttcccgaagccggactctatcagatttcattaaatacaacggagacaaaacatagtgtatcccaaactgttatcgccacccgtttattttcaaattctcagaacagcaagaaccagcaaatttattccgtatacgattcgaagagtggcaaacccattcccaaggccaaaattcttctttataaacccaactatccgggttacaccctactagacacagtgtttaccaattcccggggactggcattctcttcccaaaatttatctaaacaaaatctggcttatcaggtaatcaatccggagaaccctaatggtcccatcaacccgatataccggtggtatacctctcctacctctcaaaaccatacgaccttaatcaccgacagaaggatttaccggccaggccaaacggtttattataaaggtatcggctggaaagcaaccctagataccctttatgcgctggaaggtcaaaaatacaaaatcagctttaaggatgccaacgacaaggaaatcgcccaacaagaagtaacatccaaccgatatggttccttcacaggaagtttcgtcattccggcccgcatccttaacggatattttaccctctataccgaaaaaggtcagactaccatcgaggttgcggattacaaacgacctgaattcgaaatcacctttcacaaaccgacacgaacctattttgtcggtgatatcgtccggctggaaggacaggtcggaagcttttccggcgtaaaaatggctaataccgaaatcaattatgccatttcggtatcatcgccgatattctattttccacatagagacaccacaatccacggtattaccagaagtaacgccgagggaaatttcgagattacttttaaagcccaggatattccgtcctatccctctttccgcaactcctatctctatgaaataaaggtaaaagtgacggataccaaaggtgaaacagaggaagcgggcacgagtattcccatctattccggcaaagcaaccccagctttacaaatcccggaacaagtgaataaacaacaacgtactgcttttcatatctcactagaggaaatcggcaacgactccagtgcttatccggtaaagtacaccatacaaaaattggtatcccccaaacaattacaaaccaatttagaaatcaaagacactatcgtagaaaaaaacatccttgaaggtcatctagacgtcttccgaaaagattctatttttccggatttaacccaacaaacatcaggtatatatttatttacagtggaatgcaagcaaatcaagacaaatcgagtctttttcctctattcccctctggatcagaaaccacctttcccgacctacgagtggattgtcagagaaaagaccacttgccgtccgggtgaaacagcacgtattcttttcggtacttcagtcaaagaagcctatgtcagatatgatatttatacttccgataaattaatcaaacggtcttaccctgttctttcagacgaagtgctttcgatcgatatcccttttctgaaagaatacggaaaacaaatctggttgtatatctcctatgtaaaggacaaaaagtttttctcggagatcatccctatccaaaagacagaaccggatcgtaagttaaccgtagagaccaaagttttcagagaccaccttaccccgggacaatcggaaagctggaaatttcgggttgtcgatgctgcaggcaaacctgtgacagcagagctattggccatgatgtacgatgcctccctcgataaaatcgcaccttattattttagatttttctcggtttgacttaaccgattgagaaataaacttttagcgaattatttgagaaatagaggtaacgatttagcaactgtgcgaatttcagcgttttacattgctatgctgtcaaataactctttcatttgcaaatataacatctttttccgaaagtacgaactttcggtgacaattttataaaatcgacttgcgaaaaaagaaaattatcgtgaatggtctaactctatataccagccttccttgacgggcttgtatagcgtagtgtcattgtatgtcctgcggtaaattttgttcaggtcgccgtgttcggtgatacggatgtcacggcggcttctcaattcgagatcgtaaacgaaactcttggatgttcccgcatccacgatgccgtgggagtagtacagcataaataagctcacatataccgaatctgccgtttcctgctccctgcggtcaacaaggacaagaccgcatccaatctctgacaacaaggagtcgagttgtattcggtcagatcttgataacccgtgtaccggcgtgtcctgcacttggttcggttggtaggatatttgtcctgccgaatcaaggatgagaatatcgcagggagagagcggtggatagtgaaagcttccctccgaactctccgccatgattttgcgtatcttgtcgaatgccgcctcgtgcgtggcgaagtggcgtatcatttcctcgtccgtcggcggcatgggtggctcgcagcttacgaccgatgcaagcgttaaaagtagtattatgataactatcttcatctctgtttaagccccaccttcaccatgccatgtgcaggtttgggtattgttatcatagttatgttctatccattgccccgatttctcgccgtcagtgtattgtccctcgatagttatatagggtttgccgtcccgtgtcgattccacacgataagagccgtcaagttttccgttacggtagtggcgtattatcctgctgcgaagcgtgctcgcatcctcgaagatttcccactcctcgccatcttttttcccgtcgatataatgagattcaaaaatctgctctcctgtcttgctgtcaaagcggcgctcccgcccgctctccacactctgcttatattccttttcggcttctattttgccgttacgaaaataggtctttacagttccgtctatcttgccttgctgcatgggtgtttcctttcggggagtaacgccgtcttggtaatactccgtgaatgtgctgttacgcttgcctttggcatatatacccgattcacgcagcaccccatcacgatagcggcgataatcaccgtttatcatgccatcggaaaatttaacacactcctcgtcaagtcctcgtataatgcgatattttccccgtaacggctgttttctgccttttttataatagaccgtgcgccgtgagttatctgttatagtctgcaaatcgctccattctacgatttgttgtgcggaaaccgtgccacacaatagtaaaaagatgtatagtgccaatattctattcattgtattttttgtttttcaaggttgcggctaacacgtggctcaatcaccacgaaaagcgattgagccacacgccattatccgcataaatcgaacttgttagcctcttcacttcttcaacaaagcgaaaaattcctcgtatcgctcgaaagattcaaagaatcctgcatgcaatgttatttgtgtatcatccgtcaagaagatttccaattctccttcttcatcgtcatatttaagatgttttatatccgatattttaaataaaaaaatcacaatgttttgta

SEQ ID NO: 5800 - DNA, 32983 bp, Unknown
  gut microbiota DNA sequence
acccccaactccccgagcgacaaatataaaataagacagggaaaataattaccggtggacaatacaatagcattttttcccaaaacttcagagaaccgccgaaccggtattgcatagcaacccggcattgaaaagcagtcagtaaaagatccgccatagcccacagggaaagatccagtaaagaatcataatcagaaatccaccggtcaaagacaggctttcccagttctatgacacaatcatggactgaaacgataaaaaccacacatatgcaaccaaatactaaaacacaccgtttcccgggccacaaactcatcacccacaccgactttaccagtgccaatattgctaaaagcaagaggatatgttccatataaaattcaaaaacaatatagtcgcatcaattaaatcttacagacaaactgacataaaacgaacgaccgggattcaaagtcgagtaattactattccaggggcggtcgtcgactttgtcgaaaagattttccaccccgaaccccggttccaataccaccgatttcaagttaaaagaatgccgggtattcagatcccattgtgaaaaaccgggagcaggatcgtaataataggtcttagagtagcgcccttcctgaatgcgaccgttaaggttgacattcagatgatataatccccagcggtgtccccagcgggcattggccgtccagacatttttcacacttttatcgatcggttcctgagttgtcttatcttcggtatccataaaatgataacttccccccaccgaaaaaccggctccggcatatacattcaatactgcttttaccccttttacctcagcccggcttatattatcccgctgttgggcctcattgtgtttaccataccccaactgttcggctatagccggatcgattccccggtagttgatcatatcccggattttattgatatatccggatacagaaaacgaaattctattgtgtacgtattctgcattcagcataaaataatcacttttctcggatttcaggttaaaattaggaatcgtcaccatatccgtcgttttcgccacatccgtggcatacaactgggataaagtaggagtccggaaaccggaagcataagatgcccggaaattcaggtcgccccacttataactcaagacaacattgggagtagcatagtttttaaaaaattcgttatagatataccgcaacccgaccacagcctgaaaattcttccacaaccggatttcatcctgcaggaaaagagccatcgtatacatattttccccatccagatcatcggtagcactcatcaaagtctctttcacatactccatacccacagaaaatttttgtgcctgtccgagtttaaaaataccttttaacgaaccattgtaataatgtacttttttccgggtatctttcccccgggaagcttctccgggcttactgaccgagtcgtaacgcgaagtaaaattatcggaataaaaatcggcatcgatataagcagatttattgatcatatatttagctcctgcgccataagtatacgtttcatgctccatattgtatttatacaccgatgccggccggtcgttctcccaattataatacgtaccccttatccccagggtgagacgatcgttcaccgcataggtaaaacgttgattcactgtattggaataaaaggctgtcgaagcttccttatccgttgccttgtctttttccggattacgatatttccgttttgtctctttatccgtcgcataagcagcctccaaagcattcaattgccatccgtcggcctgcaagcgttgataggaggtatacgaaccgaatttaccccggttaaaatctgcattcacagcctccgagaaacgccccttactcccataacgggtatcactggaaacctgcatcacattcttcgcatcgtcggtaataatattgatcacccctcctatcgcatcgcttccataaagcgccgaggcagcaccgttcaaaatctcgacccgcttgatgttagcgacattgatacgggaaatccggtcatccccggccagccggcgcccattttccaacaccagtatataatcgtcattcaggccgttcaaactcatggttgtccccataccgctcgtcacaaaagcaaacgaagcattcatcttagtcaatacttcttccatggtcgagaggttggcttcccggatatcctgagccgtaataaccgataccggcaccgggctgtctttcatccgccggtgtgttcccgttccggtgactacaacctgaccgatattgatgtagctgttttccaattgcacaacgacctggctttccccgctctttaccgtaaccgatctgggagcataactgacatgagtcacccgcaactcatgggttccttcgggcagattccgaaggacaaactctcctttagcattggtcgaacaacccgcaagactatggtctacccggatattggcaccatctaccggattcccggattcaacactcaccactttaccgctgatagtcgtttgcgaccatacctgaccaatgacaaacaacaaaacgcttgtcagcgcacaccactttttcattaatcgatagaaaattagacatttaacgatcacatttctgaccccgggaatgcttattttctgtataattccggcaggtttcctgacttatccctgaaaagcgaccttcccatcctccattggacagtggcataagaaacttatcaattacgggattcacagtagcgggcactattccggattctcaccggattcccttttatgtaacggatgaaatctattacatcaccaaaattgtgacaaaggtagaaaaaattaaaaaaatctcctgcaacaaaccgggaaattattcaatgaactggaaacgcccaggaagcctacgactcaggaacgacagccgaaccgaatccggtcttgttaaaagcgaaacaccggtaaaaaaagagatggcgttttatattattctcctattacttcgggcacgtgtttgttattttatttgcatgtgttatttttgtagttatgaaatggttattatgaaaaatttatttagaacagtcagcgtgattgctttagccggctggtttttagcgtgttcagagagaaagagtgaggcgtgttacgaaattattcctgccccgctggaaatccgggagaatttttcaggcggggaattcgtgttggatgatggcgtgtgtattgtttacccgggagagaacgaggcaatgcgccacaacgctttgtttctggcggattacctgaaagcggctaccggacgggattaccgggtggaaaccggttcgcgcaggaagaaaaatgtaacgttacaattagattcgagtattaaaaatccggaagggtaccgtgtgaatgtgtctgccagcggagtagtgattgccggggcaagtgaggcaggcgtattctatggcatacaaacgttgcgcaaggctatccctgtaaaggcgaacagtgttcccgtattaaccgctgtcgggatagaagacgagccgcgtttcggttaccggggggtacatctcgatgtgtgccgccattttttcacggtagacgaggtgaagaagtttatcgatatgatggttttgcataacatgaaccgattacattggcatattaccgacgaccagggatggcgcatcgagataaagaaatatcctgagttgacaacagtaagttcccgtcgcacggaaacggtgatcgggcataatagcggtaaatatgacggtaagccgtatggcggtttttacacgcaggagcaagcacgggaaatagtggactatgccgccgaacgctatattaccgtgatccccgaggtcgatttgccgggacatatgcaggcggcattggccgcgtatccgtatttggggtgtaccggaggtccgtacgaagtgtggagaatgtggggagtgtccgaagaagtgctttgtgcagggaacgacagcgtgttgacttttatcgatgacgtattgacagaaattatggagatttttccttccgagtacattcacgtaggaggagacgagtgccccaaggtgagatgggaaaaatgcccgaaatgtcaggcccgtatcaaagcattgggtatcaaaggtgacgacaggcacacgaaggaggaatatttgcagagttttattatttgccacgcggagaaatttttaaatgaacacgggcgccggatgatcggctgggacgaaacactggagggcggtttggccccgaatgccacggtgatgtcctggcgcggggaaggtggaggtatcgaggccgcacgccaacatcatgatgtgatcatgactccggacacttacttgtatttcaatcattaccagagcaaggataccgaggaagaaccggaagcgaatggaggttactccccgctagcacacgtgtatggttacgaacccataccttcaatgctcacttctgacgagcagaagtttatcaaaggcgtgcaggcgaaccattggacggaatatatcaccactttcccgcaattacaatacatggctttaccgcgctgggcggctctttgcgaaattcagtggagccaaccggagaagaaagattacgctgattttctagaacgattgttgcggctgactcgtttgtacgatgccctgggatataattacgcgaagcatatattcgatgtgacggcagattatcgcgttaacacgaaaaacgggacggtggatattttcacgggcacgattgacgacgcaccgattcattatacgctggacgggacggaacccacggttcagtcgccggtgacggcgggggtgttgtctgtcagtcaaagcggaacgtttcgggcgatggcggtgcgtccctcaggaaacagccgcgtagtgacggaaaagatcactttcggcaaatcgacttgcaagccgatagtcgctaaccagcccataaacgagcagtacaagttcaacggaatcacgactcttgtcgatggtttgcaggggaatggcaattataaaacggggcgttggatcgctttccggggtaatgatatggatgtgacgatcgatttatgccgggttgaggaaatctcttccgtgacatttcacaattgcgtagaaaaaggggattggatattcgacgtgcgttccgtggccatagaggtttcggaggacgggaaaaattttgagcgcgtgtttttcggggaatacccggagatgcaggaatccgaccgtaacggattgtacgtgcataagcagacatttgccccggtgaaagcccgttacatgcggattatggcttctcccgagaatgtaatgcccgattggcatcccgggaaaggttacccggcgtttttgtttgtggatgaaatagtagtgaattaaagaaagattcggaagatatgtcgtttgtacggaatctgtttttcagcgtattcctgggtgtctggggaacattgtcggcacaggaggaaagggtgattcctgtcccgagggaagtactcccgggaacaggagagttccgtatgtcggaagttacggcatggcacaccaatctgagtggagcggagaaggaaagtttagtcaattacgcggcagcggagttatctacggggagacaagaatggcacggaaaagatcatacgggcaaggatgtcgtattttttcaaaaaatatccgatgcgggcattcatcccgaagggtatgttttggaagttaaaccggaaatagtgacggtatcggcctctaccgcaaccggtttgttttacggtttgcagtcattgctgcaattgatgaagccggatgaacggggaggctggacagttccggccgtgacggttaaagactccccgcggttcgggtaccgcggattcatgatagatgtttcgcgtcatttccgcccgaaggagtttgtcaagaagcagatagacgctatggcccgttataagttgaaccgcttgcatttgcatttgacggatgccgccggttggcgtatcgagatcaaaaaatacccgaggctcacaagttttgcagcgtggcgcccggaagcggaatggaagaaatggtggaatactgccggtggacgcaagtattgcgagcgggaggatcctgccgctcaaggcgggtattacacgcaggaggatatccgggagctggtgcgttacgcggcggaacgccatatcacgataattcctgagatagagatgcctgcccattcggaagaggtattggcggcttatcccggtttatcgtgtgcgggtgaaccttataaggggtctgatttttgcgtgggtaacgaggaaacgtttacttttctggaaaatgtacttaccgaggtgatggcgcttttcccgtcggaatatattcacatcgggggcgatgaggctggcaaacaggcatggaagagttgtccgaaatgccggcggcggatggcggacgaggagttgaagaacgaggatgaattacagagttatctgatttgccgtgtggagaagtttttgaacggccacgggcgtaagttgttgggatgggacgagatcatggaaggcgggttggctccgaatgccacggtgatggtgtggcggggcgaggaaggcggagtaagggccgtgaaagccgggcatcgtgtcgtgatgactcccggaaaattttgttatctggatagttaccaggatgcaccgcagtttcagccggaagcaagcggggggtatttgccactggctaacgtgtattcgtatgacccggtatctcccgcgttcacagaggaagaggcgaaattgatttatggcgtgcagggcaatttgtgggcggagtatatccctaccgatgaacattacgaatatatggcttatccccgtttgttggctatcgctgaagtggcgtggagtgaacctgccaacaagtcatatcctgattttcgcgggcgggtatgccgggagatcggatggttgcgtgaccgggggtaccatccttttcccctggagcaagagttaggggaacgtcccgaagcaaaggaaagggtcgttcatttggcattggggaagccggtggtgtacaatgctccttataacgaacattacaaagcgcagggggataagaccctgacggatggcatccgcgggggatggacgtattccgatggtgcgtggcaggggtttatatcgcgggaccgcctcgatgtaactatcgacctggggaaggccatttgcataacttccgtggaggcaacttttattcaagtggtgaatcccgaggtgtttttgccgtgcgaagtgatcgtttctttctcgacagacgggaagaatttcgtggaagcgaagcgagaggaatacaaggtatcgaaagaaaaaccggtctgctttggaaacttcggttggacaggatgtgcctcgacccgttacgtgcgttaccaggcccgttcggacaaggatttacgcggttggttgttcacggacgaaatcatcgtgaagtaaaaatgaatcactatctattgcggaaaatatgcatacatctcaatttctcatcggtgcagcttcgtcgggcagcggaaaaaccactttcacgctgggattattgcgtgcgctgaaaaaccgcggtctgaaagtacaaccgttcaaatgcggccccgactacctggacaccaaacaccatgcagctgcggccgggcaaacgtcatacaatttagataccttcatggcttcagcgacacatgtacaggaggtatatgcccggcatagccgaacggcagacatctgcatcaccgagggggttatgggacttttcgacggatacgataacatggcaggtagcagcgccgaacttgccggcctgttgcatcttcccgttatcctcgtggtcaatgcccggtcgaccgcttacaccgtcgcagcaatcctctatggtttcaaacatttccgtcccgatatccaaatcgcaggagctgtattcaacttcgtcggttccgaatcgcattacacctacctgcaacaagcctgccgggatgccggcgtcgaagcactgggatatttgcccaaatgcaaaggcatcgaaataccctcccgccacctgggcctgaacatcgatagtgagttttgcttcgatgaatttgccgaccggatcgcctgtcaggtggaacagacggtggatatcgaccgtttgctggatatttgttcctgtgcaactgccccgtcgtcctgtcttccgggaaaaacaaacagccatgccagtgacatgtgtattgccatcgcctgtgacgaagctttcaatttcatctatccggaaaatttacgtgtactggaacaaaaaggcaaactcacttttttcagtccgctgtatgacagtgaacttcccgtctccgacctggtgtatttacccggaggctacccggaattttacctttcccgtttgagtgaaaaccgaacgatgcggcagtcgatactgaattattgccaaaacggaggacacctgtttgccgaatgcgggggaatgatgtacctcggagaatatattaccgatacagacagacattcctatccgatgtgcggttttttaccgcaaggagcaacgatggaaaatatgaaattaaaactcggatatcgcaaaatttttctgaacgggcaggaataccggggccacgaattccattactcccgcataatcccgggccaaagccccctgccatccattgcccgggtaacgaatgccaaaggaatggaagtcgatacgccggtttatcgttccgggcatgtcactgccagctatattcacttttattggggagatcttcccccgttctttatttgataaacacacataggtaaaccgcaacgatcgatactaccgtaaggagagttaccatgtgattcacccggactgcgatccggaaatcggcatagcttatttctctgtcgttatccccgatataaggcttctcgaccaacaaaccgtgataaacgtgtgcaccgccgaaccggcaatctaaaattcccgccatagccgattccgggaaaccggaattcgggctggcatgctggtggcaataacggtaaataaaccggaacagaccgggacgataggctaccagggccataaacaaagcagtcaaccgggccgggatataattcaatacatcgtccaaacgggctgccatacaaccgaactgccggtaacgctcatctttataaccgatcatcgaatccagggtgtttaccatcttataagccatcatagccggaaatccgcccaaagcataataaaataaaggagccacaaccccgtcactcagattctctgccatcgtttcgagtacagctgtatatattcccttaggcgataattccgacgtatctctgcctacaatccaggacaggcgccggcgtcccgcctccacgccctgttttttcaatatatcgacgacttccctcccttcccggatcaggctatggttagccaatccataaaaaacaaagacagacgcaacaatgcagaaacaccaatccccaacggccagtgtcccgacggttatcccccaaccggccataccggcaaacaaaggaaacgacagtgccacgacagcccctttccatttccggaatcggccgcaattgaaatgccgttccgcccaagagatcatatttccaaaccccacgacaggatgcgggattgtccggggatccccaaaggccagatccagcagataacccgcaatcaagggaagaataaccagccacacctcattcataaggctctaatttgactttatctacactttccaatgcttccaacaggagccggttttttgcctcagtcagggtattcaccctaaaatagtgcgtatccaatcctctgaaattggaagcatcccgaatcaatagtccatgttcctccaacagatatttctttaaagccgaactgttgtaatccgtttctacgagaaaaaaagacgttcccgaaggcaagggacggaatccgggaattcgggccatctgtgcagcgaattcctgctgccggatccttaacaaagaagcatccggcaaaccttcgccgccatgccggagcaagaatttcccggcttctatcgccagcgcattcacagaccaaggctgcccgaagcaagccacaaattcgacgatagccggatttcccagcatatatcccaaacgcaagcccggaatagcataacacttggtcatcgattttataaccaacaaattcgaatattctttcagcagtgataaagccgactccgtcccgggagcaaaatgaataaacgattcgtcgacaaccagcaccatatccggataatttttcaccaaagccgtaatttcttccagactccagattcgtccgtccggattattggggttacaaataaacatcagattggtatgttcgggaatatgctccacatccacctgcccgacgaattggatatgatggtcatacaaggtacatgcatcttcgtactccgtaaacgacgggacaggtatcaacgtacgattaccggaaaaagcatgagccaccatatagaacaattccgtagccccgtttccgaccaaaacctgttcgggagtaagcccgtggcaggcagcagccaccttacggaaagaaccggcatccggttccggataatgaaaaataccttcgagatgcgtactcaaaaaatcacacaagggacgggtatccgcttcataccagacatttgtcgaaaagttcgcttttatttgcacctgcgatttataaaggtcatccccatgtccgtgaatcatagttataaaaataaagttgaataaatatagtccaaatcgacagctttccgtacctgaccggccagaaggtcgtattgccgttctttaaaagccctgtaatcaaaaccactgccggcagtcactccgaaacctgcggccagatcgtctaaaacaaccggattgtcgaggataccgtgcatataacttccccagcagtctgcgttcaaccgataaccgtcggttgtaccgtccgcaagggtattgagcgttgtttgccgccctcccgcgtgtaaaggtgtcgtcgtccccatgtgaatctgataaccggcacaatccgattcataattcttaaaacggaaatgactctgacaaaccaccttcgcatcctgcatcaccgtgaccagaggcagtaaacccaatccgtcggtcgcggtttgcataccttcgacctgcccgggatcctcgatccgcactcccatcatctgatacccgccacaaatgccgatgacttttttcttcttccggaaggccttcaccacagcttcggccaccccgttggcataaatagcctgcaaatcggctatggtactttttgttcccggcagaatgataacatccgctttaccgatctcctccgctttatccgtataatataaatggaaacgcccgtctctctccaatgcattgaaatcggtgaaattagacattctcggcagacgaatcaccgccacattgatcttccctgccacagcagcagaagcttttgcctccaaagcgacagaatcttcttcttcgatatgaatatctttataataagggattacaccgaccaccggcactccggtaagttcccggatgatctgccgtccttcctcgaaaagtgacacatcgccgcgaaatttattgataatgacacctttgatcaggcatctctcctcttcaggcagcaacatcacggaaccataaacagaagcaaacactcctccccgatcgatatccgccaccaggtaagtcgcagcatccacctctttcgccatccgcatattcgtgatatccctgtcccgtaaattaagctcggagatactaccggccccctccaatacgataggattatggttttcctccagacgatgaaatgccttcacggcctcggtaaataattgcgttttgttccccgaacgaaaatattcccgggcggacatattccccacagccttgccgttcaatatcacctgggaagtctgatcggtggacggcttcaacaaaaccggattcatatccgtatgcggcaagatcccacatgcctccgcctgcacggcctgagctcttccgatttctcctccctccggcgtagaacaggaattcaacgacatattctgcgctttaaaaggcgccggccgatagccgtcttgtctgaaaatacggcaaaaagccgtattcaggatactttttcccgcatccgaacaagtcccgacaaacataatcggacgtagtttttttttctctatcttttccatatttatcacagattgctgcaaggattattcaagggagacccgctattttttcttatataagaaatcacgccaacgctcttcttcagccccttctttatccatttcgtaccgggccaggataaaaagcaaatccgacaagcgatttacaaaacgcaggataaccggttcgacgggatccgtccggttcaaagtccacaaacgacgctccgcccgccgggccacagtccgggccacatgacactgggccgataccaggttccctccgggtaaaataaaatgagtggacggatactgtatttttgcattaaaaaaatcgatttgccgctcacaatacacatccggttcttccggaagccgattcggattttgtcccctcaaggcagccggagtggccacatgcgacatcaccaccatcaaagaacgttgcaggtaaaacaacatctcctgccactcatgcccctctcctatcaacacacgaatcaatcccaggacagaattcaactcatccaacgtcccattggcttctatccggatatcgtctttatctacacgctgtccgccatgaatattcgttttccccttatctcctccgcgagtgtatattttcatatgattatcatttattttagtatcccgaatttatctattatatacttaaccggataacagaagtattttccatgataggcagatcgaccatatcggccggttttcctccgttcagataagtcagaatcgcccggttaaaagcaccgtgcccgactgcaagtatacatttaccggcatatttcacccgaaggtaattcacaaattctcctgcccgatgatacaactcatccaccgactcgacactaggaggcaaatgctcccaatccacatccgccagcgtttcgccggtatatatcccccagtccatctcccgcaataaaggagtcggctgaggctgttttccatggtaaccggcaacgacctttgctgtatcgtaactacgtgccaaatcactacatacgattacatccaaaggttcttgcttcaattgttctgccaaaacaactgcctgctcttttcctaaaggggaaagtgttcccggcaattgcccctggagaacataccgttgattttcgatggtctccccatgccgtgtcaacaataaatcaattttcttcatttgcctaaatttgtacaaaggtaaaagtttttgaaatcatttatctaaattcagaccggatttgatccggggcacggctggaatatctttggctttgggaatcgtaattgtgcttttggagaaatccacacgccaatgctgcggacagaggaagctctgcctgtccttacgtgacttgaaacgggggaagccaaccgcatgagtattacggaaaaagtcggtgtaggctgtgtcaggattgcgtaacgcactctgcaaggactgggaactgatttctgaaagccattcgtgttccgctttcggttcgctcttcatcagattcgtcaaatatacattgccaagcgtttccttacgctccttgtatgccgtgattttaaggttcaatgcccaattatagacaaaacgacaacagccgaaggtctcggcgaacaaaaccctttgctcatcagccggataaacagacaaagaccatatacacatgatgatacgtagcgaacccaaactgtctccgctgcaaattgcacgaaggctcaaacaaatgtcagcggctgccatctggaaaagatatgaaaactaccttcagtacatcaaagattccataatccattttttaagattctgaattttgcggctgtaaaaataggaaactcctttctgttacgaaaatgttacaagataattcattgagtttttttactgaaagattacatgctatctttgatccggtgaataaaactcgtttccagggattcaaataggtataccggcaagattcgccggatctttactccgtcaggaaggaaagaggcaggagtggctgaaccggcacgcctgggggggcgtgtggccgcaagttcgaatcttgtcatcccgactactgagcatcaacagatagaagtgggcgagataaggctttttgggtattcatagccataatattaacccctatcattgcggcttttttgttattcttgtatggtgaatcaaaagagcaccgaaaagaaagaattattaaggaagaactttggaggcgttcttgcaatgaagaggtcatgaaaattaaagaagtcgtggaaaataaagtgtctaaggagaaggatatgagcgaccctctaaactggtaatatctataaaagttgattaaagggtgaataaggcttctaacgaagcatttaaaacaagggtagggcaatagttgtcctgcctcatttgttataactgggttgttctaatagaggagtagaagagtgtctttaatggttgttgtcgaaaataattcgctaatattgcgaattgtgcaaattgtttcgtatctttgtgtcatcaaagagtagctatatgaatgtagagtttgaaaaggaatatttggcagaactttatgaaaaaggaaagaccgatgataagaagcatcgttttcaacctcaaatagtcaatggttatttgaagtgtgtcaaggctttactaaatgcctctcgaatggaagatttatatcagtataggtctttgaactatgaaaagttgaaaggtgataaaaaaggactttcttctttacgtatcaatgaccaatataggcttgaatttcgggaaataactaatgcgggtaatcaagcagtcatagaaatatgttctttggtggatattacaaatcattataaataggaggaactatgggtatagcagcaaataatttacagtcattccgtccctatcatccaggcgaattggtaaaggaagaattggaatgtagaggcataaagcaaaaggaatttgcgaagaaatttggtttgtcttattcagccttaaatgaggcgttaaatgcaaaacgtccgataacaacagaatttgccttgcttttagaggcagctttgggtatcaatgctgatttgcttgtaagaatgcaaacggattacaatatacaggtagcacgaaagaataactccttgcgtgaaaagctaaacaatataaagaaaatagctgctgtgttttgaaaaacagtccttggtatgatattataaaaacaagaataaggcttctaacggagcatttaaaacaagagagggtgtccaaaaaggcaaaatacccctttgtagaatcggatatttgatttcagtctccaatagggatacgaataaatcgagggtgccaaatactttttggacaccctctttggaaagtcagacggctctgtctattttttaccgatcaggcaaatggccactcggttttgttccatcacaggaaaaggttgttctgtatcccctttggcaaacacagttatccgttcccgggagataccattaacagtcaacaatacagccacctcttctgcccgccgttgcgacagaactttgttgtaacgcggatttccggtctgcacgtcagcataacccgtaatcaccacctgtgtctctgtatgtgttttcataaaagctaccaaggaatcgattttggctgtttcgctcgccagaatcaccgaagagttcaaggcaaagaaaatatcctgacgggcagtaagcgcagcagagtctatgaggtcttgcttcgtttcctgcagcacgggctgagaaaccggttcttcctttgttacgaccggcacagtctcctcaaaaatgatttcccggggagcttccaccttgcggtgttttttattcaaacggcaactaaaccctgccagaacattgaactgccagtcggcattacccgcctttttggagttaaaatggtcggaaagtacatttacatttccctctatattaaaggaaatgctattactgatccggaaatcaaatccgacaccaccacgtcctgcgacgaaattacggttatcgcgccaaaggtaacgcatcgtatatccttcgtcatgtatggcaactgcttcatcgttgtcaaaagcatgattgcctgctatacccagcaaaaaataagtattcacccaacgccgggggttaaattcgccgatacagttgctcagattaaacacaacatctgcattcaactgaaggaagttgaatttataatcccgggtggattccgaccaggcacccttaccctgccaaccgccaaagcctccgcgaagtccccagacaggcgagaactgataccccacagacaaagctccggccggtgatatcaggtccttaaagccggtttcccccacggtataccccattcctccctgcaactgcaaataccagtgtggattgaaaataatcccggcttcctcttttcccttttgtgcaaataagatttctgcacaaaataaaacgatagccagtaataaacttcttttcatatttttagcttttagcacatcagacattttatagaagaaagatcgggaggcaaatacctcccaatcctggaatcacaaccatacccggtattaaaccggctttacagttattgtcaaagtaccgctaagaataccccaaccatagcttattgttgcaggaatcataatcatgtattcgtccttaatcggagaacctacattcacatatttaaccgtgttacctatttgttccaaagtaacggataccggtaactgatagttattatactgcaggttggtttttacattaccgagatccagctcaacatccccgaacggaccgtagaaattccagtactgacccgtctgaacgatgtcaaatgccttaatttccttccaggtccagcaaccgtccttatctcctacctgatgcaccacagaaggatcatatgccggtttctcattacataaagtcggtttccattctgcctccaccgtttcgtatgttgccggagtataagtaatgccagttacagttgtaaaagtaacttcacttgaagcggtcatctcttgggtatcagtgtatctataagctttagtgccgtcccatccgtcataaaaatcttcatcatgctctttagctttagccaacgccattgcattttgctgcgcttcagctgctgaacgtcctttagccgtaaaggatttatacacagaccaattgttactaaatacattaggtctggttaacagtttaatagtagctgaatacagcaattgtccagtctgaatagtcacctcttcagtttcaaactcccacatggccggtgtcaccactttctgataggcaggaatccattcaccatgtatttcaccacagtctttcacccagtcgtactgtgaataaggaatattttcttctccttcctgaatgatcagttcatttctccagtctgtcagcaacccgttatactggaagttcacgatatccccgtcatcccgagcatcttttacagacaaacctgcaggcagattaaagtttaccggacgaatgaaattcaccaggaagttcttcaatgagtaaacgtctccgttataggcttctgtatacatttctatttcagcctgtaacccgttcaggctattcagtgctgtttttacacgattatccgacttgtccaggataatacgggcattttcacgggcacctgtcagctggacacctgtaaacgaagtagttctttcaccattataaataacagcggttattcggtaattccactcatctgatttgaagatacaatcatcccaaccttctaaaaccggggcattcacccagatctgccgtcccatagcattgtcgaaaatgcagttttcagccacatcatgtgcgttctgcggaattgcaacattaacattataagcactcttctgggtattccaatactgttcattttctgtgactgtcagagtaagtgcaggacgtttaacgctgatctcgaatgtgaagatcaccttttccggacaagaagaagtagacactttattcttcaatactaattgtgccgtcagtgttttaggactgtttaccggtaagcttccgatttcacggtgggtaaacttccagcatactttcttggtcaactggccgtcagtgctgttaccagattccagagtcggcacagtaatacccatcggagttgttgttgcagacaagaattcataagtattccagaattcttcatggctcataccaccttcctggataatccgatagacaccattacggatttcctcttctgagaattccatgttcactacatcgtccggacaacttaaagtaattgtctctgcttttttattcaatacgatatccgtttctttttcagcaacaatttccagttttataaaagcacggacaactgtttttccattgtgaaccagatcaacccttactatcggggtacggccgatggattctctgttgtttcctacaatgctgaaaatacccttttctgcatctgtacattcgatcacggtttgttgatcggtttgcgttgctccgccgttgcttaccatataaggtgttgatgctttagcaaaagcatatcgcaaatcataagctgccagatccagctgttcatgtccttgttgatttaacaaacaggtagcaattttctcacgcagattaaaaggcttatcaaaaggcacccgataccttggtgcttccattgttgctttatcgaaagtacgggcataatgatgcatctggttgttctttaacagcatcatagaatcagagataaacacctctgctggggtaaagcaagtttcattcacatgagcatattcagaatatacttcaggtttagctccggaagtcatttcctcttctgtcagtccttttttcaataccgctttcagggcaacgatatccagatccttatttggatcgacttcctgtcccgggttgagtttcttgtttttcttcactgtaaatacagctaccccatttttatcaaccggtttgcctacgatagaaatgggagcatcagctcctccgcctctggtaaagatgcaatcagctttgtcacctacaaatgagaaatcggcacagtccatacccacactctgcggattcagacgatattttgctgtagcaagtgcagaggtgaaaaacttataccggttaatattaagattaatatcataaccctctactgcgtcgacttcttctattttgacttcggcattttcatcttcctctagttcatggtatgccaaagttctgaacataatagcaggaactccgtcgtggtaatactgcggaacaaacgcaatgctggtgagccgttgagagaaaatgctctgggtcgggataatcacctgacgatattcatcagtatctttacccggcagattgataacaacgtaaccttctttttcctgtatatatatgttctgattcatacggatggccggttcaaccttggtttctccgatatacagataatcattctgtacattcagattgacatctttgaaagaaactttaccgatttctgtcttacctttgctggtagtataatagaatactccattttccaggctaatagaacccacaacctgacctaaattggttgttgtcattccgtcagaaacagtcagatcgccgcttgcaggatcaattgaaaaccggaaatcaggaagttcaggagttgctccgggttcccctttgatcttacccagatccgtttccttaccatcgaccgtcacaaacagatggtcttctcttcgctcaaaagaaacgtttggagaatgaccttgttcgccttgttcgccttgttcgcctttgatggaccccagatcttttccgttatagatcaggtgaccgtcagcgtttatagtaaactccacttcgggtaattcaggagtcactttccctaaatcattgctcgtgccatccgaccagcttgccaccagatgcccttcttcattgattgtaaaagtaggagcatctcctttcggacccatcgggccttgtgggccctcgggtccttgtatcccctgagctccgtcttctcccttggcccctttttcaatatgataggtctgaccattggacaaagtcactttcactccgcctgcaccgtccgactctactttggtcaggatggcgcctgccttgatttgggcttcaataccctcaattgcttttttgttagcatcaatttgttgctgcaaatgactgatatcatcatcatagtccttacagcctacgagaaaagtccctgtagacccaagcaacaatgcacttgcaagcacaaaacctgtaaatttccattttctgttcataactaaagaattataattaattaaaattcaagccattactgactattactatctcacacattcaggggattataaatcatgttttttactgatcagcccccccttattaaaaacatttttcccatacttttattttttaatcgctacttcgtttatttaaatccattttatcgaaaccattattatatttttatcgattcctttaaaacaagtactgacacaccaaggatacaaaatatcaagacccacttttttacttccatatcatcgatcaaatcaatcagcttcatacctcttttgcattattagttaacaatatcatactacctccccgaaaagtatgtataaaatgtgtatacatatattatcatccgacaggatatcaggtaaaagttccgggtcagcaccatatttgtcttatcacaataatatttttatacaaaaatgacatgttctgaaaataaaattccaccaaaaaaacggacatttttttggtggtcgtttgggaaaaattttggaacttttatgaatctcttaataagagttgatagtcagatgattataaagtataaaacaaaaaaaacacccctgaaaagaggtggtataatataatgaatttaaacgtccgtttttatatactcaaaactacttcatactctatgagtttaattctgattcatgccccaaatataaacacttttttcgagattacaacaatattcggtagtttgatacaataatttttctattttatttgccagcaggccctccaaggtctttttttgtcaaatattccttaattaatttgtggtatataacggtatattgcaaagatgagacttgtcattaaaccaggcggtcgtttcacatacctctataccatcaaggggtagcgcgcagatgatggaacgaccttaacagtatcctgtccatgccggtgtacacccggatattgtatcccgggtcaaagcgctcaccgctggaggacaccaggaagttcttcgggcggccggaatgcacgctggagcaggtgtacagggcattgtcactaccagccacggagttcagcgagatacaggcagatatgtataagcgcagccagaagctttggaaacgtaatacgcaggttgtgtactataacccgacgaactacttctttgagcgggaggaggaatgcggactggtgcggtttggccactgcaaagagggccgtccgctgccccttgtacagccggggctgttcatggaccatgacggcttcccgccggcgatgtgcatcgagccggggaacacggcggagaccagcacactcaagccgatggaacagatactgaaagacaagttcggtctgtcgggcatacgatgtgatactttacagcagcaccacagtcagaacacttcagcctctaccttgctcgccttcgggcgagcaaggtagaggactgaagattctacacgaattgcacttctattgtgaatcttcaaaaaattatatctatcactccacgatgatcgtcatggcatctcgcaaaacgtgagagtatccgggattcgtcaatcgaaccgacaccttatagacgcccggtttcgcatcattctctaacgggtacagcaaaactccgcctccacggattgtcaagtctttcttgaaaatcgccgcagcctcctctccctgattcgaagtcaccgactccacgctgaataaaatctgctgagtcccctcgtatccttgtaacgccaaactcacccaaggagccttattctcaatccggacagcatccaattccggatctaacgtcttgcgaatatacatcgtgtccgggtcgtaagatgcgttctctgtcaacaggtagccgaccgttgtctgatggcaggctccgaccgacaggcccactgccaatatcatccatatcattatttgtttcatcttcatgtacttttttgaattattgttcataccccaatgcgaaattatattccaatgcgtgcactatacaattgtccggctcgatatctcccgaggcaatggcaaaaataggctgactgttcataaaactgatgtgtatcggcttaggcgcattctctaccactccattcttcgactgcttcatgataaacacccatatttgcgtacctgccaaggtagtcaagtagctgcctcccgttcccgggcttccgtaagttgtcggttctccgtaaggaatgtccttccgatagagtttcccgtcgatcacatgtctcaacaacatttcacgacaccactccggatcaaggtcagacacccgtttgtgaccgaattccaacaaatgccgacgaatcgaatgattcgtgataccgaaaaacgtaatctccttgtgtgccgggtctttcccctcgaaaagtcgcaccatctcctctcccgcatggcgaaccaacagaatcgtagaatcccaatcgtaggagtttgatgccatatactgcatcaaattcccatgataacgtccgttactaatccctgtgtcgatataattgtcttttgtacaccccacatgtaataacgagcccaaaaaccatattgtatataacatttttctcataatattcttcttttaattcgaacgacgattccaatacctgttttggcgaatcaaatcattattggagaaacagtccgctcccaacatcagatacaaagcgccatcttgaatatctctatccgtgagcttatcgtaagcctcggaaatctccttcctgatataatcatgcgtatcatcccctctcaggaaacaccaaccgttacgcataatgtcaaaataacggtgatattcagccaccagctccttctcccgctctctgaaaatagccagctggatattcccgctcagccctttctccacatcatcggagttcgggaaagcgtgcatatcatccccataagcccggcgacggatctcgttcaaatcgtctacggcatttgtcttcccctgacgagcccgacattctgcacggagcaaataaatctcgcctaatctccaaatcaccttatactggttgattccggcaaactgaagttccggggtgtacgcaagcttaatgtaatgtgcataccggaacttatacaaaaatgcccgtttcagcttttggttgtcctccgctgctacgatggaatctcccggtttatgctccgttgcagcataaacctccgcattgctcttataaatcaggaacaatgaatccgcatcaatattccaaaaataggcatccctacgcaaatcttcgggagcatacatcattctcaccgtactcttgtaatatccgtctgaatactgattgttaatcggatgcgcacttcccagagctatcgggaaggtgatcggcaaatcagtgcgcaaaccctcttgtgagtcatagtaaatctcccagatcgactcggcgcttcctcctttcatcacgcttgtacaaacggtctcaggatccgcagccaacgagtaactgcctaccttcccctctatgagcatagtgcaatactcctcggccttcgcccaacactctttcttgccttccacgccggccctccacgcgtagagatgagccaacaaagcagccgcggcacccttgctgccatactgtttcatacgggattcttttgaagtagccaccaaatcctcgtatgtcggcaaatccatcgccttcagtccccatttttccgcctcatccaacacactgcttatcgggctctgaggaaacttagagaactctattgtagagcctgtaatcggcacctgcccgtaattcatcgccaagtagaaataagccaccgccttggcgaaatatgcctgctgaatatagggtttcagcttctccgggtctcctttgaaacggtgtgtattctccagaatcaaattcgcctgataaatcgtgtaataataatatttccacgttcctacattcgacaatgtcaaccccttgcgcgaagatctgtcgtaatccaatatctctccggctctggaaatatcgccaccggtaaactcacccacagcctgcctcaaatagacttgcaagccggtcagcacagcctccagctccttctcgtttttgtaataattagaataggtggttgcattctccggctggatattgataaaatccgcacaagaagtcccccaaaacaaaactgtcaaaccaaatatgtaaatatatcttctcatgtccgttaaaaattaagagttaatcccaacgtatactttctgggtaatggataagtatcgccattatcacgtcccgtgtaaatattcaccacttccggatttccgcccgagtagttgctcaaatagaacaggttttctgctgtcaggaagaaacgtactcccgagaaccctgccttcttggatatcctgtccggaagattatatcccaaggttatttgcttcaaggcaaggtggtgcaccttctcgatagccgagtccgtattcatactgagggagtttccccatgccggagcattcggattcttgttcaccccgtcccatggtctcaacttgcggtaatcgaacaacttcgtcaaatggccattctccgactgtgtgctgaaccccagccccatccggttgttaatcatttttctcccgattgtgaaattcaccagtacgttcaggtcgaaattcttccacatcaattcgttcacccatcctccatgagccaaaggaagcggcgaacccgcataatatgaatccggattcccgtcgccatccaagtcaagcagacgataattaccgacagcgccgctgattccatctgtcgccacaccgttgaagtatatctcctgtccgtcaatcttgtacaagcgaggtacctcggcatccgagttgtagtacccccggtgtgcccacacgtacaaaccgttcaaaggtctgccggctaccagtagcgtcccgtcaccgtccactacatctttccccgaatacgacttttcaaaacggttccagtttcttgccatattgaatttcatccgccagctcacagcactctcccgcaagatatctgcctgcaactccagctcaagcccctcgttggaaatttccatcgcattttccacctgcgcaccgaacgtatacaaactgcccggaatcggaatatcataaatcagcgaactggtatatttgtaatagtaatccaatttcatattcaaacgataattgaacatatccatatccaaacccaggtcatactgatttgtcttctcccaggtaagataaggcgacacaggtttgtcagtcgtcacccccgtcttcccgaagaagttcctgtccataatgttcatcaatccgtgagcgaggtaagcgctcgtgaatgtctgtccggattttccataactaccgcgaatcttaccccaattcagccagcttccggtcaagcgtttgatgaatggttcctccgaaaacgaccagcctacagccaccgacgggaaattcgcccaacggtttccctcaccgaacgtagaactaccgtcacgacggaatgtaaactccagcaaataacgctgtttgtaattatatcccagacggccgaaataactcaccatccgtttctcggtaaaatccgaagagtaatagcgcgttgctgcatattccgggaactccggtgttccgtgattcaccaccggcgggaccttctgcgggttataatagtacacatcatcgctcactccccgcaacccatagccgtacatcgaaaatgcctgttccttgtttgtattgacacccaaaagtacatcaatattatgcacatcgttcacgctcgtgttataatgcaacaactcctccgaagaaagcatcacctgccggccgatgtttccttccgacttgctttcgtgatgatattcgtcaaacacaccgggagtatacttgttcaggttcgactgagagtagtcgatattccctgatgccgagaaggtcaatcccttgagaagctcatactcaagaaaagcagtcaccattgcacgataatcgtccgtgcgatccttgattcccaggacagactttttccactctgcctccagttcctttgtggcaggcaagacggtaagctgctgcgacggattcacagacaacccctcgtagcgggtatgcttggaggagcccgatgatgaggagcgattcattgtccggtccacataagagagatacacacgcgtatccatccgcaatttcggtgtgaattgcgctgtcaggttcgatatcaggttcgcccgtttgtatccgctgttaatcatgattccctgctcgtcataatatccgagtcccaccatataacggaaacgctccgtacctcctacagcctgcacatttgcattgaccaccttgctcctgcgaaaagcatacttccaccagtttgtactattattgtaataagggtccagactatcctgcaatgaatgtatcaggctcggcgaaccccagtaaccattcccccaaaactggtcgtagataccgtttccattgcggtacacatcctcgtacgaagtagggacgtgatacttccctgtcgcccaatcgtaataattattcttgatattcctccggaatttaagttccaaccatctctccatgcgtccgcccgtctgctcgggatattccatcaattgtgaaatcgagtaggaagcatttgccgaaaacttggcctcaccgacctttcccttcttcgttgtaacaagaatcaccccattgcccgcacggctaccgtaaatcgatgccgccgccgcatctttcaacacctgtaccgattcaatcatgctcgggtccaggtcagccagcgtattcgtaccggtcaccggtgaaacaaacgaatacatcggcactccatccaccacccacaacggctgaccgtcactcgcaccgtccaccaacagagagttgaacccccgcaccgcaatcaccgcagcactacccggcgctcccgactgctgcacgatattcacacccgccaatcttccctgcaacatatctgcgatactcgccgccggcaactccttcatctcttctgccgtcacggtcgagattgcactcaccatctcccgcttattctgcgtaccgtaagcccggacaaccacttcgtccaaatcggatacatcttccgtcaaggtaatatgcaacgtatctctcgccgtcttttcagaaaattccacccgccgtttcttaaaaccgacagatgaaaattccaacgtccctttcaacaaaggcaaatcccatgcgaaccaacctttctcatttgtagccgtaccaatagtagtgccgacaacccttaccgttacccccggcaaaggctgtttggccgcatcatatacgaagcctctcacccgaacaaacttcttctcgggttcctggtacgaggttgcctttataattaccaaattatcgtcaaaagaaaacgacattcccaagcgaggcaacaagtctttgagcaccgcctctaatccttgattctctgtactgatactcacgttcttccaagtcaccacttccctgtgattatagagaaaactataacccgtttgcctttccaattcctgaaaaaccttctccaatgtcacgtttttcagctctattgaaactttcgcttggcgagcgctcactgctgcctgcacctgcaccaagctacaaaccaataaaataaaaacgactttcatcttcatcatccacttagggacaagaatccaccctccggctcttgtctgatttgacttttttttcatacttttgtacattagaattttaccttgcacgtcggtcaagattgccacaccatgccgcgtgctttaactaaaaagctgttccactcccgtgcgaacggctttttttgctttattgttataaaaacattattcccttttatatcaaatactacatctccggtctgctcgaatttatccagcaacatacgggcatcctcataccgtttcacttttccagtgaactctacctgtttcgcactttcattcacgtagaacacgttcaatccataccagacagacaacgtctccataatctcttccaatgtcgtttgccggaatttgtaatacccgtctttccacgaaacatacgattctgtatccaccatcctcacatccatcacccgattattcttgtcatatacaaactgctctcccggcacaatctgaaaactcttgccggcacatgccacctccacactcccctcgacgagcgtcgtcgccaccgtttccaacctctcgtaagccttcacgttaaaagaagtccccaacaccttcacatccatcgctcctgcatgtacccaaaactcacgggcgctatctttcgccacctcaaaccatgcctctccttttaagaaaacttcccttctggctttcccgaacctctccggataacgcatttccgaaccggagttcaagaacacctttgtcccatccgccaaaacaagctgaaacctctcacgcacaggaaccgtcaacgtattgtagacaatcttctccgaagcctccttgcttttgattttcgagtataccaatgttccccgttcattcctaacctgcaacatcgtacccccaaaaatcaacctgttcgtatcccgcttcaacggcatgctttcaccatctcccagcgtcaacaccacttgcccgattcccggttccaccgttttttcgccctcccagactccattctcttccggcttcatccataacattatcccgacacccaatatcaacaacacccctgccacactcgccccaaacgaccaccacctcatccgccgtatcttacccttccgtaccgtcattttcttccggatatcgctctccaacctctcgtaggccttctccctatccaaccctccttgctgtctcaccaacctcacgacctcacccaactcacccatcaacatcttatacgttctctcattccctcttttctcttcccaccacctgttcatcttctccctctcctctttcgtcacgttctcccccgctatttcagccgccataatttttaatatttcgtcttccatactcctggttttatacaaataacaccaccacccatcaaatcatgtgacaggaaatcccatttttttataaaaaaattgcaacaatcccatttgtatcgccaattcctgcgacaccacaccctgattattccgattttctgaaataaagcaataatatggtaaacatgtgtccctccagtttctcccgcagaaacttcaacgaacgcgacaactgggttcggacagtattaatactgatttgcaaatgctcggcaacctccttatattttttcccttcggcatacaccatcataaaaatacggcgacgctccggaggaagctggtttatcgcgaagtacaaaacatctatttcagtttgctcatcttcatgcatgatttctgccacgggcattccttccatcattttttcatggcgggttttcctgcgtttacagtctctcagctcgtttaaagcagcattcttgaccacatgaaacatgtatttatccaacccatcagaaagttttttataaagagagctttcccaagcctgtacgaaacaacccaacacgacatcctctgccgcatcaacatttttcagaatacttgcggcatataaaaccaacacatcatggtatttcaagaagaaagtcttgaacgtttcttcttcgggatttttttcgtacatgctacaaatatacgaaattaacccgttgtacatctggcataaacgcataaaaagttgttcacgccggataaattccgtatatttatttcatttccaatcagataaatatcatgaacaacttttgtgcaagtcacgaaaaaaataagaatttatgaattttgattttctttgttttatatctttacgaattcaaattctgaggaatgacaagaagaattattttagtcaccggagggcaacgttccggtaaaagtggttatgcacagcgtttagcgttggaactatccgactgtcctgtttatatggctacttcgcgggtatgggatgaagaataccgtaaacgtatcgaacggcatcaacgtgaccggggacctcaatggacaaatatcgaggaagaaaaagccctgagtaaacatcacttgcaaggacgggtaatcgtgatcgattgtgttaccttgtggggtactaatttctttttcgatcaggattcgaatgtcgacctggctttacaagaactaaaagaagagttcgaccgatttacagcccaggaagcgacttttatctttgtgaccaatgaaatcggtatgggtggagttgccgaaaacaccatccaacgccggtttaccgatatgcagggctgggtaaaccaatacatcgcagagaaagccgacgaggtggtgctgatggtctcgggaataggagtaaaggtaaaaggctaaaggctataaagctaaaggcagggaggtaaaaaaagtgaaaggtaataaggataaaaaataataggatacgatatgagaactttcaatatcaaaacgccggataaaaagatcgtaccggcacttcaggataaaatcgataatttgacaaaaccgaaaggttcgttaggacggttggaagaattggcagtccggatcggtaccatccaacaaagcctctctcctgttttgagaactcctcaaaatattgtgtttgcagccgaccatggtgtggttgtcgaaggagtcagcttttctgccccggaagtaacggcacaacagatatacaatttcctgaaaggcggcggcggaatcaatatgtttgcacgccagcatcatttcatactgaaagtggtagattgcggagtgaatgccgatttcggggatctgcccggacttattcaccggaaaatcaggaagagtaccgataattacctttacggacctgccatgacgcccgaagagatggaacgcgccatcgaaatcggggcagaaatggtacaattggcttatcaggaaggaaccaacatcatcagtttcggcgaattgggcatggccaatacttcggcctcatcggtctggatgtattttttcaccggaattccgttaaaagaatgcgtcggtgccggaagcggactggacaaccagggtatcgaacataaatatcaggtactgaaacgggccacagacaattatcagggaaacggtacggcagaagatatcctgcgttggttcggaggctttgaaatggtggcggcagcaggaggtatgctacaggctgcagagttaggcatgacgatcatcatcgacggttttatcatgactaactgcatactggcagccagtaaactgcatccggaggtattggaatattgtgtattcggacatcagggcgatgaagccggacataaatcagtgctagaagctttacacgccaagccattattgaatttgggattacgtttgggagaaggaacgggagccatttgcgcttatccgattatagaatccgccatccgtatgatcaacgaaatgagcagtttcaaacaggcagccgttacgaaatatttttaagatatccgtatgaaatctctgtttgcggcaatcatattatttacccggcttccgttatggcgaatcgtccgggtagataaaaagcagtatgcagaaatcctgttatactggccaatcgtaggttttttaaccggagcgacaacctgggggacgctttatcttgcctcttgggtcatgcctttgttgccggcttgcgtcattgcggtcattgcccgtctgctcctgaccggagctttacatgaagacggactggctgattttttcgacggtttcggcggaggacatgacaaagccggcatcctgcgaatcatgaaggactcccatatcggtagttacggtacgatcggcctgattctgtatttcatcttgtatgtatctttgttgagttcgttttattcgctggcccttcccggtgtcattatcggagcggatgtactttccaaactttgtaccgccgttatgatcaatacattaccctatgcccgtacggaagaagagagcaaagtaaaagtactctaccgcaaaatccgtctctgcgaatttgtcctggtagccctgctctgcctcaccgccctttggctgatgtcgactcctttcttagctttaatccccaccctccttatccttaccggcttacgttggtatttcaaacgtaaaatcggaggatataccggagattgttgcggggccagcgtacttttagccgaacagtttttttatatcggtgccactatcgtttatacttattccctatgaagataaccctgatccgccatacccgtgtagccgtcgaaaccggaatttgttacggctggagcgatgtcggtgtcgccccttctttcgaaaccgaagccagccgggtcaaagaaaacatttccaacgaacagtt

SEQ ID NO: 5801 - DNA, 1402 bp, Unknown
  gut microbiota DNA sequence
cagaagaagatcggctactcgtccgactggggcacctttaccctgtgcgaggccgtgtacgcgcatttcaacaacaccctcgggaacatcggcccgatctacgtcatcaatgtgctcgacccctccgcgggcaagcaccgcaaggaaacggccaccaccaagaccctcaccttcaccggcggccgcgccgagttcgccagcgacaagatcatcctcgacaccctgaccatcgcaaagaatgacagcggcaactacgtcgagggcaccgactacgctgtggactataacttcaccaagggcacggtcatcatcaccagcctgaaggacgacgcgcagctcgccggcagcctgacggccagcttcagcgaggtggacgactctgagatcgcagacagcgacatcatcggcggcgtcacctcctccggcgagtacagcggcctgagcgcgatcgcgctgctctatcccgagcagttcgcggtctgcaatctgatcgcggcccccggctggagtcacagccctgccgtctacaacgccatgctgacgacctgcaagaagatcaacggccactgggacgccttcgtcgtggccgacctgcccctcgtggacagcaccgcgcaggcggtcgacacgatcaccaaggcgatcgcatggaagaaggccaacgccttcaccggcgagcgctctaaggtctactggccgcaggctgtggacaacctcggcaacgtgttccacctgagcacgctggccgtggtcgagctcatgcgcgccgacttcagccacaacagcgtcccgatggagacctgcggcaacaaggcgatccccgtcatcaagcagtatttcggcgccaatgcgaaaaaccgcggcttcgaccagcagagcggcaaggagctgacgcagaacggcatcagcaccgccgtggcatggggcggcgaatgggtactgtggggcgaccatacggctgcctacacctacggcgcagacgtggatccccgcgcgatcttcgacgtctccatgcggatgctcatgcacatcaccaacgacttccagcgcgagtggagcccggagatcgacgagcccatgacccgcgcactgaaggatcgcatcatcaaccgcgagcaggagaagctcgacggctatgtcagcatgggcgcgctgctcggatcccctgtgatcctgttcctcgagagcgagaacagcaccaccgacgtgatgaatggcgacttccgctgggacatcgccgtcaccccgaccccgcccctcaagtctgcgagcgtctacgtcgcctacaccgacgcgggcttctccgtctactacgaaggaggtgacgagtaatggcaaacctgtggctcgacctgaagggccccatcctcgccgataccgtctatgtggacggcgttctcgc

SEQ ID NO: 5802 - DNA, 3193 bp, Unknown
  gut microbiota DNA sequence
atacatttcatttttataatataaaaatagatacgttttttcacaaaacagcataaaaaggttgcgtgaaggttgcgaattttttaagattaaaaaaactatctgcaaagctcttatcaatagggacctattaggggcccaatgccgtatgaataactgagagccggcctatcagactcctattgggtccttattggagccctattggtagaaaccttctataaacttctcataccgtttattgcaaatttgatttattataagcaaagttccagggcagacacggatggaaagatcgattaaacatttttatcacttcaccaaaatcttatcttaccattcacaaccgtaaacggacgttcctcttttccctcggttcggttacgcaaccaatacaatgctcccgaaggcacgttatcatattcgatataatctgctgtagccactttgcggcccaatgatacccactctccccggtcaaaatacaacagttcgtacacatgtcccggataaactccgttcttatcatttcgggtaatatactttacgacatccactgatacaggttcttcaaattccactccggccggttgggataacccaccgtaatccagcaaatcgtcattaaatatattccgggaatgtaatgtgtttttatttatcttgcctgaagcaatactggtaaaggtacagacaggagataaaacgacactatccccctgaataaatttcaccgaagcgaattcgggataaccgtagcgcgtctttttcagcatccagtatttatatttcttgccggtatttacctgcaaagtgtcgaaagccatgtagttataatgccggatgacactgatccggtcgtaaggttccttcgacagatcgttcgtcccctccaattctacccctataatggcattaccatagtaatcacctgctgtattataagaatatttacgtttcaaacgcaatttttgtaaaacgttcttgtcagcaacaagcggttcgacctccccatccgatttcacccaaagggggtaatctgcaaaaatcggtttgttcccatcgtaataacaaggcatataaacaatgtctttcccgattttatcaaaaaccaccttgcctccgcgcatcttgccccaggccacttcattccaggccaggttattgaatacacataaataagcataaccggtattggatacaacatgcttgaatttatactctaagtccatggcattttcatactcctctgtcacatccattttataaggatcccggataaaagaggggataaaattctcatcatcctccggaatcggattgataaaactagttttccgatacactttagccgtataaggagtttgggaataataacatttgctgtttacaaaacgatgatccctcacgattgtccaatagtgccggttttcctgtgtcggataatggggaacaaagtccacggcagtcggaatgccgaatagtcgattggtgatttgcgtactataagcccgatcgatacagtctatggcataccgcttgaataaagtatcggaaagttggtttttaagcaactcataattataataagtgcccaccttattagacacataactttggtaactactcaggctaaaacccagatgtgcccctttctgaaaatcgtacatccggtaataagcggaatctttccactcggtcaagggttcgttattgatcctgtaaggcaatacatacataaaaaaatcttcacacgaaaggtcataatgattctttatttctttccaaatcccgaatgaccgttcgatattttttatgaggtaatcggatgtaattttatgcaggtcaaattctatggtgtgctctccctgggcaacagcaatccgggcagccatcaggtaaaaaatcaatttaacggcattgggctgatcacggaaggtggtatcgatgtccagcttcaggcgttgcatcgttgttccggacacggcataatgggccaccatattacagatcaggtattctgccgctttaaatttcaatggatcagggttttctttccggtaataatccagtactttttgaagttcaccccggttgtctccgcttaactccagtgcactattcagatcgacaagccggggacagtttaccggttcacgccggcaagcggacaaggttatggtaacacctacaaccaataataatatattttgaaaaaccggtttcataatttcagtttaactacagacattttgctatcacctgtaatcccatataagaggccctcgtcttcgtcataggtaattcccgtcaaaccgacatcaaaattgaaggtttgcatcagattaccctcccaatcgtactccagcaagcggttggacacaaaagcgccttgccggtctcttgcataagttttcccggaatacaaggcatatatccgttccggagtgactgcgatatccataaaaccgaaacgattttcttttctatagagaacttgtggctcgggagtttccgaaatctccactctgggataacttagctgttccagttttacccgttcgattccttccgggctaacccggcaaaaatcgatcatcccgctatacatatccgcacacacgaaagcttgcccgtcgggacgaagccgtaaaatactactggcatacagcattcctttcgttttctcctgtaaaacgggatagtccggacagtccggataagacagacagtaacggacagaaccatccaccagagagtaaagcaaataacgtccctccccgtaaaaacccgtagagataacgaaatcgtttgttttcaccgcaatcaaatgttgctcaccccggggaagttgtataaccgacgtttccgttatcccgcgcgtaagcggtgataccgcattctcgatcagttctcccgttttgaaatccagtgccgtcacactctttccatcccatgaattgaaagcactcaatgtacggaacggtttcgaggaaaccacggccttcgaagacaacactttgcctgccggatgatccagatcgattgtgtgcgccaccccttcctgcatataggtcgggcccacaatcaaccggttgccctgtttgataaatccgtttataccataaattccggtttgagataaatccgccaaacgaattgcctccacctgttcgctctttactgtattcag

SEQ ID NO: 5803 - DNA, 377 bp, Unknown
  gut microbiota DNA sequence
tttctctttgtggcatagtctttacggacatatatttcgtaacccaaaaattttgcgctgtcttgtgcgtttgtaatcaaagtcttttcctgtgacatctccagccttaatttttcctgcataaacttggtgatgtcagctttgattgtctcacattcgtttttcgttccgataaccccgattagaaaatcatcggcgtagcgcacatatctcagtctgcgaaaatttctatccatatcgttgccactcggcattgttaatatccgcttctgcttttcgtgcagttcttctaccatccttgttcttacatttacatcctctacttcatttatcctacgttttaggtagtgtactctgctgttgagtttgcaaatatc

SEQ ID NO: 5804 - DNA, 296 bp, Unknown
  gut microbiota DNA sequence
aaattggttcaagaggtagtaagaatggtgcttgaagccatatatgagggacactttgagtggacatcacacggtttcagaccaaaccgaagctgccacacggcactgaaaagtctacaaaacaatttcaacggtgcaaaatggttcatcgagggagatataaaaggcttctttgacaacatagaccatgatgtgctgatagaaataatgaaaggcagaatagcagatgacagatttcttcgtctgatacggaaattcctcaatgcagggtacatggaagagtggcaattcaacaa

SEQ ID NO: 5805 - DNA, 404 bp, Unknown
  gut microbiota DNA sequence
agcttttgcatataccctcaatccgtatagctttcctttgttcacctcgtattccttgcaccgggtcaaatccagattggcaaagtcaatcctgccgtcaaaccacttgggatgaccacgttttcctgttttcttttccaatgtcggatagtacaggacaacatcattcctaaagcggctgatgatatggaaaccgttctcacacataggcgttacgaaagtttccttggaaaagaatgcgtctgcaaccaccgttttggatatgctttgcagcttgtcttttctgctgataagatagcagctgtaccagtcaacaaggttcttgtccatattatccaaggtcttacaatccggtgtctgaatggaacctaaagtcatgcattcatggttgtcgatgtcaatga

SEQ ID NO: 5806 - DNA, 377 bp, Unknown
  gut microbiota DNA sequence
gatatttgcaaactcaacagcagagtacactacctaaaacgtaggataaatgaagtagaggatgtaaacgtaagaacaaggatggtagaagaactgcacgaaaagcagaagctgatacttacaatgccaagtggcaatgatatggatgtaaactttcgcaggttgaaatacgtgcgctatgccgatgatttccttatcggagttatcggaacgaaaaacgaatgtgagacaatcaaagctgacatcactaagtttatgcaggaaaagttaaggctggagatgtcacaggaaaagactttgattacaaatgcacaagacagcgcaaaatttttgggttacgaaatatatgtccgtaaagactatgccacaaagagaaa

SEQ ID NO: 5807 - DNA, 373 bp, Unknown
  gut microbiota DNA sequence
acgtgagagacgtatgagaaatccagagcaagtattaaacattttagctggacacagcaacgagcccgagtataaatacgaaaggctttaccgtattctattcaatgaacagatgttctttgtcgcctaccaacgtatgtatgcaaagccgggcaacatgacacccggcacagatggcaaaactgaggatgaaatgagcattgataggataaacaaactcatagagagtataaaggatgagacttatagtcccaatcctgcaaagagaacttacattccgaaaaagaatgggaagatgcgtccgctaggaataccgtcttttgaagacaaattggttcaagaggtagtaagaatggtgcttgaagccatatat

SEQ ID NO: 5808 - DNA, 296 bp, Unknown
  gut microbiota DNA sequence
ttgttgaattgccactcttccatgtaccctgcattgaggaatttccgtatcagacgaagaaatctgtcgtctgctattctgcctttcattatttctatcagcacattatggtctatgttgtcaaagaagccttttatatctccctcaatgaaccattttgcaccgttgaaattgttttgtagacttttcagtgctgtgtggcagcttcggtttggtctgaaaccgtgcgatgtccactcaaagtgtccctcatatatggcttcaagcaccattcttactacctcttgaaccaattt

SEQ ID NO: 5809 - DNA, 1564 bp, Unknown
  gut microbiota DNA sequence
tgtgtccgaataaaaatttgtattttctatttcttttataatttttgctttacttgcttcaataatacgtatataatcatgttttctattatgatattccttgtattgtcggcatagaaatatagatatgagcactaaattaaaaataatagtcgcaatgattgcatattttaatttcataattatttttgagatgtactattaaattaatgagtatatttattgaaataagcctgtaaatgtttttgatttttcagactttatgtttttattcaatctgctgatatacagctgtaagaaggagtatatattgtagattaatagcggattaccagtgtttgtaaaatgcatctgatccttttactttgaattagttaagtggtttaatgggtaaatgtacataactaccttatctattatttgaatatatattctatcaaatatggattagaggttacatcatcgtagtgttttattatttcccgactaaaagtatccaggatattaagattttgataattagccatctcggaactctggataatgccaatagccgtactgtcatccatataatcggctacaaaggaaatctctttttctaatttatcgaataccgtacttttacctgtcggtttttcatagaaaatattgatacagtcttcttttccttttatctgaatgacagtatacagataatcttgattttgccaatttttgtaatatgtacaaggtagattgtctacaacttctttgaattcctgaaagttattcctgtcatagtccggtatcgttttgagtggatcgtagtcatggccgggaatgaaccattcgtatgcaattttggggccttctttacttacacaatatacttggtcgaaaagaaatctggagaggtaagttgtgtcgttataggtgtaaaaagaaggcagtccgatagcacagtttttcttatttttaatgtatttgcctgtaatttttccggatgttctggaataaatactcaggatgttttcattgtgttcgcaacagaaagcaatatgttcccgatcgatatatccaaatttgtgataggcgggaatctctttcggaagagaaacttttgcaataaattttcctgtcgtatcgaacgttaataaatttcccatgggatccaatagttcaagggtttgctcatagggatttatattgatgtcgttaagaaaattgtattcttccggtcctcttcctttttgatttattttaaatagaaaatttccgttgtcgttgaaaacaaatactatattttgtcttgcatccagtaggtagattgtttttttatgcacgagcaccttgtctatctgggccattaaggaagaatctgtcgtttcaagtggaattattctcgctgaagtaaaaagtgtttcaggaggtaaggaagaaattttaccgatatctactgaaatacttttttcattgattgttggttgacagctggaaaatattataataaatataataagtagaaatagatatttcattaaaatttgtttttattatcaaaagagagtatgtcaaaatgttattc

SEQ ID NO: 5810 - DNA, 6882 bp, Unknown
  gut microbiota DNA sequence
aatttaactatgtaaagtaaaataattaacaaatacatttgtgtaaaaagttgattattatggatttgagattttgaacaaatatagtaaaaaagtaggaatttgatattagaaattttgaaataccgacgtaaaagttagaaaaatgagtaattttgtagaataagtttagatcacaaatacggagaaaatgcagatattattacttaatggccccaatttgaatttactgggagtgcgggaaccggaggtgtatggaaaagaaacatttacagattattttcgtcagttaaaaaataaatatccgtcggtggatatttcctgttttcaatccaatgtagagggggaactgatcgataagatccacgaggtaggtttcagttacgacgggattattttgaatgcaggtgcctatacccatacttcgatcgctttagccgatgcgattgctgcggttaaagctccggtggtcgaggtacatatttccaatacagcccggcgggaggctttccggcatgtttcttatctgacggctgtttgccggggcgtgatcatggggttcggactgaaatcttatgaattagccttattggctttgattaatgaaaaataatgtatacggaaaaggacggattgcgtatataaaaatataacgggataaataaattactaaatgaaaagaacaaagattgtcgcaaccatttcggataaaagatgcgaaataggctttttaagagagttgtatgaagccgggatgaatgtggttcggttgaatactgctcaccagacgctcgacgaagcgatgaaagtggtacggaatgtacgtgctgtctcagatcagatcgccttgttgatcgataccaaaggccccgaagtcagaacttgtgatattgtcgtgcctgtccgtgtcgggaagggggaaattatttttatgacgggtgaccggactttggtggctgaaaagttgatccatgtgtcttatgaacattttgtccgtgatgttcagatcggcgataaaattctggtagatgacggggatgtcgagctgatcgtacgggataaaaaagaaaactgtctcgaattggaagcttcgaatccgggagagataaaagataagaagagtatcaatgtgccgggagtgaacatgcatctcgagtcgttaagtgataaagaccggaaatttattcagttcgctatggataataaattggatttcatcgcccattcttttgtcagaaataagcaggatgtgatggaaatccagcaaattttggatgaacagcatagcaacatcaaaattattgcaaaaatagaaaatcaggaaggggtgaatcatatcgatgagattctcgatcatgtatatggcgtgatggtggccagaggagatttagctatcgagatcgatgctgaaaagatacccctgattcagcgctatatcgtcaataaatgtatcgagagtaaaaagccggtgatcatcgcaacccagatgttgcacacgatgatcgaccatccgcgtccgacccgggccgaggtgagcgatattgccaatgctgttttcagtggaacggatgccattatgctgagtggggagacggcttatggagattatcctttggaagccgttaaagtgatgagccgtgttgctgaggccaatgagtcgattttaccgcccgatgccaaccggaatttagttcgtattaataatgagattacagcagctttggccagagtggccgtccggatgactaccatgttgcccatcaaggcgattgtggtagatacgaattccggacgtacagcccgttatctgtcggcttttcggggcggtttgcctgtatatgcccgttgttacgacgaacatgtgatgcgcgaattagctctttctttcggggtgagaccttatttttccgtaaaaccccattcaagggatgagtttatgcgggacattccacaggtattattgcagaacggttaccagcctgaagatcagatcctggtgatcggaggaagtttcggacatgtccgcggggcatctttccttgaagtttgtaaaatcagtgatataaaataacagggaacaggcagaggagtgtaggatgataaaagcagttttttttgatatagacggaacattggtgagttttcacactcaccgggtttccgaagctacccggcaagatatccggcagttaaggactcagggaataaaagtatttatagctaccgggcggcatttacaagtaattaataatctgggtgatctggagttcgacgggtatgtgaccctgaatggcagttgttgttatatcggacgggatcgggtcatttaccggaggatgattccggagatcgccttggaacatctgataaagtatcaggaagagaaggagaccttcccctgtatttttgtccgggagaaggatatgtttatcaactataataatcagcatacccgggaggtattccggatgctggattttccggaaccggtagtgaaagatattcatgaggctacccgggaaggggtttttcagttgattgcgtttttctcagagcaacaggaagaccggattatgcaggccttaccggaatgtgaggctacccgctggaatccgttgtttaccgatgtcgtgccggttgggggaaacaagagtatcggaatggaaaaaatattggcttatttcggaatttcccgcgaagagacgatggctttcggggatggaggaaatgacattcctatgttggaatatgccggaataggggtggctatgggaaatgcttccgaagaagtgcagcggcacgccgatttcgttacatccggtgtcgacgacgaaggtattgtacatgccttgaaacattttcatatcggcggactttaaaagtgtgggtgaattccgatttcacatcgatacgtccccggagtttatctgttatgctgcggcggtataggtttaaacgattacaagggtttcagaaactatctcaaacccttgtccgttttgcccgttgtcactgtttaaagcagtttccctgacagatctatttttatttcgatttctttggctcctttttcgagttcgaacaggtaataggtttgatccggcgtttcgtaacgttcaatatcgtcgatgatataatcggcataagccgaagttttcaaggcattcattacggcggtttcaacttcgttttggcggacatcgtaatgggtattcagccaattgccggaggcatcgaatatcacttctttgctgcggttttcgtgtatgatatctacctctgtacggttatgttcggtttcagtttcgatgatacggcaagccggatatttgtcattgatgaattgctggagcgaagccggtaattccgaggcgtcgggaagatagttttcgtaatcgtcatcggttaggtcggcctgaactttgaccaaaattccgtcggctgaataatagagatcgtattcttgtttgtcttttttcacttcgatgacataaatcgtttcggtttcgttacgctccaaacgatcgatatcgtcgatataccattgtgcatattcactgtttgccaaagctttttgtacgtcctcaggcagttggctggtgtgggtcaactcggtttcggtcatataccatcggcctgtagcatcgaaccaggctttcccgtcgagttgattgtcgatgaattctgctatcaggtaattgtttttcttttcccattccacttgtgtggcgttgggatatttactttcaaaagcttggcgggcttgaggatcaggggttaccgaatcgtcgttgtcgcaactgcaaaagccgaatagggctaatccgaaaaataatgcgtataagttcatagttatttatttttaattaattatcgatatcgatgagttgaaatgctttgttgaattcgagttcaagctgattgttcaattttacttcataagttttactgtcccgttcaattttcaaaattttagcttccgggtagtgtttgcttacgtagtctttaatggcttgaggtacgattcctgtcggtactgtagaatatttacagtcgactttttcccatgagccgtctttcagaaattcagctttttctccgttgacaaatacaacttcatatttcttttcccaaaagtctttttccattttggccagggaaatttcattcttagggaaatacttttggataaattcctgagctttttgaggtagttgatcgactgtaattgctctatcgtcgtcggctttcgctaagccctgcaaagcgaacaggcaggcaaataataaaatgatttgtttcatagctttcaaattttaagttttacaattcaaaagtagaacccaaaactgaaaagattttgaaatcgggaaaaaaatgaattttatttcgacttattgagaaaatcgatctggaaacaatgctttcctgtataataatatcggatgtgaagctgatataatttgcagatcgattcggcaatagacaggcccaggccgctggagccttcaccggtatgtttgccttgatagaaacgatggaatatacgggaggcatccagtgcttccgggtgaccggtattgcaaatggtaaggtgatcggactgaatttcgatgtcgatttttccttgtgatttattgtggataaaagcatttttgagcaggtttgtgattagggcggttgccagtgtttcgttcatattcaccgttaaagtggctgattgatgcacttcgacttggatgtttttatagtcgtagatctcctggtaatcttcgagctgtgagctgatcagatcgttcagacaaatttcctgactctcctggaattggccgttttctattttggagaggaaaagcaaagacttattcagtcggataatataggtaagggtctgttggatcttggctatttcggtcagttggtcttctgtaagtgactcgctttctgccatcatttccagacggttttggcagattgccagaggagtctgcaattcatgcgaagcattaccgatgaattgtttttgttgttcatagatcgcctggttacgtcggtgagtttgaatggctgcttcatttaatttccggaactctgtgatgttggtttgcaaatccggaggactctggcttttaccgatcgtatattggtccatccatttgagtagcacataaaggggacgcatactccggtagtaaacccaggtattcaccaaaagaataagcaggagaagcgaaaaatagaggagaagcatccaattcagaatagcttcctgtaagtcttgcttttcgatcgtcggagtactgaccgtgagttcgtaatattgtcggtctttgtctttgaaaatggttcttaggacccgtgccggctcggtttctcccttggcttcgatgtggaccatttcgtcggaataccggatccgtttctgtttctcggcataatctgcagttactgtaatcagataataactattattactaccgtcagattgggaaggtaattgttctcctgccaaggcccgggtgatcagtacctctgaataatcttccagagaatcgtctacttcatcgttgacttcatccataatagccatataaaatagtatgccccaagccgctaaaatgatcggtagggccagggacagatgaatcaggatgcggtagattaatttcatagggcttgaagtgacattttatatccaaaaccatagactgctttgacctccgcgtttgcacccgcttcggtcagttttttgcggaggtttttcacctgggcataaataaaatcgaaattatccacctgatcgatgtgatctccccataccgattctgccagagtcattttattgattactctttcgggacgctggataaaataaagtagtatatcgtattcttttcggttcagttcgatgggggtacctgcaacaaatacctggaaatggtccgggtcgatccggatattaccgtattcgatataagtggcaccggcgtgatgatttctacggataacacttttgacccgggcaatgagttcggccagatggaaaggtttgggtaaatagtcgtcggcacccagatccaggccggtgaccttgtcctccagtgaatctttggccgaaatgatgatgatattttctttcttattttccttttttaattcttccagcagatccagcccgtttccgtccggtaacatgatgtcgagcagaatacaatcgtaagtataatcggccgttttttccaacgctgtttgaaaatcaggagcttcctccgtaacatacctttctttctcgaggctacggcaaataatttcgcgtaatgacggatcgtcttctataacaagaactttcataaactcattttttctacaaacaaatatagtaattctgaaatacaactgaaatcgcctggttggaaatctgctccgttttggaggggagaaataaattggcgaaccgggagtccctgtttattatggtgtcggactctggattcgccaatcgaaaatttgcctgacaggcaattctcgggttaaaaagttcaatctgataaaaaagcccccgggtagggagcttttttagaaactggtcagtgcactggccaagtcgggttcgatatcgagaatcatgggtaagtgtaataattccagaacgtccatgacttctgacgatatattgcacaatttgatttcagaatgattgcttttggctgtttttactaatgagataatacagccgataccactgctgtctataaattcaatgtttttaaaatcgaaaatcattttattaccttcttgcgaaagtataggttttaattctgatttaacttcttctgtcactgctaatgtaaatctctttaaatcgataaattctgcaatgat

SEQ ID NO: 5811 - DNA, 201 bp, Unknown
  gut microbiota DNA sequence
gaggcgtccacgccatagcgcgtggccacttccttcagctcgtcgagcttcatgtcctcgttgtactcgggggcctcgtcggccgcggtgttggtgctggcaggctcgtcggcgtcgtcgccgggagcgggtacgggctgctcggcagtctcgcccagctcgccgatgtacttggcgacgccttccttcaccagacgggcc

SEQ ID NO: 5812 - DNA, 1932 bp, Unknown
  gut microbiota DNA sequence
gtagaattattccggtccttgttcgtcttcggtattcgtgttcggggacgcggtcgcttctgtcggtcatctagctttttctttcactgaccggcggaactcctcgcaagctcgtcagacaccaccggtcggccgttcagaaaaagcaagacgacactcgacagagctccaatggtccacgaacacgaacaccttcgacttacgttatcactagctggcaagctaaaacggacctgaaaaccagaaatttcaacgaaaaaagattttccggtaaagtaacccaactatccataatccgatagaggtgagccggtattttattctataaaatttttctaattcttcctttgccaggtcgtgttaacgtgagatgaagggttttatgacggaagaccattggagcaggaacgaggatccggttagggtttccgaacgtccgaccggtggtgtctgacgaacaaagtgaggagttccgccggtcagtgagttcttctcctgctcagaaaaacaaaagattttgtttttctgagcaggagaagaaccgatgaaatcaacgaaagccttaacggaccggtccaggcgaaccggtctgacggcacaaaacccggaatcggagcggtatttttccagaatatcaaattctgtaaaacccaaagtagggtgaatttctgaaatattttgtatcttagccatatcttagttgggggatttcccccgttttggccattaaaccttatttgcgggggaatacctaaagatacaaaaaacagctaattcgcaataatttaactatgaattagttggctaattttatactatttactgaatggccttacataatagtaaataacaaaaatgctttaccatagttatgattgaataggttggctataaatcaaaattccctaaatgatattcatactcatcatcccgataaatgacataacctgtctttgaactttcatcgattataatatccataatattaactcctaaatcatattgttttatggggcatccccaccaatcgaatacagaaagtttttcgattcgggtctctatgtcctttgttccgtttaatgctatatatatgtaattatccgtggcatatactgtcctccatcctctgatactttcccgccaaagaggaaccccgtctgcttcataagtcggttcataaatataacttgtattcgaatgtgtgatcttattttgctgtatattgaaaaactccagaatggcaccgcaatgcgtacagttcaggaattttgttccatccggcttaatgagaacagccgaacagtagaaatagtagttttccaatactttttccggagtagtctgggtggtgattggagaatagtaagtacaggaatcgaccaggttcaggtctttatcgtataaagcaaaacgactatatgcattataagttgttaaataatgatcggggtctaatctaaagaaagcagtactggataagggttgttgcaaccttttttctgcaatgtttactttcccccagggaagtgagtccaattgaaaaatagttactctgcagagataaaaatagatttaaatttcaaatttataccggtataattcctcgttaccttttaatccgtatatataatgatgtttttcatccacagtaaaataaatgatattgtcggggatccggattttagctataggtgctccttcccaattgaatacgtgaatttcagtctctccttccgcatgagaaaataaattatctttcttattaacataaagcgcgtagatatattccgaagaaacttgtaatgacgaataatacagaataaaatctgattccggcaaacgggctgtctcaaaaatatcgatgggaggttgataagacaaagaaaaattggttttcatatcactggaagattgtcatctaaaaacaaaata

SEQ ID NO: 5813 - DNA, 24503 bp, Unknown
  gut microbiota DNA sequence
aaaggaattttcccaaatattgccaattgtcagtcgaatatatttctaaaggtagtttatttacactcataaacgtacctttaaggtaaacatgtggcacgtgcatttacggcgaaagcgtatatatgaaaagaagtattcttccattcttcagaaagtgcaaagtatacttccgccgtttctttgctttggtgtaaaggtagcacactgaaataaagtccctaaaagatatggtttcctatgcgtccggaaatatgcctgagctttgaagaaattacccttgccatgatgtttatatttagtttcaaggttaataatatgataaaaaaagtttaaatttccaatatattttcaattcaataccgattaaaattgatgttaaattggagaagaattggaattgaattggagttgatacatactaactacatggtaaataccttgtaactgcatctttcgtaaaataacgcaataaccgctcgaaaggaattccggcagcgacggaaacgaccgattgtctttcataatcgagtgcaccccggatctcgtcgatcacagcctccacgcgccagggttttaccgcgataactactaaatcggctccctgaatagccgtcggattatcctgtgatacgttaaaacaagcatctgccgataataaacggtcgagattcgcctgcatcaaatccgtacaagtaatatccgaagcattgaacacgcctccccttactaatccccgggcgatagccccgccgatatttccggctccgataatcgtaattttcataatcaggaatctgttcccataattttccgctatcgtgtacgacgattatttgttaaaacttttcaatacccgattgatactttgtggataattttctacatttgaagcaaaatacaatttttaatatataagttatggtcaactacaaagatttaggactggtgaataccagagaaatgtttaaaaatgcaatggcagggaaatatgcaattgcagcctttaactttaacaacatggaacagatgcaggccattatccaggcagctgtcgaatgtaaatcaccggtaatccttcaggtttccagtggtgcccgtaaatatgccaaccagaccctgcttcgttatatggctcaaggggctgtagaatatgctaaagagctgggtttaaatattccgattaccttacatttggatcacggtgacagcttcgagctttgcaaaagttgtatcgacatgggcttttcttcagtcatgatcgacggctcacatcttccgtatgatgaaaacgtagcgctgaccaaaaaagtggtggaatatgctcatcagttcgatgtaaccgtagaaggagaactcggtgtactggccggcgtagaagacgaagtgtctgccgaacaccacacttatacccgtcctgaagaagtagaagatttcgttaaaaagacaggggtagactcactggctatctctatcggaacttcccacggagcgaataagttcaaaccggaacaatgtacacggaatgccgacggcgtattggttcctcctccattacgtttcgatattctgaaggaaattgaaaaacgtatcccgggtttccctatcgtactgcatggatcttcatccgtacctcaggacaaagtggctatcatcaacaaatacggcggtgccctgaaagacgcaatcggtatcccggaagatcagttacgggaagcggctaaatcggctgtttgtaaaatcaacatcgactccgacggccgtttagcgatgactgctgctgtgcgtgaaattttcgctaccaaaccggccgaattcgacccgcggaaatacctgggcccggcccgtgactcactgagagaactgtataaacacaaactgacagatgtactgggaagtgccaatacggtaaaataaatgcctatcaaacaccggccgccgagccggtgtttttcttttccaccgcccctgacataaccatatcaggcccggtccgtatacaacttctcccacgttttcaacgatttatccgcattttcacctccactattttcattgtcaataatttattgtatttttgtccccctaaaattatagatacacaaatgcggaaattaagaaacattgccattattgcgcacgtcgaccacggaaaaacaaccctcgtggataaaatgattttgcagggcaaacaattcagagaaaacgaaaaacaaagtggagatttaattctggataataatgatcaagaacgtgaacggggaattactatcctggcaaaaaacgtttctgttcattataaagactataagataaacattatagacactccgggccactcggatttcggcggagaggtggaacgtgtattgaacatggccgacggcgtattgttactggtggatgctttcgagggcacgatgccccaaacccgctttgtattgcagaaagcgttgggattaggcaagaaagctatcgtggtggtaaataaggtggataagccgaactgccgaccggacgaagtgcaggaagaggtcttcgatctgatgttctccctgggagccagtgaagaacaactggattttaaaacgatttacggaagtgccaaacaaggctggatgtcgacggactggaaaaacaaaacagaagatattaccgcccttttggacgcaatcatcgaagatatccccgaacccgaagcaaccgaaggaactcctcagatgatgatcacttcattggaatattcctcttatatcgggcggatcgctatcggtaaactgacccggggaaaactgaaatccggtatgccggtcaccctttgcaaacgagacggggtgacacagatcaaaagccggatcaaagatttgatgttgttcgagggactggaaaaacaaaaggtagaggaagtagaggccggagaaatatgtgctatcgtaggtatcgaaggatttgagatcggagatactatcgccgattttgaaaatccggaagccctgaccccgatcgctatcgacgagccgacgatgagtatgttgtttacgatcaataactcgcccttcttcggtaaagacggtaaatacgtcacttcacgccacatcaaggaacggctggacagagagctggaaaagaacctggccctgcgggtagaaccgggattaagcgcggattcattcatcgtttacggccgtggtgtattgcatttgagtgttttgatcgaaacgatgcggcgggaaggctatgagcttcaggtgggacagccgaaggtaatcattaaagaaatcgacggtcagaaatgcgaaccgatagaagaactgacgatcgatatcccggaagaattttcggggaaagccatcgaaatggttacgaagcgaaaaggagtcctcaacaatatggaaacccgcgacgaccgtgttcacctggatttcgacattccttcacgcggaatcatcggtttgcgtagcaatttgctgacggcttcggcaggagaagccatcattgcacaccgtctgaaaggattcgaaccttataaaggagatatcgaaatgcggatcaacggttcgttgatcgctatggaaacgggagatacttttgcttatgctatcaacaaattgcaggatagagggaaattctttatcgaaccgggcgaaacagtgtatgccggccaggtgatcggtgaaagtacccgtccggacgatatcgtgatcaatgtatgcaaatctaaaaaactgaccaatatgcgcgccagtgggtcagatgacaaagtaaacatagctccccctattaaattcagtctggaagaagcattggaatacatacaggaagatgaatatgttgaggtaacccctcattccatgcgtttacgtaaaatcatcctcgatgaaacagaacggaaacgccaaagtaaacgtattaccagcgtagaagattaaaaaaagccccggtcggggcttttttttaccaccagtcctcagccggtgttaagctcgtatagcggaatacgcccatacgtttaaacttatccggatatttaatcggaataatgtagaaagcactatttattgtagtagaattttcattatcccaatctataacaaaaggactttggctcaaataatccacactccgcaataaatcttcttcctgtccatttttcacagcactgttgtaaatattcgtcgcattatttccgttactctgatgatgagataccgtgtatacataatcagcatcccaatctatcttatcccgccatatccccacatatgcatttccggcactattctgatattgaatggtagtatagatataacgaggttgctggcttttatccgggaccagataaatccggtaagccgtcaggacgcgtttaccataagtagtcagaatattgctcaatctttcataagcatcctgttgatctccggaagcgattcctcccggataggtggaagtaagatttaagccgttaaacacaggattatccccactactgccttctgccttgaaaaaatcagccaccggttcacgggtagtaaaagagtactcatccccataattagttccatattcatttataacatacgtacgaacataatactttgtctccggttttaaaggaaaaagcatcaatgaatcgaattcggtgtgatcatttccaataccctctgctttcaatttattatcagcaattgtcggatgctcagccattccccaacaaacgccggcttctgttacggctgcattcaaaacacctgtattcaggatctcacctccgacataagcccggtgggcagtaacatacgcagtcatccgggttgtaatagccgctttataacttaaagttgcgactacttcttcttcaccataagtgattccgtttttatttacggcataaggccgtacataatatacagaaccttcctgcaactcgccgacagtcgtcgaagtctgtccatctccttctcccagtttcagcttattgttctcgatcgtcggtcctgacttaatcccccaaactacaccatattccagcacaggcagaggagtaccggaagctatattcaccgtaactgtaaatgcagtattggtaatatcttttacctcctctatctctgctttcggtgctgtgtatttttcagtggtaaaggtctcacttttcgtatagattgtcccctctgcataaacgacatatgcccggcaaatgtaagtttcattatcggtcaatccgtttaagataccttccaaaagtcctgttttcccttcaaccttcagtttcgtcgcattttccaaagcaggttcatctgttccagctgattgcaaacgataaacgacacctctttctgttatgtccacccctccgtccgtaaacacctgagcctgtacttctgccgaggtctcctttatattatttatccccatcagtaacatcgtaggccgtccatgagccaatgttacacaggttttttcttccccatatttaacaccatcgcttgtttccacccaagcccggacataatactgtacaccttcggtcaatccggttatctcactccggaattcaccacgtccgctgccatcagtggtatgtttgtctttgacagtcggttggacatcagttgaccaacacactccacgattaccaatcccacttcccccgctgatctcccctccacaaacagccgttgtataaccaatctcttttaataatccggtctttattgtcagcggaccggtcacttcatcatcatctgaacaagaaaacaggatgcttgacaaaccgaccagtagcaatgaccacaaaaatctatatttttccataacatgtcattttataaatattttactattgctttaactgcccggcaagatacatttcctcccggtcagcccggaacataccaccgatattccctgttaatccctgagtcttgttttcagcccaatcaatcttaaaagtatgaggaatgattttagatttctctacatttgcccagctttcacctgtatcgtaatgtgaatattctaaactacaaaagaaatccggcaattctttcatatacatttcgtagtaaaattcattcgttgaccctgtctgttcgcgatccgtaaatgttatcgtaccatcctcattcaaagtatagggatattgccattttgcagtaaaacttttctgcgtggaagtatttaaatatgtgatacccaattccataacaggcttaccgatagtcgcattcatcacaaacttacaatacatttcctgaatagcacgtgtcctgccattcaaacgattataagccggagtatacacttcactcataaaaggatctgttaaagtacccaccatagctgaaggattcatatacaattgggaaaaggtctgattataaccaaaattcaatggataggggggaaccagattatctaccaattcataagttttatcattaatttcaacctgatatttatttcctatccatttcataccatccactttcataccattaatttctgcaggttcaaagaaataaacattactttgcgcattttcctgggttattccctgaaaatccagataggaaccgacagcaagctctgtcaataccccctcttcatctacataagcaaactccgttttcctgaaattcggacgcatcaggtatcttttcccatcgacttcaaccgtcggaaatttattggaattcaggaattcatcatgatgttcaatcacttttttcaatcctccctgtacaactttctctgcctcttcgggagtagcccggtccatccgtgccagacgaccattataattcccaatcagattaattcctccattatcagtatctacgatccggaattcaaaatcggaaatcaacccctcagaattacttcctccgttattcgccccctgaggatccgccaaaatatgtaaataactataggtatcgaatatcaaggaaggagctagcaaagctttcaaacgccacgaagaaatacagggaacaacagaagtctccccggctttgctgaaagttgcatccatatcagaaagcatacctacccgttcattctcttcaaacgacatccacagccggtaagctccgtctttctttgtatccacagccagaaaccatccgttaggtgcagaaaataaggcttcccggtattcatcggcagttgcttttaacctttcgtcaggagtctgggtaaaaatattgtcctctgttttatcacaaccaataaacaggactataatgaagaaaaaaagatatctgttcatagggataaaatttactgtttataatcatcacttgtcacatagtcgattgcttcctgaaccagagtaaccaatcccttttctccatcctgatcgtagaaattgattccccagatatctttcagatagcttaccacaattgtttccttctgccggagagcttcggaaggatcatatgcgaaatctaaagctgaagtcgcattcagatacaattctttagcccgggccacttttttctcataccattccggcccaaatactgcaatccgcgcgatcatttctacgaaatcctcatcaggcccggcacaggcataactgctgacatatcccagtttcaaggcttcctcttcactcatattgttccaggaagtcgtatatccacccggggtaatgtttttaaactcttcggggtacaaaatcgtttggtgcaaagtatgcccaaattcatgatggacggttttcatgatctgctgaatcaaatcgcggtctttcagatcgaaccaattcagacggtacagcacaatctttcttcctccttcagcttcacccaaagtgatagtcccggtattcggattatatttcggactacccacgagtacatattttttaggtgaataggaacggatgaaattggctccagccaattgttcataaggtttaatccagatctcctgcaccactttcataacagaaaccaccaattcttctttaatcggtaccaatgtccggttcaggtcaagctccgactgatcccagcgatatttcacttccatattgtaaggacgcgtataattatcgataatccactcgtcgatttcattcagaacatactcatcgcctcccaaaccattcaaatactggtcgggcacaaatttgtcttcagaacacccccacagcatcagagctgcggctatgccggcaaaatattttagttttctcataacatctttctcatttaccattgtctactcagaaaattacttcggggatttaactgtacatctgccagttcagcagtttcaggcaactgcaacaaccaacggtcatcacccggataaagggtattactgtcgccctctttcgtagtatgggtgataggaatccgatagcgcatcatatcccaccaacggagtccttcccacataaattcattacgacggaaatcgagtatacaaagaatcaatgcttttttcacatcgctccaggaagcagaaccataagcattatattttttcataaaatgatcttcgtttgacaaagccgcattataaaatttaactacagtctgttctgtaatcacatgcttttcttcattataattcttgatcctctgccggcagaaaatattcagatctgcaagtgccttctcataatcctccagcattacataagcttccgcccggttcagtaacacctcttcgttccggaaagtcgggaagatcgtataaattatcccggaggaagcgttaatatctgtcttgataaacaattcataatatttgggtacataatagttatccccactataccagttgcgataagcccattgacctcctgtcacattcagagccgaactggtcagcgtctgttccaaatccgatttcacacaaccatatctccaggtattggcatagcgggacatccgggatgacatttccgtcaacaacaggttagaggtattatccgacttggtataggctattttcacatcactggaaccaggcgccacagcataggtagttaaccaaggctggaaattattttttgcataaatatttgcattatctctatccgaaacatttttcgccccttcctggccgacaaatacggatggcatagggaacactttactggcataagtaattacttttccccaatctcctttgtaaagataaaaacgcgaagcataagcattggcagcagcccgggtaaaatgataccggggaacggtataaatcgcatctgatcccaatttatcaatggattctatcagatctttttcaattttttcgtaagttttagctacagtttcacggtcatatttcgccaaagccactgtttccggttccgttacataaggaacaccgggactactattgtcactatctttatcatagaacttagcaaacaaagataccagcataaaatgcgaaaacgaacggatcatttttgcttcagcgatatagggttcctgctctttcggagcccccatttcttctgcagctttcagggcatgattcacttcagcgatactgtagtaaaactttctccagaaccaggttggagtatcctgagtctcatcctctacatcccgccagaaaaaaggatctgtattcgaattattttcttgtttaccagaacctttatcagtcacaaaatctacacgggaattcagcatggcagcataggaagctttaggataagcatcggctaccagttttgccaacttttcggtagtattgatctctgtccggtcatcgggaaccacatccaggaaattgttacaaccagttaatagtaccaatcccccaaccgctatatttctaaagtatttcttcataatcatatcatttaaaaaccaatattcaaggcaatcgtaaactgacgggaaagtggctgagccacacctccggtattataaaactcaggatcctgtccgttcagctttttatctgcataaatcaaccaaagattagaaccggcaacagttagggacacatcactcagaactttagttctctgcaaataatgtttaggaactttataggtcagcgaaatagttttcagacgtataaagtcacctttagccacccgttccgttgagtagttataagaattataagggtatttacttttaaaaccgtcagctgttaacacatcgacaatagaaggcacgttggtatatttttcatccccgggttgcatccaacggtcaaaaaagacactcgacattgcgtccagttcgctatagctggtcttaaatgccggagccagacggattttattgccggcttggaaagtgaggaacacattcaatgaaagatctttccaacggaatgtattcgaccatcctccggtatactccggatcaatcggtccctcatacttcagataatccagatttgtactctggaaataaactgaattagcaatcactccgctctcattgataaacagaggaacgcctgtatcgtgctccaatcccttatactgaatagaaaacaagctccccacgggatatccttcgcggttcccaccactggcattgatcatattataaatagaaggcatgttcttggagtttgtaattttggttgtcgtataccccaaggtcaggtttgatttccaattccagttttttgtacggataggggtaataccgatagccaaatcataaccccgggattccatatcggcataattggcatatttataaagcgtacctccgatagctgaattcttcaaagaggcaatcaaatcgaaactatttcttctccaatagtcaaagattacatccagacgccggttaaacaaaccgatatcaatacccaagttgagcacatgtcccttttcccacgttaattcagagttttcaagtgcttccagagtaattaccgattcgatctcattaccataaggacgtttggtattttcattgacaaacttagcagaagcagaagcggaagaattcatagaagcagtcaagccataagatccacgcaacgacaattgatcgatccattcggtagattccatgaaatgttcattactgatattccatttggcactaacattccaagtcggtaaccaacgggcactacgattgcttcccaaagcatttgttccgtcataccggactgttccggaaaaaatataacgggaatcaaaaccataatcggcattaaaatagaatgcagcaaaacggtcacgggtagttcccattccataataatcaaaattactttcgatcatcattttcataatcctgtaatccacagtgactttccctccttcattgtattgataaccgtaaccggtatttgaaaacttctggcggtcagcatatttcacctgcacacccgcaatcatattcagatcgtgcaagccgaattttttattgtatttaaaagagttgcggacatcataactggttaactgatcttcggaccggttataaaaaccaccatagggtaatacagatatggcttctgcttccggatgttcaggatctttgtataaaaatttatttttagcacggatggttgaagtataatcagcccggtaggcttctgccatattcgaattttcagtaatcatatgttcccggtcggattttacataacgcacagctcccataaactcatagcggagtcctttaatgatttcccaacctaattccaattgtgcctttacatccaccattttcaaatggatggagttgttctgcaattcattgataatattgaaaggggcataattccgggtaaaaaattccggatttccagcctcatcaaaacaggtgagcacacggctggtatttaaagcatagctaaatggattaatatcgaaattccggtcataggagccttccaccgtattactccggcgggacaaagatcccggagctttctgatcccgtagtgaccctatcaattgtacgcctaaatccaaattttcagccaatttataattattgcgaagatttgcggtataacgtctcaccttatcagccacagtccagccctcatcattcagaaaactcagagaagcatatgaacggctacgctggctacctcctgaaatgctgatggaatgctcctgttgcagcgaattccggaataaaattttaaaccagtcagtattggcattggcatagtgtctcaaaaatgcattcctggcttcccgggtattttccaactgaaactttccggtttccggatcaaaggaattaatcattttatacatttttccatacactccggaattcgacgcattcaccaagtccgaattcaaaaacccttttctttcaagctcagcatatacagacatctgatcaccggaattcataatgtcataatcagcataagtaggacgaagttgcacggtaaaatttccggaatagcggaaaacagggcgcccctcagccccccgccgggtagttaccaccaccaccccattcatagcccgggctccataaagcgctgtcgcagcagcatctttcaggatatcaatactttcaatatcattggcatttaaacctgccactgccgatcccaataaggtcgtaggatcgccactggtcaaatcatcattactaacacttacaatgtcttcatgtacaatcccgtcaatcacccacaaaggcttattctcacccgacaaagaggtagcaccacgcacacgcactttcggggcagcaccaaaagttccggacacattctgtatactcacaccagcgacagccccttccagcatacggctgacatccattacccccttcagtttgatgtcatcctgctgcaatttagttgaagaaccggtaaaggtagtcttactgatactccggtaaccggttacaataacatcatccaacaccttttcttcgtcttccagcaccacattcagcggagcatccgaacttacagtcacctctttattcaacattcccacaaatgagaaaaccaatacaggcgacttcaccacagggctctcaattataaatttaccattgatatcagtagcgactccaacagatgttcctttcaccaatacattcactcccggtaaaggctctccctttttatccttgacagttcccgtaattttcctcttctgagcctgaggagttgtgggagtacccaatttactttccgtaacaatgatcagattgccagaaagttcatactgataacgatcgcctacaattctcttcaaggcacgttcaagttcttcttctttgaaagacagggaaactctcttttcagtatctatgcttttaacattgaaaaagaaaaaataattggtctgcttttccagctccttaaagacatctcccagtcgctcattctgacaatcgagcgaaacccggatatcctgtgaaaaacctctggcatttactttgattagaaataccaaacacaaaatcagcgttaatttcataacacgcaatgttttttggggcaattgccgctgatgtacaacaaaaaattgtttttttttcataagtttgtatttgaaatccaacatctcccgttatttccgtccaaagagtaacgggacgttatcttccggtgattgtgtccagcaatcgccggtttttattttgattaaaaaagggtcctttatttaagttgaattgagtgaaatcaaatgaattcaaataaaatcgggtagaaaccacaaattcccgatcactcatttctgttttttatcatcttacactatttttatcttttaattactaaatatttactgcaaattttacagattccattttctgttttctcaagcctgaattttactctcatttaattcaatttacatcagttcgctttcactttttccggaaattttatgcccgaaataaggacttttttttgttcttactcaatgaccaccgtattccctttcatctcaaaccgtacatttgcaattttttctatgatacggaaaacttcctggggtgacaagtgcttgtcaatcattcctttgaaagcatgagatttagcactttcattctggaaaaagacatcaagcccataccaacgttgcatctgcaccatgatattctccaaagtcatctcattgaaaataaacattccattcttccaactgatgtattcccgggtatcaacctcacaaacctcaatattcttcatcccacaacgggcctgttgtccggggatcagagacacccggtcttgtccgttttcaacattcactttaccagataccaaagtggcttctactccgtctttttcaggataagcattgatattaaaaattgtccctacagcttcgacaatagtaccattcacttccacccggaaaggatgctgtttatcactctccacttcaaaataaccttccccttccagaaatacccgtcgttcatctccgacaaaagctgcaggaaatgtcagtttacttgcagaattaagatatacaactgtaccatcggacaaggttagccggtaatcagcccctaccggtatctctatcgtatgataatgtaatttttcgtcttcttttccggaaacaacatacacaatccctttcaaagaatcctgatgcacagcaacctgtccggtcttcaaaacctccccgacagaatctttcggaatcttcagcacctttccattacccaaagtcagactgattcgggaagaagtctccttctggttttccactagaaattgcccggacggttgttgcgttttttcccggaaaaaataaactgctgtacaaatgacagccataggcaatgccaccgcagccactccccgccagagttttacccgtggtgagtttttacaaatcgttttccggcgaatccgttcccacatccggtcataatccggttcttcaatagctgcaatacgatccatccgctccaacaaccagatttcgtctgaatccagctcttttcttccggttctttcccaaagaaatttccatattttcgtaaaaatctccttcatccttccaaaactatagtattaaaaacagtcgatcgaaatcaatttgtctttaataaccctaagacatttaaaagggtgaaaagattattaaaattttttcaaataaataaaaattagaaacaaaagcaattcattttcagatataccccacatccccttcaatttacggtaagcaattttgacctgtgacttgactgtattaactgacacattcagtttcgatgcggtttctgcataaccagtcccctcaataacagccatgacaaaaattttccggcagttttccggtaaagagagaagtaattcccggacattttctaccttctcggccaaatcttcggatttgtaatctgcccaaaatttatactcccggatcaaagcttctgcatgcttctccctgacccggcaatgccggaaatacttataaatataattccggacagattgattcaggtaatattgaaggtcataatccggattaatctgttcccgatgagcccataaatttataaaactctcctgtacagcatcctcggcaatttgccggtcctcgactaaccccatcgccacataaaacatacttcgggagtaatattggaatacccgttcaaaagccgcagtatcgcccgatttcaaaagatatgtatcactctgtatactcacttacgtcgaaaatgatagttgtacaaataatgataattgcacaaatataaaaaaaacaaacgtaaaattacaaaatatacaaaataagggtacgaatcagatatcaaaaagtaaaactaattactatattttcgtactaaagcaatcacctgttcttgttcttcaggtgtcaactggccagctttataaaactcaattacctgattcttattaataaagatcactgtaaaattattattcgctcctggtaatttccaagccgtagctaaaatcccatccggatcaaaataaatttttccatccgttccttttacctctttcaaagccattctcttaatcaaagcattcggaagcatcggagcggcagctaaattgacaataccataagatgtaatttccagccctgacaccggatgagtcttgaaataatcgcggaaggttttgttctgtccaggatgtgaaggatcagcataaaatatcagcaaatttttctgtcccaacatcggcaaagcaacagtgtcattattcatattcaggatatttacagaaaaaactttttctcccacttgtccgaaccctcggtacgagaagaggagtcctattcctaaacatagaataaaaatctttttcatctcaaattcattttcatttattgaaccttggcatcattcttgcgtaaatgttttacagtttgtacgaaaatggtttgtacaggacgaaaaaaagtgcattaaacatttgaaaataaagtcaataaaaagaaaagcatgcaaaaatgcgtactcctcatcttattcttcctcttgtcttactcgataagccatggaaataccccaactacagacacattatctgtggatagcctggagtcacgtcctgcctttttcaaaaggatgtataaaaatgtataccgctatttcacagaagcaaaccaggagaaagaaaccaaacgattcgatttctcggttatcggcggaccgcatttttcgagcgacaccaaattgggactaggtctggtagcttcgggactgtaccgggtagaccgggagcatctgacccttccgccttccaacatttctttttacggggacgtaactaccaccggtttttatctgttaggcatccgggggacgaccatttttaaagaagacaaatacaggctcgggatcaatttttacttcttttcttttccgagtaaatactggggtatcggttatacaaacggaaatcagaaggatcattacacgacttacaaacgcctggagaaacaaatccgggtggatttctcacgccgtctgtttcccaacacctatctgggggtgacgggacttttcaggcatgtcaacggtaaagattttaaagaccccggttttctggacggtgaaaaagcaaatatcgccacacaaggattcggtctgtttctgacttatgattcgagggattttcttcctaatccataccggggaacttatgccagaatcgaccagctctttttcccggatttctggggaaacaaattcaaacggacagaagtattcttcaggcaatacaataagttgtggaaaggagccattctggcatccgatttgcaggggacattcaattacggtaataccccctggagtatggtcgccctattgggaggttcttatcagatgagaggctattatgaaggacaataccgggacaacgacctgatacaaactcaggtagaactaagacaacatatctacaaccggcatggaatcgccctttggggaggtgcaggaaatgtgtttccgaaattcaagtacttcaaatggaaggaaacgctgcctacttacggcatcggctaccggtgggaattcaagaaacgggtaaatgtccggttggattatggattcggaaaagggcaaagtgctttttattttaatatcgacgaagctttttaaacaatgactatgttacatcaaataaatctgttattccgacgttttctgaccgatgcacgtcagttattccgtttcttcgttatcgtcaacctgattccctgtattttgctggtatttacagaaccttattcttttatgggaaaggtgatcctggtcacttttccgttgggaatgtatctttttgtattctcgtggttgaaaaatatcggattgatgcagctgatattgatcccgcaattgatcttcaatgcttttcagatcgttttattctacctgttcggcgaatcggtgatcgctgtcgatatgtttctgaacctggcgacgaccaacgtgacggaagccagtgaattgctgaataatctgtggccggcgatcatcctggtttgtgtgatctatatccctacgattgtgattgcagctatcggttgtaaaaagagggtgcatctgacgcctgtgttccggaaaaagatggcttgtaccgggttgattatcgggctggtttcgtacggtttgaccttcacggctacgaacaggaatacgggaagctataaattgcaatacgacgtattcccggtgaatatctattataatcttcgttttgccgtgaaaaaatggcaacggagtatgatttatcctctcacgtcgaaagacttcactttccaggcccataaaagtgtaaaatcggcggatagggagatttatgtgttggtagtaggagaagccagccgggcggtgaactggagcctttggggatatgaacgggaaacgaaccccctgttatcccagattcagggcctggctttatataaagatgccattacacaggcaaatgctacacataaaagtgttcccctgattttatccgccgccaatgccgagcatttcgaagacatctatgggcaaaaaagtattgtcgaagcctttaaagaagcagggttcaaaacgattttcctctcgaatcagacgcctaaccgtacttttaccgactattttgcagcagaagcggatttccaccacaatatccgcccggcatcggcaggagggatctataccgtcaataactacgacgatgccatgcttccgttggtgcagcattatatcgattcattaccggataacttattttttgtgttgcacacctatggttcacatttcaactattttgaacgttatccgagggagttcgcccattttaccccggacgaagcgacagaagtggaggtgaaaaaccggcaacaactgatcaacgcatatgataacagcatccgttatacggactattttctgcaccatctgatccagattctggattcgacgaatcatacgacagcactttactatagcccggaccacggggaagatttgttggacgacgaccggaaacgcttcctgcatgcttcgccccatccgacgtattatcaattgcacataccactattcttatggttttccgatcagtaccggcaggaattcccggaacgatatgcaacggcactcgccaaccagacacaaccggtatctacaatcgtggcttttcacacgatgctggacatggcctctatcacgaccccattactgaataccggttactcactgatcagccctgattataaagcccggcgaaggatgtatctgaccgatcacgatcaacctattttctggtataattcgggcttgaagaagcaagataaagctatgatcgaaaaaaatcatctggaccaccggtaaacgctaacaaccggaatctccgaggaaacacaggtttatcgggaaagccgatgtttaaaattaaacacacagtatgtttgatgaaaaaaacgaccgggatattttttagagatcatcaaaacattaattttgcaatccaataatcatacatttttaaaacctgaaaatatgaaaatagctatcgtcggggcaagtggagcagtaggacaagagtttctgcgcgtattggaagaaagaaattttcctatggatgagttggtgttattcggttcgaaacggagcgccggcacccaatacctgtttcgtggtcagccgctgactgtaaaacttttacaacacaacgacgactttaaggacatcgacatagctttcgtttcggccggaggcggtacttcgaaagaatttgccgaaacgatcaccaaatacggggctgtaatgatcgataattcgagtgctttcagaatggacgaagaggtacctttggtggtaccggaggtcaacccggaagatgctctcgaccgtccccgtggcatcatcgcgaatccgaactgtacgactatcctgctggtggttgccttaaaagccatcgaaccattgagccacatcacccgggcccgtgtatcgacctatcaggcagcgagcggcgcaggcgcagcagctatggacgaactgtataatcagtaccggcaaatcctggcaggggaaacacctacggtggagaaattcgcctatcaactggcttttaacctgattcctcaggtagacgttttcacggataacggctataccaaagaggaaatgaaaatgttcaacgagacacggaaaatcatgcattcggatatccgggtaagctctacttgtgtgagagtaccggccttacgggcccattcggaaagtatctggatcgaaacagaacgcccgctctcggtagaggaagtccgggaagctttttcccgtgccgaaggtctggtattgcaagacaatccggcagaacaggattatccgatgcctcttttcttatcaggcaaagatccggtgtatgtaggccgtatccgcaaagacctggcggacgaaaaaggattgactttctggttagtaggtgaccaaatcaaaaaaggcgccgctctgaatgcagtacagattgccgaatatctgtgtaaaaaaggactttaaacggaaggaagcgaataacaacggttattcatccggcaggaagagatccgggacgaggaatggaaagatcccgggttcttcggtagtctctgcacaaacgaagcatttgtatgcgggatcgaccggacaggcagagatagagagatttcgaaggttttctgactgaaatatgcggggccgatgatcgtcgaagcggacttcgaaaccggacaagggggaggataagccgctaccggtgtattttaaaaaactttctttcacggaccaataacggaaaaacagttcatcctgcgcatctccggcaagattttgcaggcactgaatttctgcaggatggaaaaaacgccgggccacttccatgcgggctttccttttttgctcgatatcgattccgacttcgagatgcgaaaaagccgccacgatataatcaccggaatgcgataaattataccaaaccgaaaaccggctctccaccaatggtttaccatgttcacctatacggatgaggtaatcttctttgtgcagtccccacaaacggaacaataaccgccgaatcatcccctcacccaataattttgtacgcctgactccgggatttttgtatccggttactttccggaccgtgtcttcacctactaacggaaacagttcatcttcggagagatgctgaaaatcggaaatccgtaaataataaattttaagcatgtcggttgaaataaagattacaaaaatacgataagcttggagaaaaaaaatcgtaaaattgttaaaatccttaagatttgacaaaacagttccttgaaaatttaacgtttcattcaaaaaaaacgtttgaaatattggtatttaatccgattttctttacttttaccccctagaaaaaagacaacataaatacattaatttaatatcatggaaattaaaaagtcaccgaaagcagatctggaagggaagaaaggcgttttcttcgagatcggacttactctggctttagcggtgctgttatttgcttttgaatggaaatcttccaccgaacaagtaactccatttcagactcccgctgaagaacagatagaagatgagattattccgattacgcaacaaatgctaaaacctccacctcctcctcctccagccccgaaattgacggacttgatcgatattgtagaggatgacaccaatatcgacgatgatcttgaaattttagacgcagaagaccaatcggagaaccaggtgatagaaaatgtcgccgattttggagaatatggtgaagagaataccggagagtcagagattttccaggtagttgaagatatgccgagtttcccgggtggtaatgtatcgaaatggattgcgaagaatgtaaaatatccggttctggccatggaaaacggtattcaggggaaagttttcattcagttcgtgatcgagagagacggttctattaccgacgtaaaagtagcgagaggagtagatgcctctttggataaggaagctgtacgtgttgtgcagtcgatgccgaaatggaaaccaggaaagcagagaggtaaacctgtacgtgtagcctacactctgccgatcaacttccagttatcgaacaattagcagattatcgatcaaatttataaagggctgtcatcttttgtcagccctttcttttgtcatgaaaaaggtgaatgccgaaacagcaggcctctgttttacgttattgcagcagccttcaaattttattattttatatgtattatacggatcaggaagcagagaaagcgatattagtaggagtagcccttcaatcggaagggatcacctacgagcagatgaccgaatatctcgacgaattgtcatttctggcagagacagcgggagcagaaacggtaaaaattttcacacagaatttagataaaccggtacatgccacttttatcggcaaagggaaactggaagaaatcaaagcttacaccgaagaaaacccggtagatatggttattttcgacgatgaattgagcccgacacagttacgaaatatagaatctgtctttccgggaatcaaagtgctggaccggacgaacctgattctggacatttttgccagccgggcacgtacggcacatgccaaaacccaggtggaactggctcaataccagtatttacttccgcgtctgaccggaatgtggacacatctggagagacaaaaaggaggtatcggattaagaggaccgggagaaacggaaatcgagaccgaccgccggatcatccgggataaaatcagccgtttgaaaaatgaactaaccaagatcgacaaacaaaaggtcattcaacggaaaaaccggggtaaactggtgcgtgtcgctttggtaggttatacgaatgtcggaaaatcgacgttgatgaacctgctgagtaaatcggatgtatttgcagaaaacaaattgtttgctacactagatacgaccgtgcggaaaattgcgattaaaaatgtgccgtttttgctggcggacacggtaggttttattcgtaaattaccccatcacctggtggaatcgttcaaatctacgttggacgaagtgcgcgaggcagacgttattcttcatgtcgtggatatctcccatccgcaattcgaagatcagatgaaggtggtcaatgctactctggcagaattgatcaaagaacccaaaccgacgattatcattttcaataaaatcgacgcttttcattatgtacagaaggaggaagacgatttaacccctgtgaccagagaaaactatagtctgaacgacctgaaacaaatgtggatgtcgcgacagggaagtgaaaccgtatatatatcggccgttaaaaaggagaatatagaagaactgaaagaaaagctttacgatatcgtcaaagagatccattcggcacgattcccctataatgactttttataccaggattataccgaaaacaatccggaaacagaggagtaggtttctttactatttgttaatattaagacaacatctcaatgaaaacgttttaatattaacaaatacttaaaatcaatcatttataattttgtttttttaacatattcttttatttttaatgaaccggaaaagtctggaaacattaaaatgaaagattatggaagtaaaaaaatcacctcaggcagaccttgaaaacaagaaaaatatttttttggaaataggtcttatgcttgccctgggtactattctattcgcattcgaatggaaagtttccgggcgtcaacccgctgatttcgtcacggtatctgaaatcccgaccgaaatcgagatggtaccgatcaccatgatgcatcagattaccccacctcctcccccagccccgaagcctttcgatttactggaaattgtggatgaaacagatcctttgccggacgatctggatatcatcgatgcagatgacgaaagtaataataaagaatctttcgacctgaacaatttgaattacgatgaggaatacgacacagacgaagtaatcgctttcgtgccgagcgaggatatgccggtatttccggagaatatacaaaaatggctctcaaagcatgtgaagtatcctcaaattgcccttgagaacggggtacaggggaaagtattcgttcagtttgtggttgaaaaagacggcagtgtgagcaatatcaaagtggtgcgcggagtagatgcttctttggataaggaagcggtgagagtggtgtcggtgatgccgaaatggaaacccggtaaacaaagaggcaaagcggtgagggtggcttatacgcttccgattgcatttcagatagggagttattgagttactgagttattgagttgatgagttactgagttgatgagttattgagttattgagttactgagttattgagttattgagttactgagttattgagttactgagttattgagttactgagttgatgagttggggggagagttgaaataaaaaaggtgtttatatacataatttactctaaatgtaagtttatagggatattcagtaaatagtataaaatta

SEQ ID NO: 5814 - DNA, 2105 bp, Unknown
  gut microbiota DNA sequence
attttttgaatgaaatcagatttcacttcctgcaaattttttcctccataggtcagggatttttcaccgacccgcacaataccgaaaatcatcttttcttcctcgtcatactcctcatacccctgataacctttgtatttcaaaccgcataagaaatcaagcaaataggcaaaacgaccttggcgtgccgcacggtatggccggaccacaaaacctctctcaggggaaaaactcatcaactgctcgctgccgtcgggtacaagcaggacaaactgattttcaccacaaacctcatcgtatgccttcatcgtcaccaccagcccatcgttccacatgcccaggacatacatctcgaaagcccccagatccgcggtcgcctgaacggtatccgaaccatcacaaaccagggtataattccccaggcaaaaacgatcataacaaacagaaaactctttcatcgccgatcattacttatttaatttttctacaaagctcgccggaatattaaccatggcacaccccagcatatcgatacgtaccaacaccttcgttactcccttgtgtctgatcagttcaccttccatccccctcagcgaacctttcaccaccctgaccaaatcaccggcctttatattttcattggtcatttccaccgcttcttccgagaaatccagcaaaaaacggaagtcctccatctgcttatccggaatcacagcagcccccgcctctcccttcagcctcagaaaagccaccacccccttcgtctgcagcaccttcacctgctcctgacggcctacccgcacaaacaccaaccccgcaatcaccggcaccaccacccgcgacttccggtacgtccactgcctcaacaccgtctgtaccggcaaaaaacactccacacccagctcttccaaccggtcacgcaccttcttctccgcacgggaggcggtgaagacagcgtgccaatgaaccgtttccgttttttgcctatctattgccatacatcctttcatagtatccctgataatctccgctcgtcacctgatccagccactcctgattatccagataccatttcaccgttttctctataccctcctcgaactgtaaagaaggttcccagcccaattcatttttcagtttcgtcgaatcgatagcatagcgcaaatcatgtccggcccggtctgtcacgtatgtgatcagcttctccgatgctccttcagggcgtcccagtaagcgatctaccgtcttgatcagaacccggatcaaatcgatatttttccattcgttaaagccaccgatattatatgtttcggcaacctttccattatggaaaataagatcgatggcccgggcatgatccaccacatacaaccagtcacgcacattttccccctttccgtaaacgggcaaaggtttattgtgacggatattattgataaacaaagggattagtttttccgggaattggtaaggaccgtagttattactgcaattggttacaagggtaggcataccgaaggtatcgtgaaaggctctcacgaaatgatcggaagaagctttcgaagccgagtagggggaatgcggatcatatttcgtggtctccgtaaaaaaggtgccgtcaaacttcagggccccgtacacctcatcggtagagatatgatagaaacgtttcccgtcatattgtccgtcccagcttactttagcggcttgcaacaaagacagggtccccatcacattcgtctgagcaaaggtaaacggatctttgatcgaacggtctacatggctttccgctgccagatggatcactccgtcgatactgtgctgccggaacaattccagtatcttttcaaaatcacagatatctgcttttacaaaagtataattcggctgctgttcgatgtctgccagattggccagattccccgcataagtcagcttatccagattaatgatatgatattccggatatttcgtcacaaacagacgcactacatgcgagccgataaaaccggcaccaccggtaatcaatatattccttttaaaatccattatttccgttttaattcatttatacatttcacaagtgaatccttccagtaaggaat

SEQ ID NO: 5815 - DNA, 8741 bp, Unknown
  gut microbiota DNA sequence
atcgtttatttgtcggcattttattttattatacaaggaacattacgtgaatacagtgccggaattataatattaacatttttaatagattttatagtaataaatgtggtattaaaacatctggggcaaaggaaattattcttaacttcgttcactgtaaataccttgggttttatatttcaatggtattataatttttattcaatatttactgcaaagaaatggagataactaacaacttatctgaaaaagctttatacgactataagatagttcgtaacgcaattgccggagatgagaaagcttatggggaactttttaagcgttacaaggattctgtatattttatgatccttaaaatggtaaacaatcggactgatgccgaagacttgatgttcgaggctttcgagaaggcatttgccagtttgaactattattctccacaatttgctttcagcacctggctgtttaagattgcttcgaataatacgatcgattttatccggaaaagaaaggcgcagactgtgtctttggatgtcgacgatatcaatcctgaagacagagggtatatcaatagtattccagctgatgtcagaacgccggatgaagaagcgattcgtcagcaacgtgccgattttatgcgggaaaaggtcgctcttttgaaaggaagatatcgccggttaatcgaattacgctatttcgacgaattttcatatgaagaaatcgccgataccctggctattcctctggggacggtgaaagctcaattgttccgggctcgggaactactcttgaatattttacagcataccgagattgctaaggaacatggtaaaaattaattttatcgttttattctttatttttctttctccaattgtttgtgcacagagggtcgtcgtttcggatagtgttgtattttccggagtagtcttcgacactcaggattcacagacacttcctaatgtgacttgtcgttatggtgaaggtaaagcaactatttccgatcaaatgggatgctttgtgttgaaaatcggtcgtaaagataccgtccgctttacttttgtcggctataaaccttgtactgttgtcatgcccgatactttgctcgaagatcggtacatgatgggggtttttctgtctcccgataccttacaattatcagaagctttgattttacgccggtggggagaggtgcaaagacaaaatctgatcaatgcccgtaataatatgaccggcatattgaagcaggcttatgcgcctgtagactatatggatgccgatatgaatcaacggatgatgctcaacgaatatgcccggagtgtcgagatgaaagggcatgtcgatgtcggtatcggagtcggtacacagtcggtcgatgcctataaaatgctccgaatgagacggcgggtaaaaaatcagaaagaatggctcaatcctaatgaaatcgatctgttaaagaagatttattatttgaaaaaaaaggaaaagcaagataattgattcaagataaatatatctttgtagtgctattgtgtctgtaatttttccttgttgggctaaccggagaaaaataaagataggcaagtatttagtattaataaagttatgattttatgaagaatttgtccattgtattgaatgttgtgttgttcgttgcagtgattgtactttatgtattgtacttttctggccataagtcaccggaaactgcaatgaccagtaaagttgccggtactgccgatgcaacaaaaattgtatatatcaacacggatacacttttgaataattatcagctggcagtcgaattgaacgaggcttttctgaaaaaacaggaagatcgcaggacagaattgaatataaaagcgaaagcaatcgatcaggaaggaaccgaattccaacggaaattgcaaaataacggttttatttccgaagcccgggcgatagaagccagagatcaattgttggtgaaacaagaaaatttccgccgcttacaacaggagatgatggataaagcttccagagagcagagcgaactgaacaaacagctttttgacgaaatcactaatttcttgaaagagtacaacaaagagaaaggattcagtattgtattgagtactcagttgggtggaaatgttttatatgccgaggatggtttcgatatcacgaaagagattgtcgatcgcttgaatgccaattacaaaaagggcgatagtcagaaataaaatgacagaagatttttgaaaaggctgagtgatcagcctttttttataggtaagggttaaccatcggagcagtttatgcttatgaaggtatttgaacgttatttcagtcggaatccggtctctcgtcagctttcttttgaggcagatactgctgtgattgttattatccccgttttcaacgatccggatatttttgctaccctggattcactttgctgttgttcggtgatgaatatcaaggcgggtgttttgattgtagtgaaccatagtgaagtttgcccgcaggaaataaagacccggaatatcgggttgtctgacactttgaaacgatatgttcgggataggcagaccgaccggcttcgcttcgaagtggtcgaagcattcgatttacctgcaaaatatgccggagtgggattggcccggaaaatagctatggatttatcggctgcctttttttaccgaaacgggcgaatcgatgctcctattctttctttggatgctgacacctgggtcgaaccgaattatttggaggaggtggtccgttattttcaggaaaaatctgtggccggcgtttctattgcttatgctcaccgtctcgaagaagccgatatgacagttcaggcccgtgaggcgataatgaaatacgaattgtatctgaggtattatcgtttggcattggagtataccggtcatccccatgcctaccattgtataggatcggcttttgctgtaaggacgttggattatgtggctcagggaggaatgaataaaagacaggctggagaggatttttattttttgcagaaattgatcgctaccggtagatatgcaaccttacagtcgacgcaggtatatccttctccgcgattctcggggcgtaccccttttggaaccgggcaggcggtccggcagatcgttcaggagtccggacattttcgggtatatcacccacaggcttttcgggatttaaaatgtttttttcagggaatttctaccctttataaagtggatgaagctggtgtttcgggctattttcaacagcagacgaaggatatccggctttttttatcccaaatgaatggaattgcagtcttggcggagatcaatgcaaactgtgcttctgtagagcaatttatgaaacggtttttcgataatttcaatgctttccgtgtgttgaaatatctgaattttgtgcatgaaagttgttattcgaaaatagatatcttgtctgcggccaataaattgctggcagaattgaacttacccgttgccgaatctttggaatgtgcccttcagattttcagaaagttattcagataggcgtggaaaaagaggggaagagaagctggaattgacataagaagatatatctttgtcagcaaataataaaaatatggatttcgaatacaagatggagatcactgccgatcccgaagaggttttcgctgcattgaccaatccttttcagattgaattgtggagtggctatcccgctgatatgaaagctgaagaaggttatgtgttttcactttgggaaggggatattacaggtgttaacctggaagttgttcccggtaagctgttggtacaggaatggtttttcggtgagcaggaaaaacaatctatcgtccgcattaccctgaaaaaagagggagccaggactttggtcggtttgactcatacccatatccccgaagatgtgtacgaagagatcaccgggggatggaaagaatattatctggaagcgataaaaggaatgcttgaaatgtattgacgccggatcagatgactttgatcgtctggcccagtactttgattacctcgccttttcggattttggcccgtttccggctttccggttcgccattacgaaccacttctccattttccaccaatgtttttgccattgccccgttttcggcaatttgtaatactttcagcagcttgatcagctcgatataatcttctgtcaattcaaattccaacatttccgatcgtttaaattctgtgtaaaaatacaacttttttgggattttgggacggaccttttgtcccggaattcctgtaactttatatggggtacataccgtaaagtagaaacaaacgggaaagaaagtatttatttttgccgttctgaaattttgatggttgtttgcaatgtgttacaggacaaccttttatgaacgaaaattaatttttatgaagaaattattcttatccttactggccagtgttaccttatcgtccgcatttgccgaaggatatcaggtaaacgttttgagtacaaagcagacgggaatgggacatgtcgggacaggtatgaaattaggagccgaaagtatgcatttcaatccggcaggcttggtgtatctcaatgggcatatggatatgtcggtggggatatccggtattttttcaaatgccaggtacaaaaacggagattattctgcaaagacagataattcggtagggacacctgtatatgcctatgtcggatatcggatttatgataacctggcagccggaatttctttgactactccttatggaaattctttaaaatggccccaagcctggaaaggagctcatctgattcaggatatcaccttgaaatcatatatcatacagcccactctttcgtataaaattctggataatctgagtgttggagtcggtttacagatcgctatgggaaatgtaaatctttccagagctttattgcctgtcggagctttggtgccgattctgggtgccgattatcaggatgttgtacccgtgtctgccactttggatggaaagtcgaaagtgaaactgggctatcatatcggagtgatgtatgatgtttgcgataaagtgactttaggtctttcttaccgttcccgggtccggatgaaagtaaaagaagggacggcggaattggattatgccagtgagaagataaaagatctgctggatgcaacaggacaaatacctcctttggataaggggacttttcatgctcagttgcctttgccttcgaatacgactttcggggttagttaccggccgaccgatcgttgggaactggctttggatttgcagtttgtcggttggagtgcttacgattcattaaatgttgttttcaatgagaaagtattgaaaatcgaggatataaaagcagagaaaaattataaaaatacgatgatctaccggatcggggcccagtatatggcgacagaccggttggatgttcgtttgggattatactatgatcaaagtccgatccggaaaaataattacaatccggaaactcccggtatgggaaaaatcggtatttcgacagggtgttctttcgaaccttaccggaatttgcagatcgattttgcctttttgtatatacagggagtcagccggcatggctcttacccggacaaatatagtcccggcggtaagttttccgggaaatacgaatcgaatgccgtttctgcttctttgggtttggcctatcgtttttgagaatagaattgacctccccaaaagctatccgaaatcagctgattcggatagctttttttatgaggccgttatatacatatttatattaaaacgtaggtttatttttctttctattccgcttccgggttttgtgccgtcagaccggttcgcctggaacggtccgctaaggctttccttcaatcggcggaactcctcgcaagctcgtcaggcatcaccggtcgggcgttcggaaaacctaaccggacactcgttcccgctccaatggtcttccggcataaaaccctccatctcacgttaacacgacttggcaaaggaagaattggattatggataattgggttactttatcggaaaatcttttttcgttgaaatttatggttttcaggtctggtttagcttgccatgcagtgataacgtcagtcggaggtgttcgtgttcggggaccattggagctctggcgagtgtcgtcttgctttttctgaacgcccgaccggtggtgtctgacgaacgaagtgaggagttccgccggtcagtgaaagaaaaagctagatgaccgacagaagcgaccgggtccccgaacacgaataccgaagacgaacaaggaccaaaataattctacatttaatgtaaacatgtacataaataccgtttattaaatatatttgtctattcttaggaacggctaaatcagaacagatgaaacacatgactttcgtacaatgggcggtctggttgggatttatctacccggtatgttcttgtcagccccgaccggatcttaaattgtggtatacccgtccggctgagcggtgggaggaaactttgcctttgggaaacggacgtttggggatgatgcccgatgggggagtcgttcaggagactatcgtcctgaacgatattacgatgtggtccggtagttttcaggatactcgtaatcccgaagctttgaagtatctgcctgagattcgccggctgttattggaaggaaaaaacgatgaggcccaggaactgatgtataaacactttgcttgcggaggacaaggatcggctttcggacagggggcgaacgctccttacggcgcttttcaattgttaggtaatctgcatttacaatatcatttcccggatagtagcgatgtcggttattccgcttatgagagaggattatctttggacaaagctttggcttggacctgtttccggaaaggtaaggtgaaataccggcgggaatatttcgtttcccagacagaagatgtgatgatcatgaagttgactgccgaccggaaaggaatgctggattttgatgttgctatcgaccgacctgaaaattacacttgttatgctaatgatggggtggtttatatggaaggacaattggataacgggaaagggaaggccggaacgaaatatatggtgcagctgaaagtatggactgcagatggccggcaagtggccgattcggcttgtatacatgtcaaagaagcgacgacggcttatgtcctggtgtccgccgggacaagtctttgggcggcagattacccggagcgggtcgaaaaattgatgcagattgccggtaatatggattatggttatttgttggagcggcatgattctgcctggcgatataaatacaaccgcgtggaattggatttaggaactccgcaggatattttgcctaccgatcagcgcttggcccgttttcaggaacaagaagatcccggtttggtcgctttgtattttcagtacggccggtatttgttgatcagtggtacgcgggaaaattcgtttcctttgaatttgcagggattgtgggcgaatagtgtacaaaccccttggaatggcgattatcacctgaatatcaatttgcaaatgaattattggccggtagagatcgtcaatttatcggaattgcatactccgttgaaaaatctggtaaaggatttggtgacttcgggtgaggtcaccgctcattctttttatggagctcagggctgggtggctcatatgatgacgaatccctggcgttttactgctccgggagaacatgcttcctggggagccacgaataccggcggggcctggctttgtgagcatttgtgggaacattatgctttcacactcgatcaggagtacctcagggaggtctatcccgtgttaagcggagcctcccgttttttcctttcttctatgatcgaggaacctacacaggggtggctggttacagccccttcctcttcgcctgaaaatgctttttatatgcctggtacccgaaaggaagtcagtgtttgtatggggccggctatggatactcagattatcagggagttattttctaatacaatacaggctgcccgcttattagagatagatgctgcatttgcggattctttggagaaagcgttggataaattaccgccgatgcaaatcagtccgaaagggggatatttgcaggaatggcttgaagactatgaggaagtggatccccggcatcgtcatgtctcccatctgttcggtttgtatccttcgaatcagatatccctggccaaaaccccggaattggccgaagctgcccgtaagacacttcaacggcgtggagatggaggtaccggttggtcgatggcttggaaaataaatttctgggccaggttgcaagagggagacaaagctttggaattgcttaaaaatttattgaaaccggtggttaccggcggtaaagtagattataccggcgggggaacttatcccaatttgttttgtgcccatccgccttttcagatcgatggtaatttaggcggttgtgccggtattgccgagatgttgattcagagccagcagggatttatcgaggttttgcctgctctgcctgctgtctggaaagaggggagttttaaaggcttgtgtgtacgtgggggaggtgtcgtcgatgcaagttggaaagccggccggctggagaagctgactttacattccagggtaaaatctgcttttaagttgaaaattccggagcaagtgaaacgggta

SEQ ID NO: 5816 - DNA, 13747 bp, Unknown
  gut microbiota DNA sequence
ctgcattttttctcccgtaaaagtgcaaattccagcccccatgtagtaagataccgtatgtaaatcccatccaggtgagttggagggaaaaatgtattattaacagtttaatttttaaagttatggctagaataagctcagatccgatcgcgaactatcggggacatatcggtaagatctcttactacatacgagaatgcgagaatatggcgcgcaaaagtttgtccgcagggaaaatttctgattcgccggcaaacgccttcatgtccttgaataaggaaacttgcacgcaggaagacgatacgctgaccgtggactacgaacagctgcaatgtgcacaaggatcgctcacggaaccggacatcaccgccacgtacaacacttcgacttcaaaaatcatgtttgagaacacggctatggaagacctcgcctattgtaatgcggatgacaaaacgtacggggtgcctgtgaacacccaacgcgagaggtaataacacatacgtccggcgttatgccattcccggcaaaaaacggaaatgggaaaccgagggacgcacccccaaacagcaggccgtagcgatacgcttcaaggcagtacaagttttttacatgacgtttgccaaacaagtgtcgcccgaaatctggcgggccgtggcaaaaacagtgggacgacacgccccgaacgtgtttttctcaagaaacttccattgcttcggggaggaaggccaaatcgccgatttcgggaatttcatgttcacggacggcactttacctctccccaggaatctggaagtaagcggggaaggtcctctgttcaaggtcacatggcaagaagaacggatgtggaaaaccgtatccggaacggacagattacaaataggggtattatatgacaacgattcccgtatcccccgggtcgccagccaggtaaaaggaagacgcggagagctgcatggagaatttaccctcgatgaatccatcggaaaaaaggcgcacgtgtacattttcttctgcaacgaaaccggcaccaggttctccgcctgccgatatttccacgtgaaaataaattcatgataaaacatgaacaaaaacccggtccatgaaattcctgttcccgattttcaattctcgattattatattttactttgtaccgggtttttcattaccgacacgaatgataaatcaagcatataaaagagagtttgaatgaaatacacagaattggacgactgcgaagaattctaccacaaagtagaatactacaataaaacaaagaccgaacaattaagttaccattataaagaaatactgaaactgctgggcgaagaccccgacagggaaggtttggtaaaaactccctaccgcgtggcaaaagccatgcaatttatgacaaggggatatcacgagaatccggaggaaattctgcggtcggcacttttcaaagaagattaccgccagatggttattgtgaaaaacatcgagatctattccatgtgtgaacaccatatgttgcctttcatcgggcaggctcacgtggcgtatatcccgaacggatacatcaccgggctaagcaaaatagcacgggtagtggaagctttttccagaagactgcaagtacaggaaagattgacaaacgacataaagaactgcatccagaacaccctcaaccccctgggcgttgccgtggtgatcgaagcacagcacatgtgtatgatgatgcggggcgttcaaaaacaaaactcggtaacaacgacttccgacttcagcggcgcattcgagaaactcgccacgcgggaggaattcatccggctgatcagtaataagtttcattaagaaataaacaaaacgagtatgaaaaaagcatttgttttcccgggacagggagctcaattcgtaggaatgggcaaggatttgtatgaaaactcacccgaagcaaaagaattatttgaaaaagcgaacgaaatattgggattccgcattacggatctgatgttcaacggcaccgacgaagacctgaaacaaaccaaagtaacccaaccggcgatattccttcactccgtgattctggccaactcgctgaccgaaactccggatatggtagccggccactccctgggagaattctcagccctggtcgctgccaaagctttatctttcgaagacggattacgcctggtacacgccagagcgctggcgatgcaaaaagcctgcgaagccaatccttctaccatggccgcagtgatcggaatggccgacgaaaaagtagaagcgatctgtaaagagatcgacgaagtggtggttcccgctaactacaattgtccggggcagatcgttatttcaggtagcaacaaaggaatcgagaccgcttgccagaaactgaccgaagccggagcgaaacgtgtattgcctttaaaagtcggaggtgccttccactctccgttgatggaaccggcacgccaggaactggaaacagccattaaaaacacccgtttctcaaccccggtctgcccgatctatcagaatgtagatgcccaaccttataccgatccggctaagattcaggaaaacctgatcgcccaattgaccgcatcggtcagatggacacagatcatgaaaaatatgattgccgacggagctacctctttcctggaaatcggaccgggcaaagtattacaaggcctgcttaaaaaggtcagcaccgaaatcgagaccaacggtattcaataaaaattgctgagagaatctgagattccgttgagacaatttttctaaacagagcctcaggttttctcaacaagcaccaatgaatcccggcaaactgaatgtacttttttcctctcaaaacaaatttccgaaggtttccgatttttctccaataatttcatatctttagccctgtataatggctattgtgtacctctatgtccgacaaaaaattaaaacgtcgtttaaatgcctttttcagattattgattatactctcgatttgtgtaatcacggtatatttattccccaaagtcggtagtttccagtatgaatatcaaaaaggtatgccctggagatacgaaaccctgacggctcctttcgattttccgatccataaaacagaagacgaattacaggaagaacgggaaaaattagtacaggaacaaagtccgatttttatcttaaatacgaatacggccgatctgcaaaccggtaaattcaggacagccctgcatgctttccgcaatgaaacgacttccggctccctgaataaactgaccgaccggctcaaagacatctatacggccggcatcctgcaattgcccgaagagttggatgccaggaaagtaaaaaccattaaaatcgtcgagaacaatatcgggcataccgtagaattcgatcaggtatataccttgaaaaaggcttattcggatttaagccaggcaatcgaccaactccattttccgaaatcggtacgggaaaatattctaagcctgaacctgaacaactatttgcagccaaacctggaattcgacgcctcgaaaacaacgatcgaacacctgaaccacctgaaaagtatcagtctcacagaaggcatggtgcaacaaggcgatattatcatcaccaagcgtgaactggttactcccgaaaaggtaaagatactgaattccctcaaaaccgaataccagaataatctgggatctaccgaaacttatatgcggactatcggcggtcaattccttttggtgctggtagccctgctggtattttccatttttttctactattccaaaaaacggattttctacaacaaccgggaatttatattcctttacggtttatttctagccaccattatgctcggtagtctgggatatcatcagagtatcaatatgtttgcggtaccggtattgtttttcatcatcatcgtaaacatcctgatcggtagccgttcggctttgtatcttctgctgagcagtacgctgctgatttcctactatgcccccaacagttacatgttcgctttcatgcaggtcacagccggcattgtagccatattcagtctgtcgcacctgcaacggcgtagtcagctgatcctgtctatatttctgatttttatcacctatacactcgtatatatggcctttatcctgacccaggaaggcgagatccgcggtacccacttgtttgcgctgatctggctggccatcaattgcctgctactgacactcacttacccggtgatctatatctttgaacggattttcggttatacctccgaaatcacactgatcgaactctcgaatccgaatcatccggccttgcgcaacctgaccaagaaagctccgggtaccttccagcattcgctgatggtcgccaatctggccgaggaagctatttaccggatcggcgggaatcctttgctcacccgtaccggtgctctttatcacgatatcggtaaaacattcgatccgatcttttttatcgaaaatcaaagcgggggaatcaacccacacgaccagtgtgaattcgatgtcagtgcccagcacatcatcgaccatgtccgtaaaggagtcgaaatggccaagaagtataatttgcccgaaggtattatcaactttatccgtacccatcacggaaaaagcaaggtaaaatacttctacaattcttttaaaaacaaatatcctgaccgggaaatcgacgaatcgctgttcacttatgacggaccggatccggtcagccgggaatgtgccgcagttatgatggccgatgccgtagaagcagtctcccgtacgctggtcgacaagaccgaagaaaatatcacgaaagtagtcaacaatatcatcgacgggcagctacaggacgggcgctatgccaatgcagacatcacttttaaagacattgcaacggtgaaaaaggtatttatcgaaatgctgactaacatctaccattcccgaatcgcttatcctaaactcaaacaagaagaaaaaaaataaacattaaaacttaggaatatgacacagaaagccatcacaatcaaagacttagcagaaaaactaaatatctctgtatctacagtgtcacgggcgctgaaagataatcctgagatcagccaacaaacccgtaaaaccgtgcaggccctggccaaagaactgggctacaaacccaatcccatagcagtggctttaaagactcacaaaagtaacacgatcggcgtggtggtgcctcagattgtgaatacctttttcgccaccgttgtcaaaaagatagaggatgttgccgataaatacggatacaatgtactggtagcttcttccaacgaaactttcgaaaaagaaaagaaaaacatcgatatatttctggccaaccgttgtgatggaatcattctgtctatttctaaagccaccacttcgtacgaacatatcaaacagattcaggatatgggcgtgcctttggtattattcgatcggactgcgaaagaactggatgtctctaaagtcgttgccgacgatgccgatgctgctttcaaaatcgtacaacatctcatccatggcggagccagaagaatcgccctgctaaccggcccggaacaactttctatcgggaagaaccggatgaaagggtatctgaaagccatgacgctgaacaaactggaaatcaataccgactacatcgtcagatgtgaagacttctccgtaaaagcagccaaagaggccactcaacggttattgaatatgaaaaatatgccggatgccattttcggaatcaatgacgatatggccatcggagcaatcgaagcaataaaagaaaaaggattgaaaataccggaagaagtagctgttttcggtttctccaacagcaaacgttcccgatatatgaccccttcggtcagcaccatcaaccaatttcccgaaaagatcggcgaaacggctgccgagcttcttttcgaacaaatcctcgacgccaaacatgcacaaatccgcgaggaagtgatcaacagcgaactgatcgtccgcgaatcctccgaccgctcgtttatgcaataagaaccgatattcccccaatcagcaatctgactgggggaataaatttccgtttttttattctcccttcaaacaatatcctgcaaatcgtttatttctaatctctaacccagtaccttccaaggtctttctcaactccgatacaagattccggagtgctttatccttagaatcgaagagtatagcttttccccaaattcctgcatacaactcttcgatcttcaccaccgttcccattttccgacacaataacttcaaaagacaagcttcattcgatttcagataacgttctttcccctttacaaccaaaattccggcattcacacgaaaaaatacttcggaagcaatccggtaacactcctgttgttcccgacttttcacaaaacgataatgtaaggcctttaatcggttggctaatatcccgatatcactgcttttttccaaataatcttctacaccgaccccaaaaacatcggtcaacctctccacttcataatccgaagtaaacaacactacagccacctcccgttggacctgcttaaatctacgtaccgattcccaaccgttttcttccttcaagcgaacatccagcagaatcatatcataccgctgttcagccattttctgcaacgccatttccccgtcagtggccgtatctacgacaaactccccggtttgcaagatctgtccgactgcattcaaccagttttcttcatcatccacatataataaatgaatcgttgtcatctctgtttacttttcatgatcaagacaaaacggcttccccctccttcccgggtccggtagactattcttcctccatgtgccgacattaccattttaacaaagctcaatcccagtcctgttccctccgtcctgcgttccacggaaggcgaacgatagcccgtctcgaacatatgtttctgatctgctttctcaatcccataaccattatcctttacaaaaatccataatctcgtcccttttcggacacatccgaccacaatcccgacctcttctctggaatatttcaccgcattccggagtaaattccccaacgcacgtcccaattgcaagcgatctgcacaaatcatcggatctcccttcagcctacataaaaccgaaaaccgtactgccttccgatccggaatctctccttctatacttctccatacttcctgtaccaataccggtaattcaaatacctcatagttcaataccaatcccctctcattcaccagttttaccgacatcttttttaccaaaatttccaaacgtccgatggcttcctgcgctacccggaaatttttttgctgttgcgaagtcaaaccgcttatcccctcccggtccaccaaacccaagtatgtcccggcaattccaaccggtgacttcatatcgtgattcacagtctgaatattcaattcctcatgctgccggatccgcttttctttatgtaccaaatagtgttgccaataaaagatcaatcccaacatccaagccgaagctaccaaaaacaaaaccatcggccactcatcataaagaaatacccctacaggtaaaccgaaacgagctctaataatatgcttctccaataatcccaagggcatggaaaaatcctcttttccccggggaattttattaaacccctgctttacagcatcgattacctttcccgtactatcctgtaattccaacatataactaaccgcttccttatccatctgcctgcaaaatgaagaatccaatccccacaacgtccacaaagctgtgtcacggatatcatacagagcgcagacactcatctttttcgcctccatttccgacttaaaagaaaaaacaaatttttgtcggtctctaaaaactatgatgtgatccaatgaaaaagaaagaatatttccagtgtcattcattgtcctttgattatatatatcaatattcttctcaaggccatttttcaatgtctcaattaaatttgtctctttctccacgtatagttttatcaaggtacacgccaacacaatgaagagtaacaccatcaccccccaagataaaatataaaatttacgcatcctcataattaacattcttttacaaaacaaaggacaaaactaggacaacatagttattgaattcttttttaacaccgaagatttactatacgtttgttaggtaaaaataataataaccatgaaaacaaaaaagagactaataatatttgtaatattaattacaattttttcgattctaagttcaatatttgatataaaaacttatcaaaatggaaacacaatcgcgttaaaaaatatagaagctttagcatacgaagaaacgataaatccagaaatattacgaatatgtaccgaagctcgaggtttctgtgcccacaatagaatacaatatataggaattcacatgaaagcagattaaaccatgaaaaacatactatttttatccacgatcctattctttatatcatcctgcaacgaatccaacttatctgaggttccttcggctcatcagataccgaaagccggtaaagcattacaaagcagtttcatttccggacttcaatcctgggaagcccgtcgtgtttcagaaatagccagtaatggccaggagattctccttagttattcggacaacaatacgaccaaggcgatcccattgaataattccaataatgaaactccggtaacactatccagtttcaacttcaggacctcccggctactcgaacggcatacaagtctgcggacgcgatccggagcaagtgattcttcggtgatacagctacccgatagtttaaataccttgcgggctatacgggccggcaattatattatcgcaacaggcctctacacacaggggcgttatctgttgtatgatctggacacaaaaacattcggttttcatttatcctatccggaacacccggtctatccggctctgcgcgaggacactaaagcgattttatacgccagcaccgtactgaaagtacgtcccgacaaccggtattttgtctgtggcgatatgtatagcggtaatcttgaattttgccggatcaccggcgaccatatcgatcgcatcaaagcctattgctaccaccatccccgggtatatatcaccgaaaaaacggtgcccgacgtagcttattcgcgtgataaccgcttcggtttcaccgacatcacggtcacctctgaaaaagtatatgcgatctactcagggcatacttatcgcgaaaaccccaggactttccaacaatgccgccagctactggtattcgattgggaaggcactttactcgaaacttatgccttggatacaccgttaacgcatatcaccgtagatgtttctgaaaatgttctttatgctatcggacatgaacctcaaacttgtctgatgaaactagttttggacaactgaatcaattcaccgatgaaaatacacaacgatgaaaccaaaaaaaatatattggacagtcagcctgtttctactacttttaagttgcatcgtttccgcctttttcatctttcagccggattacgatatgcaagcgatgaatgcgttgccgacgactatccgttttgagcgggacaccctgcaattaggaaccattcgctacggagagaaacggaaagtgactttccgtttcaccaacaccggtcagactcccctcctgctccgcgacgtccgtccatcatgcggatgtaccggggccgaatgggaaaaacgtccggttgccccaggagaaacaggtgaaattaaaatcaccttcgacccgaattccctgggtcattttctgaagaacatcgacattgtgtgtaatatagacagcggaataatgaaattaaaattgtgcggaaatgtaatcgaataactgcttcaagcacgtgataaaaattaacaatcagattacactccacaagtataatccgacgtttaacccgggagcaaaggacggagctgaccatcttcccaagccaaatcggtctccgtccccaccctccccctaaaaaagaaagagaggctgccatgtagaaaaatttatttatcattatcgcaaatagaaaagcaataaccaacaaaaaagaaaaaatatgaaaaaaaaattatttcaaataggcttcattctattacttgctatattagtaagtactggtatcaattttagtcttaaaaaaaatcaatcgaattttagcttaggagtagctaatattgaagctttggcaaccggtgagatagatgtaaatattgatttttcatttaaagaagcaaattatttttattgcagatgccgagatctggatggaggtagtgcaagatgtactggagctaacgccctctctttacgcagaaattgttataaaggatcaacaacggtgttatgtaaaaattggcaaagtaattgtgaatagtaaaatttgttagaaaggaaagtattcctttctaacttaaaaaaaaagtcatgaaaatattattttttacacttataacaataccatttctaattgcttgttcaaaaccagaatataaaaatgaacataaaataaactacaagactattaaaaatttatcttgtcaaaatctaaaagcaacaggaatattacaactagataccctaaaattagatgggaaagaatcttcaatggaaggggagtttttcatttataatgataaaattggattctcagacagaacccttagttctattctgttttacgataaccaaggacattatataacctcaaaattaagccaaggaagaggcccaaatgaagtgttaggaatcgaccaaataactcctattacaaacaacagatttttcataatggatgagcaatggaatttattccttttagactcttgttttagaaaaatcaatcaatatcggataaactggaattcacaaaaatcattaaaacaacttttaaaaaaccctcaacccgaagatactggattgtatgaggttgagtacacaaaaaacagacttcgccaatggggagaaaattatctattattcccagttagttcagacacaaaatatataaatggttatgaaggtaagaacactggattatattatagtgaaaatttaactatggctttattatccatagatagtggaaaagttgaaaaactaatttgcaactaccctctaatataccaaaaacaaaaaaatcttgttaatttcaagttttcattatttgacacctatgaaaaaagatttctctattcttatgaagcagattctcttatatattgtatgaatttaggcgatacaacaattacttcttttggaattgcaggaaaagacatgaatcaaaattataagcaatattttactttaaatgatgcttcacataatttttccaaggatagaaataaattcggttattatcactcaatagtaatagacccacatcatgatctagtctttagaacttatagaaaaggggaacattctccttatgatggattacaggtttaccaacaaaactgtttaattgcagattatcaaactcctaaaaatttcacattcctaggatacatatctccttggttttatgcttcaggtccattggattatgataacgagcaaatgattatttaccgtttcaatttaaatgatttatgaaatcaatttttttattcacaattcttctgtgtacattgggaaataatctcatttgttttgggtcgaatacaagtccaatatccataaacataagagtaatagattctcaaaagcaaaggcttcctggagtatatttattacaaaatagtacaaaatacttacttgagacaaccaatgaggacggtgagtgcataatcaatatagaaaattttaattctaaagattctgttcaattacaagcactaggctattattcagttcttatacctatttccgaacttttgcatgacacaacaattacacttcaagaaaaacaatatttattaaccgaagccaatgtaaaaggaattcatccaactaaaattttaaaaaaagcagctagttatctgaaatctcatccaacaggccatacatattctatatatggtagagggctgtatatgaaaattacagaatgtaaaaataaagcagtagaattacgaaaagaatatggttatttttttactaccggaaatacaaaagcgaaaggtaaatgggatttgaattacaaattttcattcgtacctgaatacacggccagaagttataatttagaacctaacggttctgatacactacatcatatcgcaataaatggttcagttataaactacgacgctggtgtccaaaaaatatttacattaattagagcaacattaaaattcggtcctttattctttcaaaattccagttacaattaccacttgatcgaatatgaaaatgaaaattacgttttttcttttcaaacaaaaaaagatgcatttccctccaatacacgtattttttgtaatgggacactcacaatttgtcaaggacgtttaaaaaaaatacagtttgataatattgaatacaatttaatattattgacaaatctaaaaagggcaaatcccccctttctcactcaagcagaaatcagcattgaatatgatgctaacaattatccttatatagcatcttgtttacaaaaaacaatatggaaacataacatgagtaataaatttgtcgccatcgaaaaaccgtcaagacgtaatcctgcgaaaaattgtttacaagaaaaagaagcatttgtatgtcaaacatacaaaccaataactttccataccaacaaacaattcgaaaatataataaaatatgcagcaataaatccatgtggcaaatacaattctgaaatatttcaacatctaccagaacctatcccaacgcaaaaagccattcaagaacttaattgctatatggacattgagcaacaattcaatgatcatagtagcaaaccctattatcctgaacaatatattttggaataccttcataatagtagtgatacacaatttttacaaaggattcaacacgcacaaaagaaaatttttaatttattaaacgataattgaatcatgaaattaaaatattttaaaatattccttttttttctttgtatttcatgtggttatacaaataaagaaatatctcaaatagtaaaagaatggcaaaataaagaaattatttttccatattcactccaatcaaaaatcatgggtaaagatactgcatgtaattatttactcaacaagaaatataaaattcttttatatgttgattccacagcatgtacagaatgtaaactccagttatacgaatggtataaattaattaaagaaagtcaaaaatataccgatagtttatcgtttatctttgttgtgcaaactcctaatcccaaaaaaattgatatcatatgtaaaaaaaataaattcgattaccctatattttatgacagcaaaaataatatcaataaaatcaacaattttccagagcaaatagaatatcaaacatttttacttaatcaagataatcgggtcttaattattggaaacccaataaaaaatgaaaaactttggaatctatatttaagaacaataaataattctgccaaataactattactagcctacataacaaagaaatgatcgtctttaccaagatactttttggaattggaatgaaaatttaataaaaaggtataaaatactggagcctgttgatttata

SEQ ID NO: 5817 - DNA, 48864 bp, Unknown
  gut microbiota DNA sequence
ataatatatgtatggtggtgatcaggtgtatataacccttggggaaaatatttttatttaccggttatcggattttatttgacaaaatgcagtcgatatctatgtgctttgtaaactttgtgaattttgtaaacttttgactatttaatcgtccgtttattttatgctaaatacttttataaaggaataatagcggattatcatcttctttggcattttgtatttgttttataacaggattatcggatgctattccggtgagtttacgttgtaatataggcatgtcgtaagagaaagcgacaatttcgttgtgtgtatcttcggtagcgatgctgttatgcaggacaattccaaggtttgtattggttatgccgtaggcgtgtacaatttgatgccgggttttgttataaacaaacaggcctattttattggtgttgaaaaagagattactgcgtatttcttttacatttatgatcgaaagcactttgtttcgggttgcaggtgcatgaggctcttcattcagttgagtcggattgtagctatatttcccgaaatccacggtaaccacaggttttatacggttgttgtcccagctgtaaatggtgtaatctccgttttgagtgaaatacaggtgttcgctctttaataaataactcccgcggcaacggaattccccccggtaagtgaatgctaaaggaatttttttcgcaaccgtaatccggtggtcttcttcattcagcagggataagtaatgtttgggttctaatacttttgaattgatagccagtatgttatctgttgttcgggttatttcagtatagaaagcttcgcttgttttttcccgaaggaagttaccgttgtaatcgtaatacaaaaatttatatggacgatcggccgtgacaattatttcccggtcggtttcatcgacggtaaaatcggtgataccgagccattcgcccggttcccttccatggggacggatatcggtaataaatttgcctcgacgggtgaatagcagtattttcttgtcttgtatgtcgaacaggaagattcgctccggggtaagtactattttatttatcatactaatcagagagcggtccgttgtttcgggaaatatgatctcgcaatctgcaaaccaggttgtgtcggtatatacatcttcggttaagtcagcctgtactaccgccggttgtattttttcccggcagcacaccaaggaaaaatatataccgataataagacctgttttcacaatacttgaatttagtttataaattttataataagatacctcttcctgaaaaaagggtgatgcatttttataaaaattttataacctgatgttcatttcgcttttcaggcaggtggactgactcatcagccaataccacaaaatgagcgattcttccgaatgtaattgtccccggatcaaccgataagctttagagatatgggttttgacggtattgaccgagatcgaaagttcgtcggcgatctcggtgtattttttttcttcgatagcactcagcatgaaaactttcaaacattggggcggtaactcctgcatgatggctttgatccgttcgatttcctgctcttcttcgaccgaatattcggaatggaggaggtattcgataaattcggtcaatttcgggttatgtttccggacaatggcctgtttttgcagatttttgagggcccggtggcggatgcaggtatagaagtaggcccggagtgaatctttcacctgcaatttgatccggttttcccaaaagtggatgaacatatcctgaaccacatcctcggccagtgaaccatcggccaataaaccctgggcataccggcacaagggatcgtaatacttctggaataatttctcaaaagccggatagttgtcttgtctgacagcttcataccattgaaggtctatatcggtaaccttattcatcgggacaaatatacgtatttttaatctatttaagaagcttgtcattttattattcttatgtaaacgaactatccgaattgtcttgcatacaataaacagataaaaagaacaactaacttaatcgattaatcaatatcttataagaaattattccgatgaaataatctagatttccatatactgatagatgtgatccgatatttgatactataaaacccttctaaaccttcctttaccaaatagcgttaacggaaaatgaagggttttatggcggaatagaaagaaaaaattatatctgtttttaaatagtttcagcggtttaaatggttacaaaggtttcagaagtcaggtttaaccgctataactaaaaaatggatttttttaaagattaatgctgtttttgggtaactgaactgaaaattataggcctggaactaatcgggaatgaaagtctataggcgttttcccggaaagccggaaaattgcgttttaattactacttttgtccacctaattcgaattgaatctatatatggctgatccgatcattatatataccgatggtgctgcaagtggaaatcccggtccgggagggttcggcgttgtattgaaagccggagtgtatcgcaaagaactgatggccggattccggaggacgaccaacaatcggatggaattgctggctgtcatcgtgggattggaagcactgaagcaacccgggtggcaggtggtcgtttattcggattcccggtatgtggtcgatgctgttgaaaaaggctgggtgttcggatgggagaagaaaggatttaaagataagaaaaacccggatttgtggaaacgctttctggctatataccggcaacatcaggtgaagttcgtctgggtaaaaggacatgccgatatccccgaaaacgaacgttgtgaccagttggctgttcaggcttctaaaatgcctaatctccagatcgattactattatgaagcggaacaggataataacttaaaacttttcatttaaacactgaaaaatatttcaatttttagtctaacgggtgattttattatatacatttgcagagaataaagtggtgttctacccgattgtttgaaactattataactcaatctgcaatgaaaaaaatattgattgtcggtgctggcgggcaaataggttctgaacttgtccctcatctgagatccatttatggaaataataatgttgtagctgctgatatcagtgctgaaaaatgtaaagttttggcggaagccggtccgttcgaagagctgaatgcgctggatggagagaaatatacggcaatagtcaaaaaatacggtatcgacacgatttttaatctggtggctttattgtcggctaccggagagaaaaatccggtgttggcctggaatatcaatatcggggcgctgacgaattctttaaatattgcgaaagataacgattgcgctgtgtttactccgagttctatcggtgctttcggtaaagatacgccgaaagataaaactcctcaggatacgttgcaacgttccaatactacgatttacggagtatgtaaggttacgggcgagttgctgagcgattactatttcaaccgtttcggtgtagatacccgtagcgtgcgtttcccgggattgatttcttatgtcacgcttccgggaggtggcaccaccgattatgctgtagaaatttattacgatgctatccgcagaggagctttcacctgtaatgtgaaagccggtacttatatggatatgatgtatatgcccgatgcgctcaatgcagtggtacagttgatggaagccgatccttcccgtttaaaacaccgcaatagcttcaatattgccgctatgagtttcgaacccgggcaaattgctgccgagatccgtaaacacttacctgattttaagatggattatcagatcgatccggtaaaacaagctattgccgatagctggcctaacagtatggacgattcttgtgcccgggaagaatggggctggaagccggaatacaaccttcagaatatgacggtcgatatgctggttaaagtgaaagaaaaattcgataagggattgattaaataagggatttataaaaacgacgagcggcctctttccggggccgcttttttgtttcgttagctccggtaaaacaaaataacggccttggccgggaggaaaattataattcattgcccggatttttgtataatcaatcgaaaaaaacactaaattagggcactaaaataagaggtatgggcaaaaataaaaagaaaagcaagccgaccatgagtaagccggagttgagtaaacgccttttggcactgatgagtaatcacccgggtgagagttataattataagcagttggcgatgcgattgcaggtgaagagtatggatatgaaacgccagatctcggaagtgttgcgggaattaggagaaaaaggagagttggaagagatttcgacaggaagatataaaatgcggcagagaggggcttatattaccggtgaagtcgagttgacagccaaaggttcggcctatatcatttcaaacgagagtaaagaggatgtgtttgttgcttttcctaacctcaaacacgccctgaacggagataaagtgaaggttttggtatatgcccggagtcgtgaccgccgccccgaaggagaggtggtcgagatcctggaacggaagaaaggtacttttgtcggcgtagtacaacggtcggcgaattacgctttcctgataccgaccggtaagcagttgccctatgatgtgttcatcccgacggaacatttgaatggagccgaaaacggggataaagtggtggtaaaaatcaaagattggcctgaaagtcagaagaatcctgtgggagaagtgatcgaggtgttggggcgtcccggggataacgatacggaaatgaatgcgattatggccgaatatgaattgccggtgaagttcccgcccaatgtgttgaaagcggctgaaaagatccctttggatatccctgaagaggagatccgcaagcgccgcgactgccgcgaattgactactttcactatcgacccgaaagatgcgaaagatttcgacgatgccctttctgtccgtacgttgaaggaaggcgtgtatgaagtcggtgtgcatatcgccgatgtcagttattatgtcaaagaaaatacggtgctcgataaagaggcttatgcgagggctacctcggtatatcttgtcgaccggaccattccgatgttaccggaacgcttgagtaacggggtttgttcgttaagacccgatgaagataagttgtgtttttctgctatttttaaattggacgctaacgcacaggttttggaccaatggttcgggcgtacggtgatccgttcgaatcgccggtttacttacgaagaagctcaggagcggatcgaaggtgccgaaggggattaccgggaggaaattctgctgttgaaccggttggctcaaaaattacgtcaggatcgctttaaagccggagcgatcgatttcgaccgggtagaggtgaaattcaacctggatgaaaagggacatccggtgagtgtgtatttcaagcgttcgaaggaagccaataagctgatcgaagagtttatgttgcttgcgaataagaaagtggccgaacggatcggtaaacccaagagtggaaaaaaagcacctactttcgtataccgtattcacgaaaacccgctgcctgaaaagttggaagaattcaaccgttttgtggctaaattcgggtatggattgaaaacaggtagccgcaaagcccttacttcttcgatgaataacctgatggccgaagtaaaagacaaacccgaacaaaatatgatcgaaaccctggcggtacggacgatggctaaggctgcctattcgaccgataatatcggacattatggtctggctttcgattattatacccatttcacttcaccgatccggcgttatccggatgtgatggtgcatcggttgctgcaacgttatctggacagtggacgctcggtcaataaagaaaaatacgaagaatattgtaagcattcgtccgatatggaacaggtggcggctaatgccgaacgttcgtctatcaagtacaagcaggtggaatttatggcggataaaatcggacaagatttcgaaggtacgatttcgggtgtcacacaatggggattttatgtcgaactggaagattcgaaatgtgagggattggtgtcgatgaccgaattggatgacgatttttatgaattcgatgagaaaaattattgcattgtcggacgtcatcaccataagatctatcaactgggagaccgggtgacgatcaaagtggctaaagcgaatctggtggctcgccaattggactatgagttggttaagggagcagacgaagaaggggtgatcaggcctttgggaaagagccgggaagacatcggccggaaatcgaaaacgaaaggcaggaaaaaggaaaataaaccgaaaggaaaaaaaagaaaatagggatgtaaaaacttgataagctatgtattcatttacaatttgtttgctgattctggtcgtcggctactttgtatatggccgttatgtagagcgggtattcgggccggaggcgaaaaggccgactccggcattgacaaaagccgacggagtggattatatccccttgccgacctggaagatctttatgattcagtttttgaatattgccggtttgggaccgattttcggtgctatcatgggggctaagttcgggacggcttcttatttatggattgtcttggggagtgtgctggcgggggctacgcacgattatttttcggggatgttgtcgatccggcatggaggtgaaagtttgcctgagattatcggacgttatctggggatgaccaccaagcaggtgatgcgtggttttacagtaatcctgatggtgttggtgggagcggttttcgttgccgggcctgccggtttgctggctaagctgacacccgatgctttggacacctctttttggatagtcgtcgttttcctttattatattttggcaaccctgttacccgtagataagattatcggaaagatttatcccatttttgctattgctttgttgtttatggctgtcgggattttagtcatgctgtacgtcaatcatccggttttaccggagttgtgggacggcttacaaaatacccatccgaatgcggcgaatctgcccgttttcccgattatgttcgtgagtatcgcctgtggggctatttccggttttcatgccacacagtcgccgatgatggcccgttgtatgaagagtgagaaatacggacgtcccgttttttatggggcaatgatcacggaaggtatcgtggctctgatttgggcggctgcggctacttatttttatcatgagaacggtatggccgaaaacaatgcttccgtcattgtagatgccattacgaaaagttggttgggatcggtgggaggtattctggcgattttgggtgtgatagctgctccgattacttccggcgatacggctttccggtcggcccgtctgattgtagcggactttatgggcatggaacagaaaagtatccgccgccgtttgtatatttgtgtcccgatgtttctggctgctataggattgttattgtatagcctccgggatgctgcgggattcgatatgatctggcggtactttgcctggtcgaatcagaccctctccgtctttaccctttgggccattacggtttatctggtacagacgggtaaaaactattggattactttgattcctgctttgtttatgacctgtgtgtgttcgacctatctgtgtatcgctcccgaaggtttcggattgactcagatcgtatcttattatatcgggttgttctgtgttctgatcgctgtcgtttggtttgctgtatggaaaagcaaaacccctcagtctcccggtgatttagtctcccgataactcagcaactcagcaactcaataactcagcaactcagcaactcaataactcagcaactcagcaactcaataactcagcaactcaataactcagcaactcaataactcagcaacccaataactcagcaacccaataactcaataaccaatgtcaaagaaaaaacagattatcttttcatcactactgggaatcgtgttgttagtagtgatttttatgcccaagaaagagactactgaaccgttggatgagatcgaagtgacggattcgcttgaagtgaaggagattacttataaatatggtatacccatcgatgattacgatgtggattatggtattgtcaaaaggaatcaaagtctttctacgatattgcagaaacatggcttatcggtgggagaagtgcatcggctggtagaaaaatccaaagatgtcttcgatgtacgtaagatcaggagcgatcaggcttatgcggtatttaccaccagggacagtataccggagacctgttattttgtgtatgaaatcgatcccaaatcttatgtcgtttttgatttgcggggagattaccgggtgacgatgggggaaaatccggtcgaatggcgcaggaatgagttgcatggtgttgttgagtcttctttgtggctggccatgtcgaaatacaatgccgatccgcaattggccgtcgtattatcgaatattttcgggtggaccatcgactttttcggtcttcaaaaacaggatgagttccgcgtgatttatgagcaggaatatgtcgatgggaagagtttgcttaattttaatgtattgggggctgctttccggcatggtgacagtacttattatgccataccgttcgaactgaacggagaaaaattatattacgacagagcaggaaagagtttggagggggcctttttgaaagctcctttggattttttcaggatttcttcccgtttctcgaacagccgtttccaccctgtgttgaagcgttaccgggctcatcacggtgtagattatgctgcgccgacgggtactccggtgtatgccatcgggaaaggccgggttattgcaaaaggttatcaggccaagggaggtggaaattacgtcaaaatcagacacaatagtatttatacgacgacctatatgcatttgtcccgattcgaaaagggaatcaaagtaggggtagatgttgcccagaagcaggtcatcggatatgtcggggctaccggtctggccacaggcccgcatttggatttcagggtatatgaaaacggtaagccgatcaatccgctgacgatcaaatcgcaacctcagaaaacattgaaagacggagatttgaatcggtatgaggtcgtcagggattcggttatccgcatgttgactcttattccggatgtccggcaggaaaatacagaaatacctgtcgatacaaccgtttttgaagataatgaatcaatataatttgctgcgttttaacaggtaggggaataatacttcgtggaattcccggtcgatgtcggcttcgacaaagtcgatccggagttgtccgcaacgtagttttagttcctggtaaaattcggccattttctgcttataagtctcccggatttcatttggagaaaatttgatttcccggccgctttccagatcgataaagagatgggggcggttcgaaaattcgaatgcttcttccatccgtttgtctttgacgtgaaagaggatcacctcgtgtttattatagcagaggtgttggagagctgaaaagagttcttccgtatctccgttcgaaaacatatcggtgaaaataacgaccagcgctcttttttgtatggtatccgccagttggtggagcacctgggctgtcgatgtgggtttgttcagggaaaccgaatgattttgcagaatctcctgaaggtgggcgtacatcgtctgtatgtgggtgctgttcgattttgcatccgtcaacacttcgatccggtccgagaacagacataatcccgaagcatcccgttgtttccggagcaggtgaatcaaggctgctgcacaataaaccgaaaaccggagcttagagactttcgccgacggataaggaaacaacatcgaagaagaagtatccagcaccagatacgaccgtaaattcgtctcttcttcgaattgtttgacgaataacttctctgtccgggcataaagcttccagtcgacgtgtttggtcgattctccggtattgtatacccggtgttcggcaaattctacagaaaaaccatgataaggactccggtgcaaaccggtgataaaaccagcaacaatctgagaagcaatgaattcgagattatcgaattgttcatagcggataatatcttcgagcttgttcatggctataaacctgaaaagataaagaaaaggctttagagcaacgattaaaaaaattgagaatcggatttttcgattctcaattttcaattatttaaagaagtttgttgattttctcgaccagtgaattcttaggtactgcacctacttgtttatcagcaactttaccgtctttaaagaacaggatagtcgggatgttacggataccgaatttagctgctgtgcttgggctgccgtcgacgtcaaccttagcaacggtaatttttcctgcaaattcttcagagatttcttcaacaatgggaagcatcattttacatggtccacaccattctgcccagaaatcgaccaggacaggttgtgctgatttcagtacaacctcttcaaaattagaatcattaactgctattgccatagtatttatcttttaaaagttggtatttccattttgctccgctaagttacaacaattttattgtatacgaagtattcatcttataatagaacgttaaaatttatcctagttgatcttcattttgatcgaatcgttgttttcgaaatattcgtacaattcccgggaacgcctgatcttacaagtgcgggagaacattttgacactgtttccctgacggtcgaacagcatgaaattcagaggaatatcgttttgtgccgttaccggttcttcaaaattctccggatcgctgttcttctgtgtcttttgttcggccgctttctgctgggcttctttataactctcgctgttcacatcggttgtaaagagctcgtgtatttcagtgaccgtttccagggtcagtttttcaatatcgacctgtaaagtgatcgaacggattgcattttcggtcagtgcttccaataagcccactttttgaatggtgaaagtaagctcgtttccttctttaccccatttgggccctactttccctttcacatagatcgccgtctcgtcgataaagtattgccggaaatcggtataatcttttccgaagaaagccagttcgtaagtgccgctgaaatcctccagggtcaggataccgaagtctttcccggttttggttttaccttcccgtttggcggtaatgataccggcgatattgatttctttgcctttaaaagtttcaaggccgctgttgagttcttctaccggcgtgcaaagcaactgcatttccagtttataaggatcgaggggatgggaggtcaggtaaataccgatcagctctttttcttttttcgatttctcatagtcgtgccagggttcgcagtcggggatattcggtttggtgacttcgaagccgtccagttcgccgaatagggtggcttgcaggttcatggaatcctgctggtttttctggccgtagttcaccaggttatccagtactgtggtcgttgcgtctaccaggtgcaggtattgggcccggtggtatccgaaactgtccagtccgccggcagtaaccaggttttcgattgttttcttattgaccgatttatagtcgattcgttcgaagaaatcgtatacatctttataaggtccgtttttctcccgttcttcgatgattttttctacggcagcttcacccactcccttgatggcggccattccgaaacggatctggccatgtgagtttacggtaaagtcattgtaagattcgttgacatccggcgccagtacactcaaccccattcgcttacattcgtccatgaaaaccgttactttggtgatgtccgagaggttgttgcttaagttggctgccatgaattctgccggataatgggctttcaggaaaccggtttgataagcgatgtaggcgtaacaaacggaatgcgatttgttgaaggcataagaagcgaaagcctcccagtctccccagattttgttgaccagttcttcgacattttttcctttttctttggctccctggacaaaatcgggattgtttttacaaccttcgacgaatttgcctttcaattccgccagcaattcgaacttctttttacccatagctttacggagggtatccgattgtccccgggtgaacagtcccagggcccgggattggagcatcacctgttcctggtagacggtaatgccgtaagtgtctttcaggtagggctccatcatcggatggtcgtattcaatgggttcttcgccgtgtttgcgccggatgaaggaagggatatactccataggtcccggacgatacagggcgttcatggctaccaggtcctcgaaacggttgggctggagggcgcggaggtgttttttcattccgggcgactcgaactggaacagcccggtggtatctccgcgggtgaaaagcttgaaggtttcttcgtcgtccaggggaatttcgttttcattcaggacgatatgtttcgattttttgatattgtcgagacaagtcttgatgatcgagagggtacgtaaacccagaaagtccattttgatcagcccgatcggttccacgaaatgcccgtcgtattgggtagtcatcagactttctccttcggtaggcatgatcgggatatgatcggtgagcggatcccggctgatgaggataccacaggcatgtactccggtttgacggatagaaccttcgagggtctcggcaaattgtatcgttttggaaatcagtggattaagagattgcttctctttctcgagatccgggttttccttataagcttttttcagagtcattttcggagcttccggaaccattttagccagccggttggcttccgataattccagtttcaatacccgggctacgtctttaatagccattttggcggccatactgccgaaggttacgatgtgcgacactttgtcggctccgtatttctccgttacccactccagtacctgttgccgtcccgcatcatcgaaatccacatcgatatcgggcagggaaatacggtcgggattcagaaaacgctcgaacagcagatcatattttatagggtcgatattcgtgatacccaggcaataggcgacggcactaccggcagccgatccacgtcccggtcctacaattacgcccatatcccgggcagcccggataaagtcctgcacgatcaggaagtaacccgggaaacccatggtcttcatgatatgcagctcgaagataatgcgttccatgatctcgggagacggattttcgccatagcgtttcacaacccctttcatggtcagttctttcagatagtcggcttccagtttgatacggtataaacggtcgtatcctcccagttttttgatttttttgttggcttcttcttcggtgagtacgacatttcctttctcgtcgcgggtgaattcgttgaagaggtcttcctgggaaaatttttgccggtattcttcttccgtaccgagttcggggggaatagggaaaacgggcatcaaaggatcggaatccagttcgtattcctcgactttatcggtgatctcttgagtgttttcgatggcttcgggcagatcggggaaaaggtcgatcatttcctgggtggttttaaaccattcctgacgggtataccgcatccgggtcggatcgtcgatgtctttccgggtgttcaggcagatcagcagatcatgggcttcggcatcttcttcattgagaaaatgtacgtcgttggtagcgataagtttgatattcagttttctggctattttgattttctcctgaatacagcgttgctgattgtcgtaaatctcggctctttgtttgggatccgctgccggatggcgcatcacttccaggtaataatcttcgccgaacagatttttgtaccatagagctgctttttcagctccttccagatcaccggccatgattttctgatcgatttctcctcccaggcaagccgaggaaatgatcaatccctcatgatgtttttcgagctgggttttatcgatacggggacggtagtagaaaccgtcgcaaaaagccgtcgaacagagcttgacgagattgaggtaaccggtgaggtttttggccagaataatcaggtgttcccccgaccggtcgatcggtttttctttattatataaggatacccgtgcgacataggcttcacaccctaaaatgggtttgatccctttttgccggcaggtgtcgtaaaacaactttatcccgaacatattgccgtggtcggtcagtgctagtgcggtctgaccgtcggctttggctttggcgattaaaccggggatactggctgctccgtcgagaatagaatattgcgagtggacgtgaaagtgggtaaatttcatggtttgttgcatgctgaattcacaaacaaaaatacaatatcttgcggaattacggaaacaactccccggaatttcccgcttccccgctttaaaatgcaacacctgcctctcctcagcccaggtacatccatctctttacattgacatgaaaactggtgtttttttgccaaatgacaaaaaatccgctcaaatgcaggagtaagctatagtttctttgtttgcgagaaaattttgcaaccgttttagataagaatttcagccctttttttaatcatttccttttgaagagaaccgaagcattttcagaggaatatttcatatcgggtatggcattgtatagtttataggcttgggtaaagctttccatagtccccgctattattctttctgttacatcactatcgaattgtgataaatagtcttcatcggacaataccttttgagaacactacctatattggaggttactatcgcgaatgctgcagaggttgtgtctcctgcttccgccaaacaggcgtgtatttcagtttggatttataatagatttccttctgtatctttaaggagatcgatcacattaataattgatatgccatctgtattcacatgtgaaggggtcaaccctcccacaatgactattttaggaatccgtctttgatatgacgaagggaattggtttcctggtcaattttttcttgagtgggcatatcaagtactgattgtatgtacacacgtttgttcccgctattgcaaatgaaatccatttccagtagttttcgtattttctttccatcatcatttattattctcaccttcacttgccctacatcaacagaataccctctgatacgcaattcgttatatataatattttccataagatgaccaccttcaatttggcggtaattcagatgggcattacgtagtcctatatcttcaaaatactattttgaaggtgtgttgatgtaatgttttcctttaatgtcatatcgaatggctttttccaacataaacgcatcttgtaacatttccaagataactctgtatggttgtatctgaaatactatggccttttacggatttgaatgtattttcaaggtttgtcggattggtcaggcagccgatattggaagcaatgatatctataagttcacttaaatcatcatcatttctaatgctgtaacgctcttttatatcgcgtatataagtcccttgaaacaatgatttgagataattttctttttctttgaaaaagatacaacctgtggcattcctccataaatcatataatcttgtagtgcagaaagttcatttgcgtactgtcctgccttgagaaattccgaaaagcttaggggatggactctgatttcataccctctaccacgaaattcagtttttacatcactggataacattcggctattgctaccggtcacatatacatctgcatttttaattttcagatagctgttgagtgcgttttcaaattcaggaacaagttgaatttcatccaatagtatgtaatacataccgttatctgtgatatgcccatcaatgtaatccaataatatgtccggatctctgaggtgtttactacgttggttttccaaatcaacttgaataatatgttcttcgttcgcaccgctttcaagtaatgattgtttgaataattcaaatagaagataagattttccacaacggcgtataccggtaacaatcttaatcattccgttgtgcatcacacttctcagttcctgcaaatatttgtttcttggtataagcatgttaaaaaaatagtgaaaattatcagtaacgcggttttttattggagaaaaatgggacttttcccatttttctccaatagaagcggccgaactttttgattttgcataacaaaggatgtaaattgaccttgttcattttaaaagcaacggctcatgatgtttcatatactgctatagtgcttgttcccatattcctctataaaaatccgtcataatctccgtttcctttgcaaagtcttcttgaaaagataactcggagggaggataccttccacgttccagcctccggttttcgggcaaaaaattaccgcagggcatttttcacccgaaaaaacgctccggtatcgccgtccgggttgatgtaaaggccgggacttctgacaagagtactttcaacttctgtttgaagccgttgttgggggaaattacatccaacagataagccacacaacataattgagcatatagtttttcctgtgctatagctttgttttgaatccaaggattttgtagcttcttaggtagttgtggcttctatggatatttcctgttccatatacatgcatgatatgctatgcagttacgcaatacagacggttttttatccaactttcaagatataagtgctgtggtaaaccaagttctcttgcaatctgctttttaaggttgttatctgataaattgcagtatagctttgagagcattccgaaagatgacacttccaaagttttctatgcaggtggatatggcgggttatcgtacttgacaaaatgttcaatcaaaaaatcttcttttgagcgtttcaattcatcatcgctattggagaggcatttagaaaagattgttgtgtcagggaaccatgattcatcagcagacccaaatgcaccacagttagatgatatatctggataactttaggccgcagggatctcaatgctttgaatggctgaaaaaatgtgagtgcgcaattctttgtcaaaattgtacaaggttactacgttctcaaacttatttttgggcttaaatacatagttcactttgtcgctttccataggtttccaataattagccaaacggaaataactgatgatttttaagtattcaatcgtcgcttgctcatcgtcaaacagaagtctcctgtttttcaacattgacatttgaacggcaatacttgtgggctgcttagtgtatgttgccataggtgtataaaaaataagttccgccttgatatgcattgtaaagaggcgtggcggaaattgttaatatgaaggtcatgtttttctgctatactgcaaacatttcgatatttttctgtcaaaacaaaaaaacagtacctttgctatgcttatgcgatgagcccaaaatagaagtggaatatctgaagcaaattgcattgaaaaagatgaaactgcttaagttgatttcccgaatgagttaagaagggatattcagtaaatgtccctaagtatgaattagttggctgatttgtgctatttactgaagtccctctgtactagctatgttgtgaaacagtgtccgtagatttggtcgatccgcatgcaaaaagtttattcgttacggtaataatgtctttttatagctatatattgccaaaaacaagttatggattactttttatggcagaatctaatttattagccaattcaataatatcctcttttcttgccaatacatttagccattcttcaggaatagaatcatgcccataaataattcctgccaatgctcctgtgattgctcctactgtgtctgcatcatatcctaagtttactgcacacaaaacgctgtctttgaaatcattattgttgaaaatactccaaaaactggcttcgagcgtatcaatcacatatcctgttgattttatatcattctctgctatattcctgaattgttcgtaagtcagattaaccagtctgtcaaaatgactgcattcattcttaaacttttcttgagttaacagatacttgatttctttttgagtatatgcaaatgcagttgggatttctttggtcgctaaatactgtattgcaaatttgcaaagaaatatacaagctaaaatacttctgggatgtctgtgggtcaatgaagaaacttctgaaatgatttgtatctgttgttcttccactaatccgtagatgtatggaataagcggagctattctcatgagggaaccgttaccattatccttctctccgttaagaccggcaaatttaggttctattctgttccttagattactaatagcctgcattgttgttatgccaatatcgaaggctttattattaggtgtccaaagtccctcaaacaaccattctataaatttgctggctatatctcgtaaattgtagccggaacataaggaatcagctaagcagagagataatgaagtatcgtcagaccatatacccgaaggtgattcaaatgtcctgcactttcccatgccaataacaggatctttttgcactgtttctctgggaatgaattgtacaggaaaacctaaagcatcccctatggcggttcctaatagaatatcttttgctaattgttggtttattattctatcgtgttttctgtatagaggttgaaaagtttgtgtctttttttcatcctcttttttctttgaaaagtgtttaagcagattttttagcatggtataatgtcgttggattattttatctttaatttctaaatttcttatacaattctttatcaggaccaaaaatcaaaccgttaagtaattcgtaatcgccaacattttcagtataatcagaaagtacgtcgcaatgttcccggatatattccatcgtctttgccggagggttttcccttgcaactctgctaaacagcctccaacaagtcttggctgccctttcagtatcggtaaatgtcttaaatgctttctgtttcatgtattcaaatttctctaccgcattgtcatacaaatcggtctggtattggctataaaacgggtaattaacccaacaaccatcataataccttgtcagataccagcgaggacctattgaattttgcaattctttagcgtatgtaagcatacactccgcccgatcattcggatttttcgacgtttttattttctgctctaaagcatacatttttttggcaaagttcaacttgtaatctttcggttccggtttataatatggatatacattggttgtttgcataaactcgtccgatacttgactcaagtaatgaatggcctctttatatctcatcgccgccaatagttgggtaccgatgatttcatagaaatattccatattgacataactgcgctcattcaagaagcggtcaaaatagcataacggattttgcatgcggacaaccaatcgctcgatatgctgtactccaagcgaatcaagattgatgaagaaatcattgctgtaatcataatcattaataccacccacccccggtctaaaaagtgcctttgactctgaacaataaattcttcgagaatttccccaatctactatagtagcaggataactccagaacttccctacaagattcaacacccgattgtctgccatattcagtaattgcaatgcccgcgtttggtaaccggaagcaatgcatttaggaaccacttgtgaaatgactattttacgcatcatatcaccccaataatatgaactacgattacaaatgtagtcctctatgtcgctataatacacagaatccaaatttatgacaatcttttggtccagccaactcaattcattataaaggtaattctcgaaatcggcatcgtattttacagcagattttgctttcagataaatgtcaaatacacggatagcatcttttaaatcttgtccggcaggcaattcccttgcttgtcggatatattccaacgcttgcaccgtatcacgcaatttatcggacagaaaagaagccgtataataccagacagcaagatttttcgctttcccttcgtccaatacattaagggtgaaatcgtataatgttttcagattctttttaaaatgatcgttcttttctgtatagaaacgattgaatctatatctctctctatacatctctatatcataatgtattatattctgcatcaaatgaaacagccttttatcgttcggctccctttggtacaggataggtagcatatcatagctgtcataagtttttccttctttgttcatacagaaaacgtatgagacgatatctccggtttctgtaaacatccttttcgcttttgttatctcaccgatatgataatatgcccctgccgcataatttttagccatttcctctatcacacctttgtgaaagaaattcttccgctccaaccaaatgttcagacattcattatattggcgcaaggaaataagcgcacgcatcatttgaagcgtataacggtcaaacaagcgtttccccttgtactccttggctttttccacaatttccgtcaaaagggtgttctcttcatctccctgtacggggtagtaccaggcggaacattgtttggcccgggtctgttcacattgctttgccagaagcagaaaagacgttatttccgtatctttttcccgaatcaaccagtcggcaaaagcattgtcatttttctctttaccagccaccgcatcggcatgtaatttctccaaccggtcgtattcccaatggtacacgacttgttgaatgtcttccaatggaatatcagtcgaagtgatttttgcccaactacggcaattgtccattaggggattttcccgccaggagcggctatttcttatacctgttcctgacatatcttccccacagatacgaaatgtaaaatactcttccgccgtatataacctgtcacgagggccacaagccaaagaaagacgacatgccggaatcaggacgataagaattgaaaaaagatatctcatggaatgggggtatatatttggttaatttctttttcttcaaacattgatagattcaatgaatcgagatggtaaagaatcgtattgccggattctgatgccattttagatgcaatgagccgtttgacacgcataatttcgctgaatgtggaattttccagacggatgatattccctttacggatatgatggttttccaaataatgctcttgcaaaaccaaataatttccaccggtcatctttttataccgcagtgtatccgagaaattcacctcgtgcagaattaccctaaaattcctttcttccgtcaaaattccccacgcataggtcgggtatgcaaaatcgagaggcaattcgtatgttatgtcggatttcagataggcttccacatctttgtagttgaggatggaattttccgtttccggattgtaaatcgaccccgtattgtatagcatcaaaactcccttatccaccggagggacttttttcttcaactgatgcaaccgtatggtggcgctgagcgataaatgatttgcatacaatgtgtcccgtagtctttggcaaaacccgaaaaacgaatcctgggtacttgccgtccagtcgcaatccacctggatttcctttacgttccgaatctgatgacgcattagcatggcatgtattctcttgtacatcaattctgcaaaatcagagtcatgtctgattgcttttgtggtgatataaaccgtgggtacgatttctattccggccggaatcgtgtcttgaaacaaggtcgtggcaatgggaatgacttccaactttccgtccgcattttctacacggtctacatcaaacatccgcagatagattttccggatgtggtgcttttgtaaaaattgcctgtcatgttccgtcaggcgaaagacggttttccaataataaatggcatttttcgctccttgcagggaatcagagtcagttatcacaccaaccgaagtatctgttttactttggggcgtttcaatactttccgtgccggaagaatccgcctttttttgtctgacgcatccgcagagcatcccaaaaacgataattaaaatagaactatatttcatattcagtcataatcttaagaacaagtcttgattattacattttatggttgtgttattgattccaatacttctttagcttgtatacacccttgttccgctgctttttgaaactattccacggctttagttttattcatcgccactccatcaccctcatagtaacaaactcctaagctgccttgggcttgtgcatatccttgttccgcttttgctttgtaggctttaaaagtttgagcatttgttatcatattgcctacgagaattatcggtaggataatcagtttggtcagtgctttaagtattgtattcatatcatttattaagttcacgaatattatgtttcgccatttcgttgtgtggatctatttttagagcgtcttgataatcttgcaatgctaaattccaaagtttcaattgactatattcattcccacgatttacataagcatctgccatgaaaggatctaattgaatgcaattggaataagcttgtatcgcatcattatgacgtagcattttagataatataactcctttcccaaaatataattgcgcattagctggtcctttggcaatagcattttcatacattaaaagagcctcttgaataaaaccgagtgtaaaagccctattccctatccccatatacccctctattgtaaaaccattaggtaaagaataatcacctaatttctgtaagaccatttttatctgtaaaggattgcattttgctatctcaaaatctctttcagacaaaagagtttgaccaagttctttgtaacaacaagccctcactgtaaaaaacttaggcaacaacgcatccttttgaaatgcataacttatcaattcattgcaatctttcaaagcatcttcatacaattccatgcgagcctttacccaagatataccgtccatacattttaaccaatgcaatttatcatctttttcttctttggaaatgtatgattttgctttttgataagcttccaaagctttttcatatgtgttaaaatgcagataaatattggctttatgaatgtataattccctaattcgctccacagataatatgtcatttaaagaaaaaacatcattctgcctctctatgaattctgtaatcttctctaaaatctgcaatacttcatgtaaaaaatggatatcagtattgcgatatacggttaattgaagttcatgttggctgaattcatgtaacagagctaaaatatcaaatttttgtaaagtgttcttttccataatcaattccttttgacacataacactttaaatttctttgtcacttgcattcatatactcgttaaacggttttaaacgtaataatcggtctatggacatgatggaacggtcgtaatataattgttttcacattcttcctgcatcacggtcgccatgtgcttctgcttttttcaaccaatcaatagccattattgtatcagcttgaactcctctccctttataataacattctcctaaatgaaacatggataaagaattaccatttttggcacttttttcaaaccaatatactgctttttcttcatcttgtttgactcctgtaccgtcaagatagtattctccgataatgttttgagcttctgcatcaccttgcaaagctgcttgttcatgccaataaaaacttttttcattttggtgcatgttgtgataatacgcacctaaagaatattgggcatcaacatttccttgttcggcacttagtgtgtaccattctacggcacgttcgtaattgttgcgctcccaccaaaaacctcccaattcaaattgcgcgtcacggtctccttgttgtgctgctgcgcataattcttcaaatgtcatagttgtataatttattggtttagtattctggaatataaccccatgttgtgtacatcataccttctattacattagttatatcttgtaaatcagtaacatagtgtttgattctgtcataccaatactgcgcttgcgcgatattttgaggtacaccacgccctttttcataacgacgtgcaagaagaaattgtgcgaaaatagcacctttttctgcgcagtatgttaagatttgaacgacatcagcatctgttcgtaattcacgtgttattgttcccatagtaattcgtgttatgaaaatatttaaccctatgggacgccatgcattatcagagcccgcttctacagccctgaaataccacaacattccttctttaacatcatcttttacctctaaataataggctcctaatttttctgtcgcagggaaaaaaccgcaccgggcaccacgctcgtaataatatatacttttttcatgattttgcgtaactatattgctgtcctcgtaacattgccctaaaatataagaggctgtacattcatccgcttctgctcgctcatgtaactcttccaaaatcttttgtttctcatcctctgacgtgacattatttatagctatattgacaaaaaatatatcttccatgcttccggtctgagaaacactctccagcataaagtgtattccgacctgaaaataatgcttctgtattaacaaccgccccaattgtgcttgggcacctgcattaccttgctctgctgcatgcgttaattcatcaaatgtcataatcgtaaaaattaaagtttatattcgatatcaacattcttgtcaaacatatgtaaagtgattttttgaatcaccccactaggatgatatattgttaatccataattggaaaaaggaatttgaacaccgataagcggatgcgtatatattccccacccccgcatagttgtttcatcggaagcagaagaaacaatcttcatcggcttagtagacatagaaaccctatccgctctcaacacatcgctttcttccgtatcatagatagtaacggaagaaccttcatttccggaaatactgtcctgtatccgaatggcacgtttagcagccccaccgccaacttctacaccacactcaaagcggtaatgatgcccgctataaaaaactaaatcgtgaaagtccataatttattcaaaattaaaagtgtgaacgaatttcgtctaacaagtttttaacattttcaatttctttattcaaagactcacctgcacccaacaaagccccaattccaccgtacttctcgtcgtagtgtgcaaatgattccttttctgcctccaacatacgtaatatcgacaaacaatctttttccgctttattataatggtgcaacaaataattggttttcattctgagaatcaacattttctttgcatcctttttgaacatctgttcctgcggatatgattcaattagtttgataatcgcatccaagaactcagcaacattatttaattcgttttctgtatgttcccttaatgatttacctttcaattttatcattaatatcatgcacatttcattatattcggatttctcttgttccgaaggagttttcacccaatgccaatcacctaaaacttgagtactcattgctttaattttacttgtttattttatatttattcccaataattcttccatttcattcaccaattccttgtaattttgttcaaaacacatggaccgccaatgctctgccctttcagggttcggttccgttccgataccattttgatagcatcgggcaaggtagtattgtgctgccagacttgcattctctcctaatgacgcttccttcaaatattgaaaagcggtttccttattttcttccacacctactccataataatagcacatacctaacaaatactttgcttcctttattatttccggtttcgcatacataatcttttttggcgattttatcccttcgattacccgttccaaacacacaatcgcttcttgtcctttttgcattttcaacaggcatttcccttgccataaatatcctgtttttgaaataggtcctaagtcattgcttgcgcatttgaaatattttaaagcctctttcaaattttgagaagttccgattccataataatagcactgtccggcttgtagtgaggctgaggcgctcttgctggcaatctcttcgaaatagtccaaggctttgcccgggtcttttgtacatcccttaccatcaagcagacggcaggcatagacataccaagcatgcatatatatgtaataatcgccatacggatgattttggacatattcctccaactccgcaatatccatcttttcaaagtttaccgattcgctcataattgagtggatttatttatattgtttcaaggcagtcagggttgagacaatatctttgctatagcattctcttactatttttcgaagttctattatttcgaaagtgctttcatttacagattttcctccggttacatataattcatagtaatccatgatgaaatcatcaatgtttgcatattcagccggcgaattaggaaaatccttatttgtacctctaatgctttgattttgctttatattgaccagattgtttgtaccttttacataccccttcaatgagagtgaaagtaggatatcataacaataataaggtatatccattgtttgtaatctatacaatgtaggaattagtgattcacaaattatttttaactcatttgaaaattctcctttttttgcttgttctgcaattttctcccctttagattgtattattgttttttctctttctctttcactttctctttttttaattagctggatacgtttttcgtatgctgtatacatataatcttctattgcaatatcagaaaaccaataaaggtctatatcccctaaatactcgtttcttgctttaattgctgcttgaatcaattccagtctgtgtgcattatattctttaggaatctctgctttcagaatctctaaatatttttccgcccgaaccatatttaacatttccttttgttctaatctctcgttcaaattttcgatagcttttaaagatttttccataatagcagatcttgcagaatacatatcttgcatttcattgcgcttgaagttggagtttgatttatcaattcgattttcaatactttttaaaacatctgatactgagcgccgatgttcaatttcaagttgaatttcatgtacttgtgcatataggatactatgaacaataagccctgtaattaataagataatttttttcataattttaatttgttcctcagattcccggacgaggcaggtttataaaatgcaagaagcgtgggaactttcagtttatctgatagaggtatcgccaaacacctggtagaaataaacagtcaccccacgcccaaccgatatatggtaagaactacctatatggcaagcatgaacgtttgtactgctatccttctactaaaattttggcgaattttctatcaaggataagctaaacgcttcatttaatatgtctgtcacgaaaatttcttttcgtgttgtgacaaatatagtgaaagccgggagcaaaagcaacaaacttgtttaattaattttgccgagacatatcctatattatccccatataaacaaatttaaacatcctgcaaacgttatgggtgactgatttattttgtcggaataaaagtacggaggattttaatatggagagatgatttgcaagacttgcaaatagagttttatcagaatagaactttaatattaggtgaaaatggacaaagtgggtagaaataaaataaatcaaaccaccaaattcggtaaaatcggcgagtacgaaaataaattacgcgataaaaacatttatttctccccaatacctatattttttaatatttctgctaaattcattaccatatagtcttcctgcgttatgagggttttgatattttttaatgcgtccggtaaactgatcatcccggtgggtaatgaaatatgtttcggtcgtttcagatgaccgtcgacatagtaatgttgcgccagttccgcgctgaatttttcaataaatgcccgttttatccgggaacatttttcataaattgaattatcggacggatccgtcagttttcgaatgctttcatccatatgctgcaagttctcccggttggataatagcctgtaaatctgtgtcagttcatcacgatatcgtggtaaatttttaagaaaaatcccttccggatgacgtaaaaacaagaaataaaccgcttttgacagaggattcaggattatttccatatcatcataatcaggtaggtgtatcctgaaatcttcagtaacacaaagacgactgagtttaggggtcagcatcggagcgatggtgtctgacaatatacgaaataaacctttctcttttagaaaccggatccgttcgtctatttcggaaacaatccggttcacctccgcatcaaaacgttcttccggatcggttgaattatttccgggggaataatctcctaaaactcgtgaatacttgacattattgtaattataatgctcatatatccttgcatgagtctggaaaaattgttggacagatattttacctttaatatgggtgattacccaattggaagagttgttgccgtatttgttggaataggtcaggagcatgggcccttgtatttccggtgaaatattcagttcggccagtaatttcgctgtaacggtcgcagtgatgttttcgggtgttacagattgatcgatgggcaggccgggataaacatacctgaagacatccgctccgtcttgtaataactgtggtaaatataagaatgtctgatcgtgaattgcatatattttttgaataatctctaaattctttgcaatcatttgattggcctgcaaatggtgggccgtttctatgtacagcacaacagattgtggtaagtcccctaggtatccggatttgattggcgggcataaaatggaattggcttcgattaaagcctctgcttgttgtatgcttagttcaggcattatattctccttccgtgtttagaatcgttttttctatgatttccgggaaataccggtattccaattcatgtatccgggcggcgaggtcgtcgggggtatctgtcgggagcaccgggcatttggcctgaaagatgatagcaccctggtcgtaatgatcattgacataatgaatggtgatgccgctttccttttcgccggctgcaataacggcctcgtgcacatagtgtccgtacatgcctttaccgccataggccgggagaagggccggatggatgttgacgattttgttcggccaggctgcagtgataaaagagggcattagccacaaaaagccggccaatacgataaaatcgatctcctgttcctgaagttggcggaatactttgtccggattccggaactcttcccggttgaaaacaaaagttggaatacggtatttcttagcccgttccagaacataagcatccgggacattacaaaagacagattttacgcagaattgcggtttttgagcaaaatattgaatgatattttcagcgttagaacctgatcctgaggcaaatattgctatttttttcatgatgtaaacatttaaaaatcaagacgataaaggtaataaaagtttattcttggcaaaaaattttttagtgaaaaaaataaagtctaaatttgccatctgaatttagataattatgcaaaccttgttgcatagagtgttaaagttaaaaagaatgtctaattaaaattttaagctatgtctgacattactgaaagagtacaacggattattgaagaaaaattaggtgtagatgcatcagaagttaaacccgaagcaaccttcacgaatgatctgggtgctgactctttggatactgttgagctgattatggaactggaaaaagaattcaatattaccattccggacgatcaggcagaaaaaattgttactgtaggtgacgctatctcttacgtggaagctaacgcaaagtaatttaatattgtttttatggatttgaaacgagtagtaattacaggtcttggaacaatcaaccctttaggtcataatgtgcctgagttttgggacaatttattgaaaggcgtcagtggcgccggtcctattactcgtttcgatgcatcaaaattccgcacacagtttgcttgtgaggtgaaaaattacgaaccgaccgaatatttcgataagaaagaagttcggaagatggatctttatactcaattcggtatcatcgctgcaagagaggcgcttaaagattcgggtttggacctggaaacagcgaacaaaaagcggataggtgtaatatggggagcaggaatcggtggcttgcagacttttttcgaggagtgtgatactttttcgaaaggagatggaacgcctcgattcaatcctttttttatacctaagatgatcgcaaacatgggaggagccatgatcgctatagaaaacggattgaaaggtccgaactatacgacggtttctgcatgtgcatcgtcggctcacgctattgttgatgcattgaacttaattcgcttaggaaaagctgatgctattgttgccggtggttctgaagctgctgtcaccgtccctggtgtaggtggtttcaattcgatgaaagccctttcaacccgcaacgatgacccgaaaacagcttcccgtcctttcgatgcagaccgggatggttttgtgatcggtgaaggtggagctgccctgattcttgaagagtatgaacatgctgtggccagaggtgcacatatctatgcggagattgcaggtggtgccggaaactgcgatgcttatcatatgaccgctccggatccggacggggcttatgaagtgatgttgctggctcttgaagatgcaggtatgaaacccgaagatatcgattatatcaatgtacacggtacttcgaccgggttgggagatatctccgaaccgacagctatcctgaaagcgtttggcgagcatgcttacaagttgaatatcagttctacgaaatctatgacaggtcaccttttgggagctgcaggtgctgtagaagcgatcgcttgtacgttggctgtaaagaatgatattgttcctccgacgattaatttccatactttggctccggagctcgatccgaaattgaattttacgttcaatgagccgcaaaaaagggaagtgaaagtggccataagcaatacttttggcttcggtggacacaatgcatgtgtcgtaatcaaaaaataatcacatactaaattctttagggctgtgattaggcaaatcattcaatccataagactttacctgaatcgtaacgggaagttttatggattgtctatttctcagatcggctttgtgcccaacaataagagtctgtatcgtttggctctgttgcataagtcggcatcgaagatgacttccaaaggggttgtgctcaattacgaacgcctggagtttttaggagatgctgtcctgggggctattgtcgctgaattattgtataaattctttcctaaaaaggacgaaggttttcttacccgtgtccgttctaaagtagtcagccgcgaatctttgaatgaattggccattaatatcggcctggataaagctgtcgtcgcaaaatcggatatctcccggaataagcatatttacggagatgtgttcgaagcttttatcggggcgatgtttttggatcagggattcgttaataccaaacggtttatcgagaagtttatctttcccaatttcttcgatatcaaagatctggtgacgatcgacaccaactacaaaagccgcctgatcgaatggggacaaaaaaataaagtcgatatccatttccagacagacgaagtggcacgcggacgtcgtaaattctgttgtaccgtgatgcttagcgaggaagaaaaagggaaaggggaaggtacttccaaaaaagaagccgaacaaaatgcagctaaaattgttatcgatatcttatcgaaagaagctgacggaaatatagaaatttaagatttacgatttacaatcgagtctgaacgtaaatcgtaaatcgtattatgaattatcttactctttcaacataagaaccatcagctgtcgaaatccggattttttctcccatttcaatgaacaagggaaccattactttggcaccggtttccacttctgccggtttcagtgcggtagatgaagcggtatcgcctttcaggcccggttcggtataggtcacttccaacacgacactcggcatcaactcgacatacaacggagtttcggtatcggcatgtacaaccatttctactgcatctccttctttcagaaattgaggggcattgatcagttcttccgggatgtttacctgttcgaaagtctcggtatgcatcatcacatagtcttcgccttctttgtacaggaattgatacggacgtctttcgatacgggccgtgtcgattttaactccagaggtgaatgtgttttcaagtatacggccggtttttacgtttctcagcttggttctcacgaatgccggacctttaccgggttttacatgctgaaactgtacgattgtatataaatcgtctttgaatacaatacatagtccgttacggaaatctgctgttgttgccattgattctgtatttttttgattataattttattttgaggttgcaaatatagaaaaaagggatcaaaatgccaagtgaatcgcttatggatttcattctgagctgtttggagaaaactatttttcaatgcatccgggggaatgtcgttcgtttgcgttggattgtgtgaaataatactggctattttgaaaagtgaaatagatgtaatttaactaaggaagagttttgaaatgacccctaaaagttttgtatccaacttttaggggtcattcccaaaattttacttttctgccagccttttttattatggctccgaaagattattgagcggctacttcattttgataagtgtaatcaccgaaacctaaaatcgggaagaaaacgaaaggtaaaagaatcagaccgatggtaaagccgattccctgaccgaattttttggctatttcattgtaaagcatgatagcgaatacaatatttaccaacggaatgaaaaacatgatcacccaccaggccggtttggctgctatcttagtcatcagatagatgttgtaaatcggaatgatacatccccaacccggctgcccggccttttcaaatgttttccacatgcctgcgatgacgatcacgacaatcgcaagataaataatagaaccaatcataatttttagtttttagttataaaagtaatgatgcacacctaaatcttgattagattatgcaaatatacatattttgggaatcggttacgtctgattggaattttttttgaatttgatatcggtgtctgatcaaaacttaataattcataaaatttatggtatttatatacatgtttatcctaaatgtaggtttattttttctttctattccgattccggtttttataccgtcggaccggttcgcctggaacggtccggtaaggctttccttcactgaccggcggaactcctcgcaagctcgtcagacaccaccggtcgggcgttcggaaaacctaaccggatcctcgtccccgctccaatggtcttccggcataaaaccctccatctcacggcagagctaaccggtaaagaaaatacaagcggaaatttacaacaataggaagcctgatcatcttttatcaaatcaagaccggtctacaattcagtgataacgttaggcgaaggtgatcgggattggagaccattggagctctggcgagtgtcgtcttactttttctgaacgcccggccggtggtgtctgacgagcctgcgaggagttccgccggtcagtgatagaaaaagccagacgaccgacagaagcgaccgggtctccaatcccgatcaccggagacgaattagtaacgacgaaataaacctacgtttataagtgtaaatatgtatataactaccaaatttatttcgtcaaatgaatatagtccgtcaatatagtttggatgaattgtaaattattcatatgagtttctattccggtcaattccttgatcttagccgataaaggctccaggagtttatactctttgtttttttcgaattcccggaacacttcccggacaatggccatgtctttatccgaaagcatagcgatttggggaaaagtcggctggtaagattccggtgtttcgaaaaaactgatccgtctcagatcggtgtcctttttttcatgaatgaccgtggtacctgctgccaaatccccgagacgctgcattttcgaactgatgataatgctcagcatagcaagaatacccatactggcactgatgtctaccagacgcaatatccagcgcaacagacaattccagaaagagagctttcggccgtcgagccgtacgacccttaaatgtaaagttagtttacccagactcctgccatgaaaaaagtattcacaaacaaaatggtaacacattaaaatgaccaataagataatggctgtcgtggtgttcctgaaaatactactgagggaagccagggtgaaacagagtatgtatattccgcctaagaaagccaggtcgatgagggttgcccctatccggttcaccaatcctgccggctggtatacaatattgacgtgctgggcagtacgtatagatatatccatataagttgaatttatattctattttatcttgcaaacatatgtttttttctgaaaaaaatatacttttatgctgtttaactgagagtatgaaagaagcccggtttatttcacgtaataaagataaatggaaaaatatggaaaacggacagcaactggatgcggagcatttggctgctaattttatcgaattgtccgatgatctggcttatgcccgtactttttatccgggaagcgaggtggaacgctacctgaaccagctgattgccggttatcaaaccgatatcaactcgcggcctgtgcggaaaaataaaccgatatggtatttttggaaacaagaattgcctttactgttggccagcgaatacaaaaccttactttttgcctttttctttttcgtgttgtcggcttttgtcggggtattttcagctgctcacgatgagtcgttcatccgcttgattttgggagatacttatgtgaatatgaccatcgataatatcacttccggtaaaccgatgggcgtttataaccagggagacgaatgggagatgtttttgcggattacgacgaacaatatccgggtgtcttttatcgcttttgctttcgggttatttttttcggccggaactttgtggatccttttctcgaacgggatgatgatcggtgctttcgaatattttttctataaatacggtttattggcccactccgtcatgtcggtatgggcacacggtactttcgagattacttcggttattattgccggagctgccgggctgattatggggaatagctttttgtttcccgggacttatccccgtttgttttctttcaggcggggagctgttcgtggggtgaagatcgtagcgggattagttcccttttttattctggccggcgtgatcgagagttatattacccattatgcagatgctatgcctgtcgtcggtgcactctgtatcgggatttcggctgtcggcgtgatcggttattttatcgtttatcctgtgatcatcgggcgcagacagaagttgaacgaaggagaaatagattgattgatattttaaatatacatgtgaatggaaaagattaattttaatcaggtacgtgggttcagtgattcgattaccctgacttttaattttattaaacaggaatttaagcctttgctgaggtcttttgcggtgattgccctgcctgttatttttatcggattgttttttatgagctattcggctcgtgagagcttgattgcgatcgtacagcctgatcaatacgccggatcgccgctcgatatgctgaccaatagcctgttgaccaatctttcgacgatggtgatctatttctggatggcgctgatcggtatcgcttatattcgtgtttatcaggataaagttgctgcggccgacgaggcaagaatcactccgggagaggtttggcaagtgatgtggcgtaatctgggtaaatccctgttgtgggcggttatctatttgctgatggttgttttcggtacgatactctttattgctcccggggtttatctgggagtcgtttttggtttcgtattctattatatgatactggaaaaccggtcgatttcggcgggaatgagcggttcgagagagttgttgaagggaaagtggtggaatttcttcgggtatgtgatcgttttacagttgattgtcggcgggctttcttatattttttccattccctacctggttttgacttttaagactacttttacccagcagcttcctggaatttacgaaacgacttttagccttttgttcgccaacctgggacaaagtctgttgcaactgatctccgtggtgggtattgcagtccggttcttcacttatctggaacagaaagaacataccggtctgttgagtaagatcggacagatcgggaatagggataaacaaatgccggagcgtgaagaaatgcattgaatatattgtttttgtcgtcgttctgcttgtgggacggggagaggggggggctgcttcggtttcggcggagtcggtatcggtttctggtcggatcgcttatcgggaacgtactcccggagaaaactttttacaacagtaccgtgacgatccggcattcgattattcggtgaaaccggttgccgaaaccggtgattggtggcagagattgaggtggtggctcatgcagcatatcttcggtagttacacgcataaagatatcgtatggctggacttgttgctgaaagtgctggcaggactgatcgtcgtttttggcatttataaactcgtacgcagtaagttttggctgactgcaaaatcggaaccggactttcagaaaacgatggccccctggataggtgaagcctggaacgaactttcttaccggcaaatgctggaacaagccgtggcggaaaatgatttcaaattggctatacgcattcgctatggaggcctgctgcatttgatggatgaaaaaggaatgatccgctgggatgcccataaaacgaatagatcctattactatgaattgaaagataaagccttaagggatgattttgaaaagctcgcttatattttcgattgcgtgtgttacggtgattttgaggtgagtgcttctctgtatgggcaacttgaaccggtgttcgacgaattccgggataaactgaaaaaatgaagattagaaattttgtcggtattgcattattgttgatcttatcactgatctacacctggtatgaggcaaatcgtccccggccggtagattggtccgaaacgtattcgccgaaggataagatcccttacggtacttacattacataccggagcttgcctgaattattcccggattcaaagatcaggacttcgcgcttgtcgatagccgaagagttcggaagtgggcgggatacatctgccgggacatacatttttgtcggttcggactatcggatcgatgcccttgaattgaaacatttgatgcagtgggtagagaaaggaaatgatatgttcgttgccgccgggtggattgccgacacgctgttgaatgctttatccctgaagctggaacagaatttgaaccccagcggcagtaaattgctttttgctcccgggcacgtatatccgttttataaaatccggcacggtagctattttgtcttgccggctgattttaaaggcgaacgtttggggatcaggatcgataacgattccaccgattttatccgcctaccctatgggcggggacaggtattcctgaatttgaatccctgggctttcaccaatcgctgggttttggatagtgtctgtggcgattattattacaaggcgttgtcgtggttaccggataaaggtcgaacagtgatttgggacgcctaccacacgttgggaaggcaggaagcacaaacacctttgcgggtgattttgcaataccctgccttaaaatgggcgctttatctgttgctggcaggagctttgtgttatgtgctgttccgcgcacggagagaacaacgtccgattccggtaatctaccctccggaaaataaaatgctcgaatttatagctaccgtgagttcactttattataaacagaaagaacattcggcgattgctttaaaactgaccgactattttctgggagaggtcaggaccagatatcaactggctaccgaccggctggacgaaccctttatccttgggttatccgcacgctccggggtagaggaggaagatacccgcagactggtgcagctgattacgaaaatcaggaccagccggcaggtgaatgaaaccgaattgcgtaatttggtacagggaacagaactttttaacaggaaattaaatcaataaaatatggatactggttttgaaacgagaatagatttttcagcgttgaatgagaaaattggtttgttaagagaacaaatggcccgggtgattatcgggcagcggcaagtggtcgatttgttactgacggccttgctggccgacggccatgttttgatcgaaggagtacccggagtggctaaaacattgatggctaaggtgttgtctcatttgatcgaagccggtttctgccgtattcagtttacccccgacctgatgccgagtgatgtcctcgggacttcggtatttttaccttctacaggaaaattcgagttccggcaggggcctgtatttaccaatattttattggtggatgagatcaaccgctcgccggcaaagacgcaggctgccctttttgaagttatggaagaaagacagattaccaatgatggtgtagaatatgctatggagtttccatttatggtcgtcgcaacgcagaatccggtagaacacgaaggcacttatcgcctgccggaagcccaactcgaccggtttatgtttaaaattttagtggattatcccaggaaagaagaagagattgaagtattggaattgcacgataaaagatcgtccgaaagttggaaagaacaaacaccggtagtatcggtcggggaattgagctatttacgggagaaagtacatgatgtgcatgtcgacggaaaaataaaagcttttatcgtagatatcgtcggtacaacccgcgacaatgcctggttgtacctgggtgcctctccccgggcatcgatcgctttgatgaatagtgcaaaagcatttgctgccatcagcggacgtgattttgtcgttcctgaggatgtattgtatctggctgctccggtattgcggcatcgcgtgcagctttcggccgagaaagagttggaaggggttgtggtggatcaggtcattcaacaattgatcgctaaagtcgaaattcccagataatgaaggaactctttttgaaccggcgtttttttatgttcctgtggggtggggtattcgctttactgctgaccttcgtatttcctcgggtatatccctgggtaatttgggctttgggatgcggagggggactcgtcgttgtggatatcaccttgttgtatggattcggaaaggcatgcggtgcacaacgtatcgtaggggataaattttccaacggggaagaaaatccggtacggatccgggtggaaaacaagtatccttttgcggtccgggtgcgtgtcgtagatgaagcgccggtcgaatttcaggaaagaaacaacagtttgaatttttgtctgtcctcccacgaacacaaagaaggtacttacttcctccgccctgtaaaacggggggcttaccggttcgggcaggtcagggtattcgtgacctcccgtttgtcgctggtcgaacgccgctattccttcggaaaagaaaaggaagtggcggtttatccttcctttgtctctatgcggaaatacgaattactggcatttacaggccggcagtccggtaacgggataaaacggatacgggtggccggtatttccacggctttcgaccagataaagccttatatccagggtgatgatccccgtaccgtaaattggaaagcgaccgccaaatgcaaccggcttatggtcaactcctataccgaagaacgttcacaatccgtgtattgcgtgatcgataaaggacggaccatgcaagctccttttcggggaatgacgactttggattatgcgatcaatgccactctggccttggcgaatatcattctgaaaaaaggagataaagccggattactgactttctctgataaagccggagcgttgataaaagcagataaccgccggttgcagctgaatagcatcagcgaggcgctttatagtcagcagacttattatctggagtcggatttcgagcaattgtgcgtcacggcttcccggcagatccataaccggagtctgctgatcctttttacaaatttcgataccgtcgacgggatgaagcgccgtttgccggccttgaaaaggttgacggataaccatttgctgctgatcgttttatttgaaaacacagagatcaaccgggtggtgaccgaaccggccttgagcatccgggatatctatttcaaagctttagccggaagttttattacagagaaaaggcgtatcgcccacgagctgagaaatgccggtatttataccattctgaccgaacccgaaaaactgaccgctacggtgatcgatggctatctggaaatgaaggaaaggggacttgtttaaatctgctcttctgcagcatcgatccccgttgcaatttcctggataatccctttccggatatagacttgccgggcatgtttccgtaccaatgggcggtagtattcgaaaataattcctccgagagcacaggaaacacctgaaatcaggatgatagccggtaaaccggtttgcttttccagactgcccagaaacatactccccaccggagctattccggtgaaagtcattgccagatatcccatgacacgtcctcttttatcttcatcggataacgtttgtaacagggtgttgatagaggctaccgtactgatgatggcaaatcctgctggcaggcaaatgaatgctgcaatccaataagtatcgatatacgatagaatcattaggctgatccccagcaggaaggccgatatcgtgactaccttacccaggccgactacgcttttgcgggctgcgaggtaaagggcggccagaaaagagcccactccgatgcaggatagtaaaaatcccagcatttcgctatctccctgaagaatatccttgacataagccggaataaaagtcatgagcggcaagccgaagaaactaacggcactcattaacaacaacagggcccgtatgggaatgttaccggacacataggagaaaccttcttgtatatctgtgagcacattttgccggcggtgctgaacggtaaaaggagacaggcgcatcaggaagagggcgatgatgactcccaggtaactgattccgttcaatagaaagcagagcccttcaccgaagattccgatcagtactcctccgactgccgggccgatgagccgggaaccattgatcacagccgaattgagcgcgatggcattgctgagatgttctttggctaccaaactcggatagaaggcttgacgggtgggattgtccagggcgttgatgcaaccgatcagcaggcttaaaatcaggatatgccatacttcgatcacgccgctcaaggtcagtacagccatcgaaagggcttgtaccatagataaagattgggtcaggatcagtattttttgccggtcgaaacgatcgacaaaaacactcatgaggggggtgaccaataaaatcggaatttgggccataaaagttaccgttgccagcaaaaataccgaaccggtcaggcggtataccagccagctcatcgcaatctgttgcatccaggttccggtcagcgacacacacatccccgtgaaatacaaccggaaattacgcgtcttcaacgatatcagaatagatgaaaaagccttaccgttatccggtaagatctcccgtaatcctcgaatcactttctttttcttttaatccctgattttgtttcgtttaaagccccagttcctctccgatcaaaatgactttgattctgcctgccggataactcttttctgtaattgtccagacgttacaaatccggtcggggctattacaatccatacatacaccggtcttgtggcatggggtacggaagccttcatggcgtattgcatttcggggggctgcaatggtcctgacccggtgcatggcttcctccaggtttgcggtgattttattgataccgatgaacaataccacatgtttaggcccgaaagtgataccgccgacccggttaccgatcatatccagattgaccaattgacctttttgtgtgagggcgttgctccccgttagaaacaggtcggttaacagagcctggcgtctccaatagatcttttgtttccggctcatacccggagcgaaactatcgatgaccgagagttccggatttttttgcaattcattcaaaacgcccgtagccttcatcgtttcggaatcgccccaggaaacagtctccacctgtagtcccgggaagatatcccggaaaaatatcgcactggcttcggctgtattatgggcaaaaaatgcttcgaaatggttgtggcgtaaagctgcaatagttttgtcgatgatttctttgttcatattttgcttactttttgtctgttttaacgtatacgaccgataattatccgtgaatcatcgatgctgtccgctgtagttacaaagccggtaaagagggtaaaaaaacaacctgaaactcttgtaactgaaatgatagattaaatgatggacaaagatagggatttactctttttatctggaatttgtttgttaatatttcattttataattttacactcttaataacatcgattatgaaaagattgctcacacatttaggtcttcggttttttctgcttttttcctgtatttttctttcctcgttttttatttcactttctgctcaggagtttgtaaaagggggggcgaatggtttcgaatggcggttgattggccgtgtattttttgacggagggtatttttttaacgataccaccgatttaggtagtagttttcaggtgaacgatatccgtttagggacccagattcgttttctggagcactgggaagctaaaatagaattggggtatggagacagtaagatcagtatgaaggatattttcctgacttacaaattcggtgaacaggctgtccgggtcggttatcaatatgagcctttcggaaattcccgggtaggaacgacgaattttcgttttatgaccaatgctgcttcggataaagcgttgggaaattcccggaaattgggggtaggctacagctataatcaccaatggtttaattttatgggaggtatatacagcgacggagatgtacagaagtccaagtcgctggatcagggctattccctggcggcgaaactgatcggccggcctctgttgaaagataagaagcttgtccatctttctgtcgcaccccggttcagtagcggacaggaaacgatcactttcaatgccggtataccgaccgatttgttgacgaaagacgataattcgtatgtagaggcaaaagtggatcaggtgattaatcaatggaagctcgacctcgaaatgattttactctacaataaatggtatttccaggggcaatattttctggcacacctgaatcgttttcaggccggtaattacaatggcaaaggatggtacggtcagatcggatacatgattctgggagcaaagcataattataatgctgctaccggtatgatcgtcaatcctgctcccaaaagccttgaagtgttatgccgctataatatgatcgacctgaatgatgccggtatccggggagggagactgacggatatttctttgggaatgaattattttatcaataaatatgtagcagcaaaaatcaattatacccatatgatggtcggaaatagttcgcccaagggaggtgatgatttcgacctgattcaggcccggctgcaattttcattttagtttgcagacgataaaaatttccttaccttagaccggtcggaaaagtccataaattttccggatcggatgggcttattctgtcggaaccgatagatttaattttaataatatgaaaaagattctggtaagtttagccgtattgtggtgtgtggcactcggtgtacaggcacaggataatcaggagtatgagaagcaagttgccaagatgttggaaatgactcataccatggatgccatgaaacaaatcttccctcagatgacagctatgttaaagcagcagttgcctcaggctcccgatgaattttggaaagagctggatgcttctatgaatgggatgtatgacaagatgatcaaggcggtgatcccggtgtataaaaaataccttacgctggatgatctgaaagagatcatcaagttttatgaaactccggtaggaaagaaattgtctgaaatgaatcccaaagcgacagccgaaatattacctatcgcccaacagatcgggatgcagacgatgcaggaactgatgcagaaagcacaggaaaaagggtatttgaaacaacaataaaaagggattccgacaagtcgaattttcgacttgttgggattagtgtcccatgtagggatatacatgggtatagggctgattggcgggactttcggttccggattttaagctatttattaaagctgatcagcgtgttcaaagaatgtactgatagatcagttgtcggtctgtttacggcagagtgggcctttctttcattaatagcccgtttcctgttctaaaggcgggtatcttatttttctttttttcatttaccatcttccctattttaaataagattgaaataaagagtaataataagtgttattaaaaggaggatagcgattattattttgattgttttatttgtcaaaaatgttgatgtcaatgaaatgatcaatacagatgaaagaatccattttcctttttctgtccaagaggtagctaatagaatgattattattgtagcgatgactaaataatctataattccccatttttttttcatagtcctgaaatattataaggtatacatccaaccccggaaagttaataataagttgttgttataaaaagtgtgtatacgttttttgtaatattatatcttgtcgactataatgtttttattttcatccaggcggaccatcccattaaacgagttgccttccggatccttgaaaccggatattttgccggtttggcctttttgtattaatgtatctacttgtttttgggtgagtttcttaccttgtatttccatcggaatcagaaaatcacaggatttccggtataaagtgcatccccaggcggtttttcccttcacaatttctccttgtccgcatttggggcatttcaatacaaccgcaattttttctccgttctcctttttcccttttcccttctccctttcttttttagttttcttgtcttccccgtctttttcctccggtgtttctacagtgatcgttttcgctgaagaataacgtacaaaatggacaatttcgtttaccatcgccttcaattcttccatgaagtcggccacctgataggtaccgtcttcgatcatacgcaacttcttttcccattgtcccgtcagttctgcggatttcagaaggtcgttctgaatggtgtcgataagctctatgcctgtcgttgttgctaaaatccgttttttgtctttgcggatgtattgccgtttaaataacgtttcgatgatattcgcgcgggtagaagggcgtccgattccgttttctttcatcagatcccgcagttcttcgtcttccacttgtttcccggcagtttccatggccctcaataaatcggcttccgtatagtatttagggggctgagtttgtttttcctggatttcgggggtatgcgggccgtgttctcctttttcgtaaaccggtagtacgttttcttcgttttgtttgtctgtattattgccgaataccacccgccacgccggatcgatgatttgttttccggtggctttgaagtcttcgttgccaattctggccataacggttgtattggctatttcgcagtccggatagaagacggcaatgaaacggcgggctaccagatcatatacccgcttttcctcaggagacatatcgtaactgaatacaccggtcggaatgatggcatggtgatccgtaatttttttatcattgaagactttggctgacttccgtatttttcctcctgataagatcggctgtgttaaagcctcataaggtttcaggccctgaagtattttgggaactttggcatattggtcgttcggtaaaaagttggtatccacacggggataggtggtcagctttttctcgtaaagcgactgtatgatttttaaggtattttcggctgtataggcgaattttcggttacattccacctgcaatagagtcaggtcgaacagtttcggcggatgttccatggcctttttccgctcgatactgagaatttccagttcgagtggagtgattttttccaggagggcttcggcttcctcttttttattgaaccgtccacgcaaacaggagaaaagtccttcccggtaattcgtccgtatttcccaataagtttccggtttaaagttctcgatcgctttttgtcgttcgacgaccagggccagggtaggggtctgtacccgtccgatcgagagtacgttttttcctgtcccgtatttcaacgtataagcccgcgtggcattcatccctaacagccagtcgccgatagcccgtgcagaaccggccgcatagagagtatcgaaatcttgcgattccatgagtttttcgaatccttcccggatggcttcttctgtcagcgaagaaatccaaaggcgtttgataggtaccccgcatttggctttggtcaatacccagcgttgaatcagttctccttcctggccggcatccccgcaattgatcaccatttcagctttcgagaccagctcctcgataacggcaaattgtttttttattccctcatcttcgatcagacggatcctgaatttcgaggggatcatcggcaatacccctaaattccatttttgccatttctccgtatattctcctggttcttgcagggtacataagtgtccgaatgtccaggtaacacaatatccattcccttccagatatccgttccgccgggtcgtagctcccagaatattcgcgatttctttggcaacacttggtttctctgcaatacacattttcataattccgcacgacttgattctgctacaaagataatgtaaaccgaaagcaaagccaagtttacttgaactttgctgagatgtagcttattttatcgaatgataatgcaaaccgggtgcagaacgaaacgaattcgttcatttcttccgccaggggagacttatgtttcttttaccactgttcccagaaaacgactttccgaaaaaatgttccggtatttatttttgaaaaaagcaaataaatggatctctttacctctttcggccgggagagtaaaggtatattctcctgtagcccgtatggtttcaaaaccttccagccaatatatctcaccgtcgtctaccctggttttatcgtaaatggctatttgtaataaatcgtcgtcgaaaccctgatttttatacccgggattccattccaggcgaataagatccggagtggtatattgcattccgaaataatccgggatataaagcggcccgtaacatatcttcaggcctgaaaattcggtaatttctcctgtctccgtaaagctatggatattctcttttataaaaaggttatatccgcttatgttttgtccatgcgtagcatcgctccaggtcatatacatcggcatttccagtttatgataaaatgaagccgcccctttaaacctgtttttctgtgctttttgcttactacttttcgattttctataccgtcccgttttgctccttattctcagctgtccgtttacttcataaaggataacatttccgaaacttcctttcagcagtacccatagcctgtttttttagcttgaaaatgaatcaatttcccgataacagcgattccccggagatccctttgagtattagcttctgtaaaattaactaaaaaatgattaaaatccaaataaaaactggattaaagcttatttatttagttattaatctggtaataaataggatttgtactggatttaatctggatttatctatacacatatcctgctttgtcctatgtggttagcattcc

SEQ ID NO: 5818 - DNA, 163 bp, Unknown
  gut microbiota DNA sequence
gtgccgtcagaccggttcgcctggaacggtccggtaaggctttccttcactgaccggcggaactcctcgcaagctcgtcagacaccaccggtcgggcgttcggaaaacctaaccggaccctcgttcctgctccaatggtcttccgccacaaaaccctgcatct

SEQ ID NO: 5819 - DNA, 14150 bp, Unknown
  gut microbiota DNA sequence
agacccgcttgggataattggaagccgatcccgataagcaggcagaaccagggtggatgaatctttcttatccgcaatacaacgccaaactccatctctcctataaagagatcaacaacgataccgccctgaatcattatctcgaagactgtcatcatctggcctatacgcatacgataaaggccgaatcgatcaacgaaaaatatttcaagaatcgggaaattttcggactcatttattatatcgaaggaaataccgcttcttccactcaatttttcatcaccgattccacccgtcattttctgcgcggagctttatatttcaaccagcaccccgataaagattctttggctccggtcatcgattatttacgggaagacatcgtcactctgatggaaacactccgctttaaaaacaaatgaaaaaacttctatttcccggccgtatagggaaccggtacttccagtatacgacacaacatcggtaacaaagcggtcatttgacactcctgaggtaagtcctgaggtaccccagccccatacagataaagcggaacccggtttctcttgctatagcgcgcataattgtcttcccgttcctttagggttggaatccaggtcggtaccagggaatacaaaatatctccgctccgtttctgagaaaaagcattctgaaacaagacttccttacctgccgacgacgcattatgagtcaaggaataagcagtcagtacatgtccgaccccctcgaattcgatcataaaatcagcgatcttatcctgcatctctttcaaagaaatttttttctgttcgatcaactgacgatccaggtaaatttgttcggcatcataatccaaaatccattccccttctccatataccaggttcaagaaagacttcaataaggcaacggctttaaaaatactgaaatatccggaggtcaatctcatcttggccaattcttccggcaacaattcacgggcttcggaaaaagttagaaaaacggtataatttccttttcccacccggctatccaattcattcaaaagcttttcgacatcccggtccaatcgcatcacgacatcctgaaattcgcgggaatatacgccataatcccggttcatatagtccagacaggaaaaattcagtgccagtaaatcagcatcgttatcatgcccgagttgctccgtcttgagtaattcaagcgctaaatccgtcaccagggtattagcataaggagtagcttttaaaatccgataggtatcgaatttccgtttcgcctgtgccaaatcgtaataaaaattatttcccaaaccgatcttgttcttcaaacgcagggaggttgcattaccatcctcatcccccaaagccatccacccccggcgaataaaaaaatcgctttccattttggcattataagcctgcagccaccccggcaacgaatcggcataataatcggaagagatccatttacctgactcttcactcaaccaaatagccatattcgcacagcttcctccactcagaaccgcctcttccccattgacagcaacactatatactttcgaaaaaacattattcatcttcatagcacatccgagtgtcaaggcttgtaagccttcaggactaagccctttgactccatcttcccccaacatcaggcagttatccgagatcacattattctgccgctttcctctcaaacgatcgtaccaatcgtgagcgatcaccccatgttcggatggcaataaacccgtataaatcgttgcctgatctactccggtctgcgaatacagataccggtaatcggccatcatctctctaccttgcccacaaattctcttcaagcctccttctgccaaatcgttcttataaatagttacccactccggataaaaattactgactgtaatccctacgatcaatttcgtcttattctcagcagccatcgataccattccctgcagtatcaacaaaaatcccagtatcccctttttcatttattttcaaattagatatcacaacccttgatcgtacaaaggtataaaaacaaccttaaaatagtatgtcgttccatgaaatcctatcaaaaacagaattgaaacaattttcttattatcaactatattttaaaagaaaaaagatcgaataaataataatttacaactttaaattggcgctatcccattttgtttattatatttacggcatcaaaccgaattttgcagaacaatgacagaacagagatttcaactggcagaaaaattacgaacctatatttcgaaatacggaattaatgatttcaacgaagaacacttgcaaaaggtgggcctgaccttagaagaactgaaagaaaatttcaccgaccgcaaagacattgtcaaagccatactggagcatgaacggagatgttttgaagaaatcttcaatgaatacaatttcgaagggtggaacgctatcgatattatgttgatcgtcagtgatgaaatcaacaaccgttttttcaatgtatctccttcgttcaccattatgttatcgaaagctttcccggatattttcgaagaacatatgcaaatgcgttcggattttatctatgagaagattaaaatcaatatcgagaaaggcatggaacaaggcatgtataagaaggatatttcaagcgagatgatcgcccggatgtatatcgccaaactaaacgatattcataatccggatatttaccctccggaaggatttacttttgcaacgatattcaataatttgatagacggagtcatcaaaaacattaccaacgaagaaggaagaagatattacaaacaacgcaaacaattgtatagtattctgaacttcagataatcccattttactaatcaatacctaaatgcaatgaaataccagatcgatgatatagacagaaaaattctatcctatcttgtaaaaaatgccagagtaccttttttggagattgcccgtgaatgcggtatatccggtgcagctattcaccaaagagtgaaaaaaatggaagatgccggcatcatcgaaggttcacgattcattgtaaagccacgcgcactgggattcaagatttgtgctttcatcggggtcattctggataatgcttcccaatataaaaaagttgtcaaagaaatagaaaagatccccgaagtaatcgaatgccatttcatcaccggtcactactcctttttcctgaaaatccggtgtaacagccaccagcatctgatggatatcctgatcaatactctgcaaaatattcccggtattgctaaaaccgaatctttcatctccctggatcagctcatcgaaaaacaggtggatatttgtacggaggaacaataaaggcgaaaaggcttaaaagctaaaggctaaaagcgagaagcgagaagctgaaaagataaaaaagcaaagaagctaaagattaccttctcgcctttagcttctagcttttagcctcttctagcttttagcctctagcttttagcctctagcttttagcctctagcttttagcctctagcttttagcctctagctttttactttttaccttcagcttatcgttttccttatcgcagtcgacataaagggtccccccttcgggaaggtcgcctttgatgatcacttcggctaattcatcttccaggtatttctggatagcccgtttcaacggacgtgctccatattgaggatcataccctttctcggtcaggaattcttttgcagcatccgaaacctggatgtggtatcccaattcacctacccgcttgagcagtcctttcagttctatatctatgatcttatggatatcttccttactcaaaggattgaagacgatcacatcatcgatacgattcagaaattcaggagaaaaggcactcttcaacgctttctgcacgacactcttggcataatcgttgtcattcgtcttatcggcagccataaatccgataccacgtccgaaatctttcaattgccggcttccgatattggaagtcatgatcacaatcgtatttttaaaatcgacgcgccgccccaaactatcggtcaactggccgtcatccagcaactgcaggaggatgttgaatacatcgggatgtgctttttcaatctcatccaataatactaccgaataaggtttacgtctcactttctccgtcagctgtccgccttcttcgtatcctacgtatccgggaggtgccccgactaaccgggaaacagcaaatttctccatatattcactcatatcgatccggatcagcgaatcaggcgtatcgaacagatattgtgccaatactttggccaattgagtttttccgacaccggtaggccccaggaaaatgaacgatccgatcggtcggttggggtctttcaatccggcccggttccggtgtatcgctttaacgatcttttcaatcgcttcctgttgtccgacgacactatccgccaattcttcacgcatctgcaacaatttcataccctcggtcttagcgatccgttttacgggtactccggtcatcattgccactacttcggccacactctcttcatcgaccaccacccggttttctttcaattctttctgccagttgtctttttcctgctcgagctgggccagcaattggcgttctttatcccgaaaagcagctgcaacctcgaaattctgttgtttgaccgcttctttcttcttattcttgatttcttccaccgatctttccaactcttcgataacctgaggcacatggatattggcgatatgtacccgtgaaccggcctcatccatcgcatcgatcgctttgtcaggcaacgcccggtcggaaatataacgcgtcgtcagcttgacacaggccttgatcgcctcatcggtataacggacgttgtgatgatcctcgtagcgggatttgatattgttcaggatttcgaccgtttcatcgaaagaagtcggttcgaccaatactttctggaagcgtctttccaaagcaccgtctttctcgatattctgccggtattcgtcgagggtcgtcgccccgatacactgaatctcccctctcgacagcgcaggtttcagcatatttgccgcatccaggctacctcccgaccctccggctcctacaatggtatgaatctcgtcgataaaaaggataatatttttgtttttagccaattcgttcagaatggctttcatccgctcttcaaattgtccccggtatttcgtacctgcaacaatagacgcgatatccaaagctactacccgcttatcgaacaatacccgtgacacttttttccggatgatacggatcgccaacccttcggcaatagccgatttaccgacccccggttctccgatcaacaccggattatttttcttcctccggctcagaatttgggccaatcgttcgatttcccggtctctccctacgatcggatcgagggtaccttcttcggcagctttcgtgatatctataccgaaattatccaataccggggtatccgatttagcaggcccgttctgacgatagggattgtacatcgattcttcgtcacctgcatcctcgtcttcatcggattcctctccatagtcggattgcatacgggttttctccttcagcagttgttctttaaacttctcgtaatctactcccatagaattaaacaattttgtgacaaaccctgcctgatttctcaacatggccaacatcagatgttccgactctacttcctcatcccccagcttccaggcctcctcgatgacccgtttaacaatactgttggcagccagggtaagatccagctcatcgggcatctcttcactcttatccctttgcttattcagtttctgttcgatttttgctttcacctcataaaaatccactcccaaagcgatcagaacatcgatagccctggcctgatccatccgcaacatccccagaaacaaatgttcgggtgaaaccttcgtattccccaaacgctttgcctcttcacaagctaagtctattatttctttcaattttttgttatcgttttttgtcatatcctcgtttattacttcgttgatgcagcagggtattccctattatttcaataattcgtaaaattcttcttcagaaataatccgggtacccaatttttctgcctttttcaatttactaccggcattttcgccagccaacaaataggcggtcttggctgaaacagaatcgctgacctttccccctgcattcaaaatcaactctttgaagtattcgcggggccgggtcagtgtaccggtaatcacaaatgtttgccctgccaggctatcgtttcctgtttccgtttctcctatttctgcttctacgccataatcgatcagacgtttcaccaattgtctgttttcttctttaccaaaatagcgcaaaatactattagccatctgttcaccgatatcttctacttcggtcaattgctcaaaatcggcttccatcagcctggtcagttcccggaaacttttagccagattacgggaggcagtctctccgatataccggattcccaaagcattcaataaagcgggaaaaccggccgttttcgatttttcgataccggcgattaaattatctaccgatttctcctgcatccgataaacggataaagtattcaatttccgtaccaatttttcattagaacggaaaaaacggacaatgctatcggcttcatctgcatcgatcccctcaacagcccggatttcagcagcagaagccacagataattcataaatataatcgaagcgggctgccaataagtcagctttatgccaatttatccccggaatattcaatgcatagacgacataatccaaaggaatattttcaacggcacctgcttctttcaagcgttctacggtctgattaaaaggagtacgaaagtaatccaatatccggtttaccgtcgtttcatcgcctatcaccgctgaaagctcttgtttcgaagcagcggcataagcttccaggctaccgaaatgaccagccaacgtctctgcatttcgggaagaaatattctttattccgatttcaaatccataaatcacttttgctaaagggatactggtcatttcgaaactctcggggtaaacaattttttcgagtccgatcaattcctctcgctttgccggtaatccataaatatcggccacatcccggatcagccttttacccagtaataactcgatcgtttcttctcccatcccctctatattcatcgccttacggctaacgaaatgttcgatttttccggctatctgaggtggacaatggtcttcattcgggcaataatgattggcttcaccttctatccgtatcaattttgttccgcattcgggacaacacgtaatgaattcgacagctgcggctccttccctgcgtttagcccggtctacccccacaatcttcggaataatttctccccctttctccacatacaccgtatcatgttcgtgtaaatccagggaagagatgatatctgcattatgcagggaagcccttttcaccgtagtgccggcaatatgcaccggttccagattggctaccggcgtgacggcacctgtccgccctacctgataaaccacatcgatcaggggcgtctccacctgttcggccttaaacttataagcaatggcccaacggggagattttgccgtatatcccagcaaatgctgcatcccgatatcattgactttgatcacaatcccatcgatcggaaccggcaaacccgtcctttctttatcccattttgtgataaaggcccaaacttcttcaaacgaatcggccaagtgaatgtaaggaggcatatggaagccccattctttagctttcatcaagtttccgtaatgggtttccgccggagtcacttcgccgggaatatagtaaagaaaacaatccaaatgccgtttcgctaccagcgaagaattctgtaatttcaaggttccagcagcagcattccggggattggcgaacaaaggttctccggcctctgctttttcctggttcaagcgattgaataccgaaaaaggcatcagaatctccccccggatctcgaattcgggcggataatcccctctcaacttcaagggtacagtgcgaatcgtcctgacattagccgtgacatcgtctcccttcacgccgtctccccgggtaaccgcctgagtgagctcaccgttcacataagtcagactaatcgaagtcccgtcgtatttcaactcacaaacatactgtacccggtcaccgactactttccgcacccgctgatcgaaatcccgcaattcttcttcgctatatgtatttcccaaagaaagcatcggatatttatgagcgacctgagtaaattcctgattgatatccctccctacccgttgggtcggggaattgggatcgtacatctccggatacttttcttccagtttttccaaatcgtgcatcaacccgtcgaactcccggtctgaaatctccggtgcattttcgatataatatttataattatgatattcaagcgctttccgcaactccaaaatccgatctttctctgtttgcatatctcttgttttatcctttacaaaggtaaggaaaattttggcgtacctctttcaaacttaaatgtaaaaacgcaaaatttgcaaacgcaagccggtgttaaaataaaaaaggcaatcaggcttatttctaaaatttataatttaatttagatgctctaaaaaaataggtgatatatgaagaaagttctgttttttattctacttctctggtgcccgttttcaatcgtttcggcacaattcgtcaatttcggtcaggataggccttccctgcgctggaagcaaatcaaaaccgacgattttcaaattatatacccggattttttcgaagaaaacgcccaaaaagcagcttctattttcagtcttttataccaccatgccaacacactgcaattacaccccaaaaagatatccatcatcatgcatgccgacggaggtgtttccaatgggaatgtagccctggcaccccggaagagtgaactttacaccatgccttcccaagatcccacggatgattggctggaacatttgtgtgtacacgaattccggcatgtcgtgcagctcgacaaggtaaaccagggacttaccaaagacctgtattatctcttcggggagatttttcctattgcagtagtcggtgtatatgtaccgatgtggtttatggaaggagatgccgtatgttttgaaactgctgtcggccatctcggccgaggacgttccccggaatttctgaacgaaatgaaagcccaaatcctggaaaaagggatttacaattattcgaaagccgtactgggttcaaacaaagatttcgtgcccaatcgttacaccatggggtacttcatgaccgccaactcccgggtcaattacggttcggatatctgggcaaaagcgctggaacgcaccggaagacgcccttacggcattactcccttcgccaccagcctgaagctttccatgcagggcaagcgggacagtctctggcgggacagtacattccgttctctgtttatcgatcccgacagtgtccgccaggccaatacctaccgggatgccaagcgtaccctttaccgggataatttttccgaattgcaacagcgctggatgcgggaggcctctctcgtatcgtctccattcgatacacttcccacccacaacaagtattacacgaattactacaatcccaccccgatttcttccggcaaagtgattgcttataaaaaagggctgcaacaaacgggagctttcgttctcttgcacaatcagaacgaaaaactcctccggcgtacagggattctggacgactataaatttgccttcaacaacgaccaaatagtctggagcgaatattacaatcacatccgttgggatcagggcggacgtatgcgtttaagcagttacgacctgaataccggtaaatacaaacgctataaaagccggaacaaccgtttttctcctttcgcgatgggccaggagtggggctgtgtagaagtggaccattgcaaccgatcttatctggtcttgctcgactcgactttgagccgggaaaccgggcgtattccggcagaagcgaacgaactattcatccatccgtcttaccacgagggtaaaatcaccacagtcgtccaatccccccgaggcttgagtctggtatcgatcgatccggtcactcaccggcgacataccgtctgtcctgcgatctattacgaactggaccacccggttgccggagacagtctattgatctacagagcttcttacaacggtaacaatgctttctaccgttggaccgcacaaggtccggtgaatgtgctgaacagtaagtacgggctacagttccccaccctcagtgcggataaaaaacagttgtatttttctttctacacagcagacggctataaacccgggcatatcgacctggccggattacaggaacagccgacggtctatcagcaattccggttagccgactcgatgaaacaggaagaaaaatggcattctgctttccaatacgattctatctatccttcccggaaatacaataaattcacccaccttgtcaatatccacagctggggaccggtagaagccgatctgaacgatatggacgtcgacttcggtgcggtagtttactctcagaataagttgagcaccttatcctttactgccggttatatcttaaaatcgggttatgaccacggggcctggatgctgaatgccagctacaaaggctggtggccggtattcgatttcgacctgtatagcgggagatacgattacgaatctttcaacgaaggttttttcctgcctacccggcaaaaagaaactttttatgcacaatataaagcctggcgttcttcggctgaggttacggtccggtttccttttaccctgtctgcccgccaatataaccggaccttacaaccttatgtccgttaccggtttgtcggattacaccatgaaaaattaaataaactctacacctgtaaaatagcagaagcgaacactatatggattacacaagtcgatccgaacttttaccaggtgaacgagccttcccggttttatcaattgctggaatacggactttattttaccaatcaaacccgtatgactacccaggagatcaatccccgctggggccaaactttcagtgcaggttacactcacagccctctggaacatatagacctgggctatcaatggtggggagacggacacctgtattttccgggcttcaccaccaatcattccctgtcgctatacggaggcttccagcatatgtcgcacaaagagcggaattatagcaataaaattctttaccccagagggatcaccctacctggctacgaaatagccagcttgcgtaccggttaccatatgccgatcgctttcccggatctgcccctgagttcattgctctatctcaaaactataaacgccgccgtattctacgattggggtagcagccgcaacaaattcggcaaagctacttactcctcctatggaatagaattgaccacggacacccacttcttccggttaacctatccgatccgtctcggtatccgcaccggctacgaaacacaacataaaaagatgttcgccgacctgattttctctatcggactgagtatttaagatagatgacaggtgtcatctatcatctttaatggcaaggtatatacaaagagtcgtcccgggggataatcaatacttcggaccgggcgtgtttacggtaaagccggacagtatagggatagtaaaagggaaataagcggaacggacgcatcatcagggttatccccggagaaagatcctgcaaaacctttatcaggcttttttcaaaacttttctcttcattcaccacctcgtagcgggcttcggaatgctttaagatacgctccataaatgctaaattattgcggaccatggccgcaatatgctcatctttttcccggggaacgatgatttcgatccgacacccgggatgatgccgctgcaggaaattagcccaaatccctttttctttattttccttcaaataacctaccggaattttcagctgctgaaaagtatcggcagaaaaatgatcctgcaaaacaagtaccggtttattcaaagcatacacgtacttcatcaaccgataaaaagaatatgatttccgcttcaacaaacaaagaacactatcctctcccatgcaggctgaaagcagttttccgctaccgggtattttttcacatctataccgccatccatataaccgcccgatgttttcggcacattcacggatttcttctatctcctgtttataaaaagctacaatttcgtatttcatcatctggatttatctaaagtacccttattccccgaccgtccctcgtccgatcaggccggctatccccatcgatactaaggataaaataaacacttataatttatgggacgactgagatcccggaaatatccggccgccagtctggttgtataaaagttactttcgataagcatcgtcatctctttatcctcatataaaggagtaatatcgatcatcccatccccatcgatccgatacatttggtccggaaaaaacgttatatcccctttcaccacttctcccccggcttgaaattctcctcttaccaattctccgttattcactccataatagagatacacctttgccccggcatcaggtatttctacatcgggctgagcttcatttatataaaacacctttaccgtaaaccctttttcttctacgacaggttcgacctcgtcctcatgcccggaagaacatgcctgaacaatcagaagcaaagaacaaactattattggcagtactacatttcttatcatacctatgcgacaatattttttgaagacacgaaaatacataaacaaaaatcacaacagggtaaatatttattatccatatcccaccatcattatatatattgaggatatatcaaaactaaattgaatgctcgataaagttacagattataatgaataagcacaaaagagccttatcaagcttattaaaggataatgacaaggttcttttattataaacaagaatagacaattttcagattgtaagttcatagccatcaaatttgaattttgatacaccctcatacaatttataaattagttttctttggtgatatatacaatctataccaccctgtataatatttagaattaaaagtaggttctgtataatcaacaactgcctgctccctagggtttgttcttggtttataatgatatctaaattcatcactaattacaacagggtcagcaaagttaataataacttcacccaattcatcccctccaagtgttttagttatagtattagacacatttaaaacttcttttattgttgaaccaaattttactccaaatttcactttctcaccaaaacttgcatcaaaaccaaaattagttgcaaattcgatactagaacttattgagttcacttcagtttcttgtccatctacctcttctattgcaatcttaattgttgctccataattttctaaatcccattcaaataatggtaaatcaaggtcaactcgcttagatttcaaacctacaagtttataaacggtataaccaggcatacccggacgagaaattactctctctacttcagccctaaataattgatcaggttttaatcgaaaaaaagatttatattcagttcctatagtcgacttactaccaacgtaggttgtaaccttaaattcatattcaccttcagtccaagtaattatagaactatttgcaggtaaaactccaccaatcggaatactacttttaggatccccatcctgatctgctatttttctataaaatccgagagcatcccccatcagttcaaatccaactaaaaattctttcatattataatcaaaaggtcctttatcagtagtaggagttattccataatatatataatctctttgccaaccagttgtatttttatatattttataagcttcgtaagttttcttcatatttgcaggaagataatcctcaggattatcgaccttaggtaaaggaacaggtc

SEQ ID NO: 5820 - DNA, 140 bp, Unknown
  gut microbiota DNA sequence
cctggcaagctaaaccggacctgaaaaccataaatttcagcgaaaaaagattttccggtaaagtaacccaattatccataatccgatagaggtgagccggtattttattctataaaatttttctaattcttcctttgcca

SEQ ID NO: 5821 - DNA, 382 bp, Unknown
  gut microbiota DNA sequence
tgggttacgaaatatatgtccgtaaagactatgccacaaagagaaacagtaacggaacagtgcgcagacacttcaacgggaatgtgatattacacgtttcaagagaagtaatcaagaataaactgctcagcctcgaagccatgaaagttgtcaccaaacacggcaaggaaacatgggtgtcaaaaggcaggacttatatgattgacaatgaagcgcacgagattgtagctcagtttaataccgaaatacgagggttctacaactattactcaatagcaaacaatgcatcggcattggggcgctctttcggctgcattatgaagttctccatgtacaaaactcttgctcaaaagctgaatatgtcagtgagaaaagtcattga

SEQ ID NO: 5822 - DNA, 7352 bp, Unknown
  gut microbiota DNA sequence
taataagagtatctaatgaattttcttgtatattatttatataaactttttggtactcatatatataacttttaaaagttgcataagctatttcattcttttcccatgattcattattttgttgcttgttgaattgcttttttatatattcaaattttattataagaattatgtttaatactattagtagtataatagttgttgttttcattttttataatttgtattttctgataaaagaatattccaggtcattataattatctattgtggcaaataaataggtatcattggcatcgacacaaatggaatagagaagttccggacaagggtagatgtttttaatatttcctgaccaatccatgacaattaattgtcctgataatttctgaggctgattttgcaattgtattccggttttatttgctcttaagatatagcaatatttgtttgtaccacaaatgcttagattataaaaagaggcttctggtgccatcccggaagctacggtagataataaaggtttctggattttagaaaaacagtgttcttgtaagagtttaccttcatcatcgtacaactggatgagatcaaaataacgataggctactatgatttttttcttttgcgggtgaacacaaatggagttcaggtaagattgatcttcatattttttatcgggatatcggaatttgtgattaaattttatccattttttttctttactcctactattatatataaagaaagatccataattcatgtcaatgcttctcccgacaaaagtagagtcgtttaatatattcaaattatcggtaaaatacaatttagtaggtaaatatcgtccttttatttctttttcaggctgaggattttgtatgaattttgtcaggttgaaatatttttcttgaagtagattaatgtcaaatatgtgaataatggagtcgtggcagtcgataaagttagtattaaaaaattggggcatattgaattctgaaaaaagtttacccttgttgcccacactgaatttaaaattgaaagctgtgtcatagacatgaatgaatttttcatcagcatctccataagcgatcataattaataaagaatccttggtaatactgtaaccaaagctattatttgtaacttgtttctctccgatcaaagttaatgattttgtaatatttaaaggagtgatcggtatttctttgcaagaatgtagagaaaaaactataactaataatgatattattattctcatttttctatgtttattaaaactatgctatacttacaaatatagcatagtttattgttgattatttattaaataatttgcaatcaccatcgtaggtgggaaatacccaatgagctaaacagtctccacaatataaacaagctattgcaccatgggcggggaaaaaagagacgtttccttgctcacactttttaaaatcattacctccatctcccccttcggtatcattagcaaatgcaatttgtgataattggaggcttccagtgggtaatgaattataggacggaatagttaaatttatagtaataatacttagaattgtaactgaaagaaaaatttttttgtatttcatcataattaattcttttattcaaaacttttacaatgtcctgttcctgttcgtaatccgacacgggcagatttacagtttccgcaatacttttctataggtaaataaatatcttttggatttcctgtttctccggtaaaacaagaaaattcttttagacttggtccacttccttctccagaacttgctatagcctctaaattatttagaactatattaaagttgctgtttgaagaagttgttattgaaatattagtaatagcaatactaataaaacaaatgaatattaaataatatttttttttagctttcattagttgtcgattgattttaaatttgtatattccaaattcttttttagtataaaaatttactattaatttttttcagatttagcacctctctttcttttttagagggagtgtcgggacggaagctgatttgatttggaaaatgctgttcagctttccgtcctttttctcctgggttagacaatcaagttgactttcatgatagcataatcgaaaggattgttaatttttaccacgcgcgtgaaaatttattcgattacattaccacgtatctttaggttgattttgtgtccggccacattgcagcggacctctatgtttttaataaacataccgagtgaattcgggctgtatacggtttggatctctcctgattctcccggtttgatggggcgttttttccatttcacagcagtgcagtcgcacgatggcactacattgtagatcaatagcggagctgtaccggtgtttgtaaaacgaaatactgctttttgttctgtcccgtatttgactgagcctaacgatagggtatccttttcaaaatggatatttgtgggagtgacgaactgatcttcactactgtagccgggctggtgaaaaatagaccatccggacaagagcaaaagtattattactgtgatgaagagcaaaatgttgaatttcttcattatattgaatatttatttttcaaaacaaatttaaagatgaattcttgtttcatgaaaaaagcaacattctataatctacccaatttataaatttaaggtaataatttcacatttccccttttcgtgcgacagggcataaatcgcatccgttaccgggtcgtagctgatggacgagcaactattcgatagatggtaggtgcggacgtgtgagccgttccagtcgaataccagaatcacgcggcctttgtcgacatcattccggtattgccggtaggtacgtccggaatagagggcaaaaatgtaatcgtcggaagtggtcaagtcacagaaaccgaacagattatggtcggtgtaggctaccggataccacattttccggcctttgggacgttgcagccggatacttactccgggccggttgaggtgtacttcgttaacccggatcagctggtcttcccggatgtcacagaggtccagacaaccgtattgcatattggcacaggcgagacgggtctggggccggttaagggccaggcaattgctggcgtagaaaatacttttcaagctgtcggataaggacggcagggcgcattccggataagcgacgctgtaaatatcttcgttttccgccgggtttgtgctgcaataacggcctgaggtataaattccggtggaaataatccggttgccggcccggacagctcctaacggcgttttaccgtgggtcgtgagggaggtgaacacagggcggtaatctgcttcggtgcaatggttgagatcgatttcaaccaaacggccggtgctgaaatccaatgccgaaacgatattgccgttgaggtggaggttcaggtagcagtgcccttcgccttcgccgcttcccgccggtactaaatgatgcagggttccgttaaggtgattgtaaatggcaaagcgataagcgctttggggggttaggatgacatacaaagaatctttacggacgattttggtgggatggacgatccccagggcgtcgagattcaggttatcggtttgggcgaattgcaacgatcccgcccgggtatgtaacaaaggggtaacttcttctgtaaaatccggctctgcctggcaggcggaaataaataaggcgataaaaaggtaagatagctttttcatatcgtattactctcctctcattaatccgtgatgttctccatctattccatttttatctataccgacacatatataaccggcctggaggcacaggtcctttctttcgccgtcagggctttcttgttctgccatcgcttcgatattggctaacgtcagactggttttcgctgaccggtccgagaatacgatattcaggaataaaacagataaaataattatcgttcctgtcaataagattctttttttatgcatattaatttttatttaaatttatagaacaaatttacaagggaattttatctttgtaaaagtttcaacattctataacgtaccggacaaaacaaaaatgatgaaagggaatatcaggatagttttctttttatgtattggtttattgatatgtgtgttgatcggtcagggagggtggttgtataaaacccggaaaatggagataaatcgcttcaggcaggaagccggtgaccgactgggggattcgtttaaggaatttttggatgaggaatggatgacacgtaaagttcctttcagctacggactaaaagaagataaaaagacatttgtttatggggatagctgtagggttagagaaattactttatcttttgttgatcagtttcgggaaatgggcagagctgttttttacgattatttatatgagcaacataattttgatgtttttcaattggactctttatatcgaaagaatttggaaaagacaggtatgaatggattgtccggcatcctgttgcgggattcggtggggcaggttttggaagtaacaggcgtttgcgaaggagaaatacgtaccgtttctgttgaagccggttatcgttgccggcaccggatagaagcggtttttcaattgcctttgatcttccgttccatgatttggcatttggtgggggaggggatgtttttctttgcttttatcgggtgtttggtatggttatggaaagcgattcgtctgacatggcaaagcgcaaatgtgcagaccatggggatagcccatttggaacatgaattgaagaaacctttagctgcagttacttcggcattagaaggaattgtgaaccggaagaaccgggaattgacggcgatacaggaagaaaaactgaaaatggtggaagtgcgcatccgcaaaatggcagagattaccgataccatgttggtgaccttgaaaaacagccggttggaggtggagcgggtttcggtggatatcgttcaggaaatcgggatggtggcagagatgtttagaatattgtatccgtatgcgaggttggaatttcaggtggaaacaggagaagagaaacccttgctcgaccaggtttattttaattatcttgtgatcaatttggtcgataatgctattaaatatggtggagatgaaccttgggtgaaagttgttttttaccgggaaaattgggattgggtactgacggtaacagaccggggaatcgggatgccggaaagagtgttgaaacggatattccgacagttttaccgggtgaaagataaaaaagtaaagaataaaaccggttttggattaggactggcttttgctaagaaagtggtgaatgcttatggaggggagatccgggtggaaagtgctccgggaaaaggcagtcggtttgaagtccggataaaagcagaataaaatggcgattattaaagtattgtgtgcggaagatgatcggttgatgaggttggaaatgaaggagaaaatgacagcaaaaggctgggaggtaattgaggcggtagatgggaaggaagctttggtgaagtacaaaaagtatcggccggatattgtcgttttggatgtgaatatgccgaaacgatcgggactcgaagtattgcagttgattcgggtaaacgatttgcagacacctgtcgtgatctatagttcgctggcagaggagaaggatttgaaaattggcctttgtcagggagcacaggtctatctggtaaagaattacagtgtggctcttctattagaacaggtggaacggttgattgggaaaactgcctcttcggtgatcggtttgacggataacatcacttatgattttgctaaagctgagttgtgtattggggaacaacggcagaaattgaccatgctcgaaagtaaggtatttgccatactgtgcaagaataaaaataggttgtcgcccagggaagtccttttactggccggttggaatagtacggcttataattacgaatcacagttgaataaagtgatccggaaattgagaaaattactgatgagggaaaatcaggttaaaattatactggataaaggtaatggatattggctgaaaacggaggaggatatacatatttgatttgtctatgaaaaccttttttttatttgtcgcattcctgatttttacttcttgtcataacggcaatacgaacgtatctacaggaaataatacgattatttatgactttccggtcacgcaaattgccgaaagtgaaaagatagatctggaaattatagggataaacgatcttatggttatagatacccttttgtttgcctttaaagcgagtggttataatgattttttcgaaatatattcgactaataactggcaatacttgggaaaattcctttctcagggcagaggccctgatgagtttctatctgtgcaattttcccaggattatttttttaaagatgacaatctggttctatggatctcggatggggctttacaaaaacgggcattattaaacattacccaatccctccggattggccggactgtatgtgataccattttccggattacttcagattgtagttattttcaagtaaacgactccatggtgcttttacaaaaatatgtccctggtaatatctgtctttccgtgcaaaatcaacataccggccaaacgatccaggaatatgaatttttgaaatcctatatcccgaaatcgattcctatgcctttattgagcatgggaataaccaggcatccggagaaagatttgtttgctggcaatatgttgttttttaatcaaataaatgtattttccagtgatatgaaaaccaatttttctctgtcttatcaacctcccatcgatatttttgagacagcccacttgccggaatcagattttattctgtattattcgtcattacaagttttttcggaatatatctacgcgctttatgttaataagaaagatgatttattttctcatgcggaaggagagactgaaattcacgtattcaattggaaaggagcccctatagctagaatccggatccccgacaatatcatctattttacagtggatgaaaagcatcattatatatacggattaaaaggtaacgaggaattataccggtataaatttgaattatgaaaataaagtatctagtgattattttcactgtgtataccctcacctcctgccactttttcggacaggatgcaaggatgactttagcctggtataatcgggaaatgatacttccctccggattgccatgcaagatgatgggaaaagatacagtatgcagggcgaccgcaccaaaattcctctaaaaagtttatcattgcaaaatgaatacctctaattatttt

SEQ ID NO: 5823 - DNA, 1482 bp, Unknown
  gut microbiota DNA sequence
gtatcggaccgcactatgcagttgtatttgacaattcacaaggctttactatctggggaaattggggaccttttgcagcggccaattacaatatgggatggcattcaaaaggaggacatgaccggactttcggaactaatgcaaaagcatgggattggtgttctgtgaacaatgcgggctttgaatattatcagaatgccaaaaaagacggtatcggactaccaccacacaatcccagaatctgggttttcagacatcaatccaatgcaagttgtgctccaatgctccggcgtgtatggcatcctatcggttatagctcaaattcaggatggtctaacttttttatcaatattactgctggaaggttattgacatatacaaatactcttcttaaatttgctttgccggatattgtcattggaacaggaggtggttataatacatacgatatatatgaaagtgtaaatcatgaattatcccatgccagccatttcaacaaagtgggaagtgctttttgggcaaaatatgtcaattatatcattacgtatggcaaaaaatatgaccacccttatggagatgcaagttgtaataattcaggtttttgtggagttggtgaaatgtggggatatgcgatgggatatattcgaacttacgaaaaatatcaacaaaaacccaaaaatggtcaaagtaaatggttccaaccaaatttattatatgatctcatgacagaaaagattttaaccaaaaaacagatttttgattgtttgtcttcagatgtcacttcacatgctcttttgaagcaaaagatgatttcaagatatccttcaaagaaagattcaataattgccaaattcagcaggtatggattttaaattattttgggtaggtatatttatatttttgatagcctgtaatccatcagattatagagatccgagaaataaatgtgaatggttcttaaaaaatagtaccggtagtactattattctattgaaaaatttcgattcgccaaattacaatattgttcctaatgatagtactattactgtatatggagctgggatctccagttttgaagagacacccgatatgttcaattggattttagatgctattgtcttagaggattcattaacaatttttgattcgaataatgtcctccttagaacttgggttcaatctcaacggaatgattccggtaagcaatttttcaatgagcagtattggcaaaagcgggaatggaaagaggggaaatatacgtatcacgaatggacgtttgaattgcttccggaagaccttgaaatcaaagaacaagattaaccatagcattaataaactattcttagacattctctaagatacgtcacatgaaaacgaaccctaaaagttttttttaggagattcaatttaatacagggatattcagtaaatagtataaaattagccaactaattcatacacaaaatgttgcgaattagttgg

SEQ ID NO: 5824 - DNA, 137 bp, Unknown
  gut microbiota DNA sequence
agtccgtcgagttcggtgcgaaggtcaacaacatacagatagacggcatatcgttcatcgaacatcttgcgttcaaggctttcaacgaaggtatacgcctgaaggactgtatccgcatgcagcagaagctcatgaat

SEQ ID NO: 5825 - DNA, 19630 bp, Unknown
  gut microbiota DNA sequence
aattacaacatatattttttatatgaaataatatattaaaacatagtaatttataacagatttacgaacctattatgaaattaattgtatttatatttttgcatattccaaaaagtatttatatttgtaatgtaattataatattaatgaaaagaaagttatagttttatctatagaaaacgaaccttattttttttgatacataaagccatcttatttataagatcggcttttttatttttagttcaattatttgatattcagtaagtcaactcttcatcataaagacctcctttttttcgaatttcaaccaataaaaatgttcctttttattggtcctattgtataaatatcagataaaatatgtaatgtttgcccctgaattaccttttctattcttctgtatttaaacagagaaatacatacacatacatacacacacatacagccaggggcaacattacattttgtgttttaccgatattaaagaaaataaagtggagtgaatatacataccggcttggccggtaacgaatggtataacgataaaatgaaaatatgaaaagattaatcctcggaatttttcttgtcgtgtggtggtgtggaaaccttgtctgcgcgcaggatattgcggttaaaaccaatcttctttattgggccacttcaacacccaacatcgggtttgaattcgggctgggcaagcgtacaaccctcgatctggtgggggggtataatccgtggacccttaataaagacgataataagaagatcaagcattggatggtgatgccggaattccggtactggttgtgcgaacgtttcaacggacattttttcggtattcataccgggtttgcagaatacaatatcagcggtgtgcggattcccttccaaaataagtctacccaagagcatcgttatgaggggtgggccaccgggatcggtatttcttatggttatacgtggattttaggtaaacgctggaatctggaagcgaatatcggtgccggatacatttacacgaagtacgacaagtacgagtgcaagacttgcggtcgtttcaagggtaaccagaagaagcattatttcggcccgacgaaagcgggaatatctcttatctacattattaagtaataccggaaaaagatgaaacatttatatatcatattcttagcgttactggcatgttgtccggaggtgatacatgctgaaaacgagatcagttaccttgccgaaatcgggatacagaaccggggagttgtcaagaaaggcagagaagtacaactgaccatgctggttgatttgagtgaacttaaaatcaagacacagcatacgatagccttgactcccatattgctatccaaggatggaaaccgtgaagcggctttcccaccgatcgtcatagacggtaaagcccgcaacaaaatgtatcttcgggctcagcgtctggaaagtgtagatattcccccttatcacgacgagaatgcacaggttgtcatccgtcgccgtaacggtaaagatcaggggtacgagtatctggcgacagtcccttacgaacactggatgctcgatgggcggatcgaactgcgtgagcaggtgtatgggtgtgtaaactgttcggaaggtaaagcggaacaggtcctgcccgggaatattcttcccgctttcatccctgattacagaatttgtacgattgtgcccgaaccggaaccggtgaaagtccgggctgaaacccgtacggcgcgtctccagtttcgtcaggatagttacaggatccttcccggatataaggataatcgttctgaattggataccgtgtcccattcgattcagctagtcgaggataacgaggatgtttccatcacgggtatttttattaccggttacgcttctccggagggtactgtggctcacaacctcaaactgtcggagaatcgtgccaaagcgttggccgactatatttgccgccatgacaagttcgaccctgccatgatacacgtcgattggaaaggtgaggattgggaaggtttccgtctcgtgctggacaagtttccagggcttctgaaacgtggagaggtcgtgcgcattatcgatgaatgtacaggagaccgtgatgtctgtgaaaaacagttgcaggaattagtacctgccgacatctatcatcgcctgctcaacgagatatatcctcttttacggcgtaatgaatataaaatagaatacaatgttcgcaacttcaatctcgacgaggcccggcgcatggtggacgaacgtcccgatttgctgagcttgacggagatgtataaagtggccgcttcttatgagaagggatcacccggatacgggaaagttatgcaggtggctgcccgttacttccccgatgcaccggccgtcttgaacgacctggcattagaggctatggcaaagaaggagtatgacaaggctgtgcaattgttagaatattcgaaggttaccttcagcgattccacgcttctcaacaccctgggagttgcctatgccggggccggagagccttataaagcggaagacgctttccgtcgtgccgccgaagcaggggtggaagaggcccggcataacctgacacaagtgcaaggagtaatagaacaattataattttcaataaaaccattaatttttgtatttatgaaagtgaaaaatttagtattgatggccttagtggctacaatgggacttgtttcttgcagtaaggacgagcatgaagatggtgtgaaaacggatactatgcccaaaagtgtgacgatcaaactgcctaatatccaaaagactgtgaagtcacgtgctacgggtgatgcaatgaaaggtggttcccaggttgcgttggaaaatttcaaggtgttctttgtggatgctgccggcaacctgcaaaccgttcctcagtatgagaatcaggatcaacaggtctatttcagtaaaacagattctgagtgggctgaaataggtgagaacggaaaagatattacctatcattttctgcccgctgccacctcgaaagtcgttgtcgtggggaatatcggtgacgtggagtactctacaattgcaacccgtgttgatcatataccgaatgacaatggaagcggtcacccgacctatcctctttatggtgaagatgagcttgaagaaaaaaaacttgacgggagcgaaattcatgacaatgtttacacggcgaacgtaaccctggagccacgtgtatcgcgtttcgaaatctatggattccagtatacccaagagggagatgttcccaagtatacctctgtcaagttacagaaaatagcattgaacaattactatacacagtctgatttcgtgtctaaacttcctgtggaggatactaaagtatttgaaactatcgatcatacggaagtatggggttggatcgaagatcgttccgcaccgtgggccgatgaattgaatttagaattggctgtcggcgggaaaaaattcgtagatggtacggatattaccgatcctgctgaagatggagaagatgccgccggaatcatcacttacggtttagcacacgtgacggatgctgctaagaatcctgagttgttgctcgccctgcgcggtgtgaacagtaattcagaggtgcctctctatttacgcggacagtttaccaatgcttctgcctttacatcaggaaagatctaccgggtgctctactcgttcacggatggtgatttcgacgaacctgagcgttgcgtggagttaaatgtggatgtggcagactggactgtcgttcctgtttctcctgaattctaataattattaaagggtgcggaatggcgggtgtatcccgtcttccccctcttttttctccttgatgaaataaaaataagatttatgaaattgacgagtattgttttctgtctggcgttgttaggaggtgcgttaacttcttgtatcgatgaagacatagatgactgttttagcatcaacagattgacactcagctataagggagatggtacgacggagatattccccgacaagatctgccgggtggaaatgtatgttttcgatgcagagaataaatgcgtcaattcgcatactttatccgacgatgagttagcaagccgtacggctttgcttcccccgctcaaagccggggattacaggatcgtctgcgtgggaaacacccatcacacgagagtggagggcctcaccacttgtgactttaacaaaatagtatttgctgacggggattattttgccggtaaacaggtttccggcaacgactctctttatcacgcttcaacgtcctataccgtgctgccttttaccggcagggaagaggatgatcagaccaaaacgatagaatttgccagctcccactacgatttgttcgtagaagtggttgggattcccgctgtgggaaaacgtgcaggttcattgcctgtacttgagatatgtggtgtctcgccttgtaccgatttcgagaaccgggcatgcggagaggctacggattatttgcttgaaactacatatgagtccggcaaaaaattgctgacggctcgtgccaacataatgcggcacatgaatcacagggacgtgaacgtctgtctgcgtcaggcttccggggaagagttgctggcggagatcaacctggctgattttttggctgctaaccctatgatcgattgttctaaacaagaggtgctgattccgatccggatcgaattcaaggcgggcgcgataaaggtcaccgttcccgaatggtatgttgagcaagtgaaacctgaattttaagacccttaaaatatgtgaaacatgagaaagatactttatgcggtgttcttattcggctgttgtgcttctctgctctccggctgtatcaaagaaaaatatacagtcccctctgaaaagggtgatgcgttggtgcaactgaacataggcacccgggccgtagaggagaccgacggtattcccacaaacaacgagactgttctgcactcgttgcgcgtatacgcttttgttgatggacaaccggccggacacttctacacgaaagacggactggacgtgaacaatccctcgttcctgatgcacctgaccatgtattccaccatgacacagaaggtggacttctatgtcgtggccaacgaagcggccatggaaacaccgggttcttctgtcttattgacggaaaacacaacggaaacccagttgaaccattttacattcacgaagctgaatacgtcgaaaggtttgccgatgttttgcaaacagacggaaacaatcgacttgacgcagttgtcggataagaccccggccgatcccggacatgcagggcacacgttgcttcggcaggaccttacgtttgaactgaaacgcccgataggtaagctcggcgtattcgcagccaagcctgtcggagagaatagcagtctgcgtgttaccggattgaccgtactggcatccggaacaaggacacgcaattacctgatgccgcaaactgatgaaacactgaaagcgataacaggtattacaggtgatatcagcctcgaagttgtcgaagaagaggtaacgaaaactttagctgagaatgcctcgcaaaccgataaggaaaacccggcgaactatacacctgttctgaacgaatctttctatcttttcgaaaacccttggggtagtacctcatgggacgttaagggggataacgacggtaatgttcttcgggtagactatgaattcgatggaaacgcccgaagcggttttgtatatatgcctcctatcgaaaggaataaatattatacggtctgttgcctgatgcacaacgatggtaagataaccgtcgaatataaggtggccgactggaataaggagaattacaatatcacttttgattatccgagttacgacaatccgataacacctgctgacggaagctcggtaccggaagatggacaatacagccaaccgactatttggtacaataacgatgctacttctgaggagggcagttactctttcacattctcgatattcgggcctgataaacagatatgggttcccacattgcttgatgccacagctggagattttgagataacggtttatcaaaaaggagtgcttgtcgatccgggaaattatgtggcttcctctgacccctaccaaatcaagatcaaggcattgaagtccacaaatgtggacaaaacggtaagtctggctatctcttacacgccggcgtgggatcagacaggtagttcattgttattaattaacgggcagagcgcttccttgaaatggcaggggagtaacattcccgaggcaattgtgataaaacagatcgaagtacccataaataactaacgagcgatgaaacagctagtatatcatattattgtttgtggcatggcggtactgtttcttaccgcctgtgaaaaagacgacgatatttcgggcagaagcatggaaaagaacggtaatagcatcattcttaatctatcgtcggagacattgcctgtgagccgtgccggcaatgaacccggagtggaaatggccgtcaaccatatcgacgttgtgattttcgaagagaacggagattggaaatggcacgagcgggtggagggcagtgaaaccggtaacggtaagatcaccttaacagctaagaggagcagtttcaataaagacacaaagtattgggtatacctgattgccaacagcacagctctggcggaaatattcgatgccaaagatttcgatctgaatagactcaaggccatgacgcagagcgaccggaatatccacatgacaggattatcgcaggtgagcggtgccccgcggacttttctgatggacggtgtggcttatgctggaaccgatgaacccaatgcccccgaaacggtaactctaaactacggaacggctacggacaatacggaactgcaggttaccttacgccgtgcggcagccaagattgtcgtcaggatacagaagggtgacagagtaacgttcgatgacagtaaggaagcccataatgcaggatattatttgcgcaacatgccttatacaacatcggtaatagcggatgtaaacggtacggctgatctgacagataccgataagtcctccggcagctatttcaactggactgcggatttaattaccgtgaccgcctatacctatgctcatacgtggataaacgaaagtgcgcttgaaaaggaagtacgtctggttgtgaatattcccatgaagtatgagggggatggagacgatgcacagcttcgtgagagcaactggtaccagatccctgtcagcgaaaagaaagcactggaacgtaatacctgctacgaggtggtagtcagtgtgaatgctcccggagccaacgacccgtcaaaaccggttgaattgactgatatgacttattccgtgcaggactggaatgaacaaacgattctggttggcggtgaggatgatcgtccggtctacctgacgctgaatgaaaacgagatagagatgcataatatggcggatgacaatactacactgcgatttgcatcgtcatcggaagtacatgctgaagttgtaagcgcttattattacgacaagttcggagtgcaacgttctgtagatgctcagactctcaggcaaatcaccataacccccgagcctgatgtaacaggaaatatcggcattcatagcccggtaccgaccaacaacacgatccgctatatcaaagtgaaagtctttaatgatgatcaggtagaacgtgaggtcgaaattatccagtacccgttggagtacatcataaacatacagagttggtattcttatcgtgacgattttaaaacaaataacgcccggcctaccacgtatgagtatatgggagaccgtatatacggaatcagccttgccacgggaaatatatccagctggaacggacaatatgattacgaagcatcagaaagaagtggttggtggggtgaaactaatacatccagcggttttttccgatctaagtttgtttccagtgtaacgaacggaaaatcaaccattctgcactattattggaatagtagggagcagagagagacaagcagcacaggagaatacaatggacgtttgtaccatattcgattaacagcaacatcgaataaatatacagtgggacgtcctcgattgattgaagacgaaagtaatcccggactgatggttacagatcccggaaaagataatgctcaactggtctccccatcttttatgattgcatcttcattaggtggctttatgttgggggctggaaatttgacattggatgacagcgacaatagtttgagggttgcacgggagcattgtgctaattatgtggaggttgcagaggatggaacggtgtatgacgattggcgtttgccaaccgaggccgaattgaagattatcatggattttcaaggaacagaaaatgcagatgcagatgctatagattatctgttaaatgctgcatattattatagtgcaagcggcagggtatccaattctaaaaacaatatgaatggaaccggtgttcgttgtgtccgcgacgtttacaatggcaaatagaccggtaattagtacgaagaacagataaaggataagactatgataaaaagagtaatacatacggcaataactttggctgtgctactggtctcttgccggcaagatgatctgccggactcgatgcccacggcacatgaaggttacgtggcccttcggttcagtgccgatattccggctatgcaggaggtggtaacccgttcggtcgatcccgacggaggtggtgtacaggacatgacactgttctgtttcgacagttacggtctttttaccacgaccgtcgaggccaaagttacccctaccgggaatggagccggcttaacaggaaatttcgaggccgaagtgcctgaaaatacccgaaccgtacattttctcgccaatcagaatatgtcggaattcaaggaggataaatttcgtaacaaatcggaggccgaggttatggctctgctggagggctcgtcggggcgtatgatctattgggcacgttttacctgcgatccggataacgatagtaagatcgatgctcaaatggccgacaagggaaatacgataaagatgatccgcaaccatgcgcaggtttccatcgacaatccgatcaacgggtggatagaggtgacgggttttgtagcctataacacgaatgcctttggtacggtagctccctatcacccggaaaagggattcgatttcgagtggccgggcgaagacgatccgtttgtcacacttccgcagaatgatgccaggatgagcgacatcacggatgtgaccacggccacgaaacagtatatcttcgaaagtgaaaacagcgcagatgatcctgtcagtatcatcattcgcggacatgttccgggtgagtccacggaaaaatattatcgggtgatgctgattgacgaaaaaggcgatcagattctcatacgccgtaaccatcattacaagttgaatatcaagggagccctttcttttggacaggaaaacttcgccgctgcattgacagcagcggccacgaacaacgtctggatctccatttccgacgaggtgaacgaggtagaggatcagaattacattctcacggttgaaaagaccggctatgtgatagatggagacgctacgggcggaaccggaaactacacactttcttatactgttaaaggtaaaaacggaacgacgataacaaaagacgataaggcagatgtctcgtggatagataacctcgtggctagacaaaatatagacaatagttttgagattgaagacgggattggtaagggcagtatcgtcatctctctgcttcctttgggaaataacgagaagctggaaggtacattgcttgtaaagaaaggacgtctgcaacgcaaaattaaagtgatcacagtgaagagacaggcgttcactccttcatgggtaggcacgcaggtgtacggaaaaataaacgagaataatccaaccgaagaccgttcgcacgtaacggtgatgtttaccattcccgaaacatgtcctgacgagctgttcccgatgaaagtgtacctatcggccaacgaattggatatacgttacgaggcaggtatggcattgcccgtggtccgtaatggcgacaaggagtggtacagtagtggagacatcaaaacggaaccggactataaatttctatatacggtcgaacaggccggtgtgcaacgggtttatttcgagaatatcctgtcacaggctgccggatataaagggacgctctatattgaggccgaacacttcgaaaccatgactcgggaatttacgttctctgacacccgtaagtccatcacggtaacgggactgaaagcgtatagcgccgatcctacccaaaatccggatggatatgcagatgacgagtatgtgttataccgcctggtgccgcagaaggtcaatgctaaggtgcagtttgatctgcaactcatgcagaaacaaggcgatgaagtggaagatgaccaaagaggaacaccgttcaatgccggagagaaagatgagttcttgctatattcacagtatttgtcggattataaagatccgtcggaagccgatattgtgtcgtttgactgtaatttctatactgacgaggcagatacgtggtggagaaagaacaatccggcaggcggtcgtatgttgatgttcaaaccgataaagcccggcagtccgacggaaaccggcaaatattcgatttatatgtacacgaaccgggcaaaaagcgcggaagtggtcaggattgcctcgaaccaacccggtaatgaggcggtactggcggcagatgccggtgatatgggtatatatgccggtaattcataccgaagcgttacgtttgagctggccaattacaatccgttccgtttcggggcacgtgtaaaatatgccggtgaggattggaaagggaaagatgacgaaccggataggtccgcttcagcggcagatattcctgaagtggtaacccctttggtatggacttatcaacccgaacaggaggtggatattgccattgacgtgaccagtttttgcggatcggacggaaactcggtagatccgttcggcaatgagttcgaaatttatatcgatgcgcccatgctgaagattgatgaaaaccgcttggcggcaaacaaattgaatggaacgaaactaaaggccgatcctgcggttccgggacgtttcatttatacagtggaggctgacagggaggccgaacgtaactatggtacaaatgcaatcgaaaacatagacaatacaacgactatttcagtaaaccaaaacggagagcgtaaaaccttgccgtttatcacaaatagcattgtaagtgcgggcgacatcacgatttcctccaacgagaaacaagtagtgtattatagtaagactttccgggtaaccaaccggtcgattacgggaacgctccgttatgcagccgctgacggtgtaaaggatgtgcctgtcggtgcgttcgtctctttcgagcgtgtcggcaacaacagtcgtatcggttcggttaccgttacggctgacggccgatatgaattgcgcctgcgtagggagtacgagttcaactggtattccgacaaaatcgagttgcattacgaggatactgccggaaacgtttatcacaaaatctacgataatttggctgagctgttcgcaaagccggatattgaacttcaagcggctaccggtaactgatattttgaatgatacaatcggaaactccgaacgtggaagcgtccggagtttttcataaatcataataccaagcgacatgaaaattctgaatctaaccctttgggcgtgtatcttctgtatcgggcttatgtccttcgctcaggcgcaacgaacgacggaggagtttcggttacccgaggtacctgttcttctgacggatcccgcagaacgggctgcttatctggccgtgcattactgggattatttcaattttgctgacaccaccttaatttcccggcctgaaatcacggaacaggcatttgtcgattttatcagtattcttccctacacggcaaaagtacaggttgccgtcgacacgcttttccggcgtgctatggtgaaaaaagagatgttgtaccatttcatatccttggcggacaagtatctttacgaacccaactcgcctatgtacaacgaggagctgcatatcctggtactgcgttcactgctcgggaatcccggcttggatgattgggataaagaacgtccccgttacctcttggaaatggccctgaaaaatcgtccgggtgatgtggctgccgattttacctaccggacccgcgacggtgccatgaaccggctttcgggtataaaagccgattatgttgtgctttatttcaatgatcccgattgcacggactgtcaacgtgtgaaggaggcgcttctctccttaccggttatgaatgaatttatgaaggccggacggttatgcctgctatccgtgtgtgtggagggtaaaacgccggcctgggaaaaagcgatctttcccgcccgttggatcgatggttatgacgagggaaaacggcttacccgtgaacaggtatatgatctcaaggcaatgcccaccctctacctgctcgatagcgggaaacgggtaatactcaaggatgcctcggcagaaaaaatcgaggcatggctcgctgaacaatagccgaaagagagcagcgtggggagtacaagctattttttcaaaaaaaaatcatttttctgttatactttttttctttttcggatttaatatataaaaataacaaaaatctgaaaaagcatgaagcgtcgtggatatgatatcggtagggttgtcgatctgatattcgaatattggttggggcggatgaaagattcggagctcgaggaatacaggcatatgaaagaaacgacagggttggacaagtatgcccgggaatttgaggaccgggagtggataaagaatgcattggaagaaccggatatttttgagacggataaagcttaccggcgattttggagcatgacggccggaaaacggtctatcggccgccttcgctggagatgggtggcctcgttgctgattccgttgttggtcggtggaggggtcggactattcgtttggtggcaacccgcttcgatacccttgtcggaagagatcggaattgtaaaaccgaaagcggtggtgaccctggccaatggagaaaaaataaatttgggagaagaagtggctcctatagctgaaaaagacggtacccggattcagtaccacgacggacaattggtttattcttcccaatcacagacagcaaaaccacaagtcctgtacaatgaattgaccgtcccgcgtggaggtgagtattcgctggtcttgggcgacggtacccgggtttggctgaatgccggttcgaagctgaaatatccggttcgtttcaacggttcgcaacggcgggtgtttttatcgggagaggcttatttcgctgttgaaagagatacagcacatcctttcattgtttccggttcatccggggagatccgggtcttgggtacagagttcaatatccgggattatgaagatgaagaacgggttgtgactaccttggtgaaaggagctgtcagctataccggcaagaatttgaaacagggggaaatagttatgaaacccggagaacaggtcagggccggacgtcggggggagaaaccggaattattgcaagtgaatcctaaagaatttataagctggaaggacggcatttacttctttaacaaagaatccctggaagaaatgatgaagacggtcggacgtaactatgatgtggaagtttttttcaatggagaagctttaaaaaaattacgcttttcaggtcaactgaaaaaatatgaacgggtagaagaattcctgcaatttatagaaaccggcggggatgttacctttattgtgaaagacagaactattactgtaaatccgaaataaaacgatacgacaattgtagcagcaattgccgtatcacactgaaaaattattggataattaaacaaatcaaagttatgaaaaaaaaatggtattacaaaccggggctttcctgggaacgacgaaaaaaatttttgttggtatttctactgaatgtcttcctgttttttggggtacaagcccagacacaccgggtcactctgaatgtgaaagaaacctctttggaacaggtgattaaagaattggaaaaacagaccggattacaatttttttatagtcaggataaaatcgaaaagattaccggtttatcgttacaagctaaacaagaagattttaaaacgattttggaccggttgttgaaacacaccccccttacttttacggtaatggacgatgtggtggttattaaagaccgggaaaaaacggtttcaccgcttcagtcggctattcgggagataaaaggagtggtgacggatgtgctgggaaacaccttgccgggggtgactgtccggatcaaagggacgaccttgggcgggataaccgataccgaaggtgcctttcagctcagtcttcctgagggcggaacggtcttgttgttttcttttgtgggtatgaaacctttggaggttgttctcggggatcaggaatttttacgggtgaaactcgaagaagaaaaggtggaaatggacgaagtggtcgttaccggtatttttcggaaagcgaagtcgagttataccggtgcggcaaccgtagtgacgggagaagaacttaagcagttcggtaatcgtaacttgttgacttccttacggaatatcgacccttcgtttaatattgtcgaaaacaatgaattcggttctaatcccaatcggttaccggaaatacagatccgtgggaattcgagtttaccgaacgttgaccagttgaaagacgaaacaagggtgagtatgaatacgccgttggtggtattggatgggtttgagacgagcctggaaaagttgttggatatcaatgaaaacgaggttgaggcgatcacattgctcaaagatgcttcggctacagcgatttatgggtcgaggggagccaatggggtgattgtcattacgacaaaagctccggcgatgggaaaattgcgcgttacctatcggggagatttaaatctggaagtgcccgacctgaattcttatgatgtgttaaatgcctgtcagaaattagagatagagaaaaaagccggtttgtggagcgagacgaacctgacagatttggcgacctataataaaattctgaatgatatcaattccggggtaaatacggattggctgtcccagcctttacgggtaggtgtcggtcatcggcataacttgcgtttggagggaggagacaaaacctttcgttatgctgcttcgatccagtataatgatgtccagggggtaatgaaaaaatcgtcccgccgtacgttgaacggcactttgaatctgagctattattataaaaccctgaaatttaccaatagcctgatgttggggtttaataaaagcgaagaatcgccttatggtagttttaacgattatgtaaaaatgaatccctactaccggatatacgatgactcgggtaaactgatcaaaagttatatccgccagcatcagaatccgttgtataatgctttgctgaatacctacgaccgaagtgaatataccgatgttgtcaataatttttctatcgaatggcagatcattccggatctgttgttacggggccgaataggcatagaacagaaacatacggagcggaatgtttttaaacctgccgatcatactgattttgccgattattcttctgccgatgtattccggaaaggaagctaccgctatattccgggtaaggaattttcttacgatgctggtttgaatctgagttattcggttacttttaaagaacgacatatgttgtatgccggattggattataatattcgtcaaaataagatcacaggatacgatattctggtagagggtttcaataatgaagatttcgattttttgccgatgggtttgcaatatgcctcgggagtaaaaccagctggttctgaaagcctgacccgggcaatcggtatgacggctagtgtgaattatacctacgataaccggtattatatcgatctttcggggcgtactgacggggcttcgcaattcggtacttcccggcgtttcgctcctttctggtcgacgggtatcggttggaacctgcatcaggagaagttcttacagggaaatccgattgtgaattttttgaaattaagggcttcggtcggaattaccggttctcagaattttgattcctaccaggctttgtcgacctatcgctatatcactgaccgacgctattataattggatgggggcgacgatgataggactgggaaatgaagatttgcaatggcagcaaaagatgaattataatgtaggtggcgaaatgaaattaatagacaaccgtatttctttggcaggcgatttttatatagagacgacgaaagatttggtatcctcggtagatatcccgatggcgaacggatttacttcttatatcgaaaatatcggtaaaatgcggaaccggggttacgaactgaaagcgacggtgtttgtggtccgtaattcagaccgggaactgagctggtcggtgaccggtggtttgatacacaacgaaaataaaatattggaagtttccgaagcgttgcaggatgcacaaaaggatttggaagccgatcagggggctaatcccaatatgttgtataaaacaggatattctactaatacgatttgggtggtacgctccttgggtattgatccgagtaccggtagggagttgtatctggatcgtttcggtgaaccgacctttacctgggattccagggatctgactgcttgcggagtagctgaaccgaaatatcagggaaatctgagtacgatgttccgctataagggattctctgcgaatctttctttcggctatcgtttcggcggccagctttataattcgaccttgatcgagaaagttgaaaataccgatttccgggagaatgtagatgcccgggtatataagggacgttggcagaaagccggagatattgccgcttttaaaggtttgcacctcaaagataaaacttctaaaacttcccgttttgtcgaaaatgagcgggtgtttaactgccagagtgtgaccttacaatatcttttcgattccccccgtttgaaaaaaatagtgggtatggagaatctgacactgaatgtcagtacctccgatcttttttatatttcgtcggtaaagagggaaaggggaacagcttatcctttttcacggcaattttccttttcattgagtgcaactttttaaaatgagatatgatgaaaaataagattatatatgcgataggatgggtactactcctgattgtatccggatgtagcgattggttgtctgtatctcctcggacagaaaagccgacagagcagctgtttgaaactcagaatggcttccgggatgccctgaccggtgcttatatcgaaatgatgagcgataaaagttatggtgaatatcttacgatgagtaagatcgaatatctggttgatttttgggatcctgaaaagggtagcggtgaggaagcattgaccctccaccgttattccgacgctcaggcagtgacgatgatcgatgccttgtacgaacaacaatataaggtgatcttggctgtaaatgccattttggagtatgtcgatcttcggcaagcgatctttgatccgggagcgtatgaagccgtaaagggagaatgcctggctttacgcgcgatgtgccatctggatattctacggcttttcggaccggtaccggcagaggcgacttcagttccgatacttccctatgtggaaacagtgactaaagaattacaccggcatgtgaatttcgacggctataaagcccggttaatagccgatttggaaaatgcggaagggttattgaaacaacatttggagaaacaatccgaaattgaggaagattattttaaataccggacgatccggatgaactattatgcggtaaaagcccttcaagcccgcgcttatctgtggttcggcgatactcagaaggcttatgaagctgcacaggcggtgattacggctaaggatgaagacgggaatccaagattccgtttggggacagccggtgattttagtgaaggccgttttaccctaccttgtgaacaggtgttttcactttatcggtttgatttacaagataaatataccgaattgttcagtggagatggcctctataaaggaaccaaggaaacaacggtaaagaaagaattgtatggaaataccggttcggatatccgggaaatgaatctttggaatttgttggtgatggcgaataaagcgagttattatgtatgcaataaataccaggtgacggaggctacttcggagaaagaagaggataaggttattccgcttttgcgattgagtgaaatgtatttaatagccatagaggcgggaccggaaaccgaggcgcagcgtttgtggaaggagtttttgtctgcccggaatctggttactgcagatttaccttcggatgctgcgctgcggaaagcggctattattgcagaataccggaaagaattttatggggaaggcgttactttttttctgcataaacgtctgaatttgcctaaaaatcaatggctttgggctccttctgacttggaggtaaattatgttttgcctttacctgaaacggaattgagtgaaaaataaaaagtaagcaatgaagatgaaaaaaatgaaaaggtttctgatatcgggattactggcaggatgttgggctgcatgtaattcgaacgattataaaatgtattccggtgaagcttatatacaattctcggaaacaaaagatacactgcaacgttattcgttttattttcagccggaacaggtgacggaagacacagtctggtttgaagtgatcacgacaggatatacttcttccgacccgcgtagttttaaagtggtacaaggacagatcgaagggcaaaataatgctgtggccggcgaacagtataagtttttgacgagatgaattattcggttgaggctggcagcgttaaagccagagtaccggtagtcattttccggaataaactggctgaacggactacttattatttacgattggaaattgtagaaaatgacttctttaagaccggggtgaaaactgaattgcaccggacggtggttttttcaaaagatttactaaaacctgccggatggggaggatatctggaaagtgttgttctgggaccttatagcatcaataaacacatgtggatgattgaacagaccggtaaaaaatgggatgacgagtttcttactgctttaaatgacgagccgggatcggatatgtattggagggacaaattgaatgaataccttttggaatacaaccggcaaggaaatattttattggatgatgataatcgtgaaattacgggattcccggaataaaaagtaacactatgaaaaaatatattttattggcaatcgtggggttgctgttgatgtcttgt

SEQ ID NO: 5826 - DNA, 438 bp, Unknown
  gut microbiota DNA sequence
ataacgggcttttttaaaagtgtcttggcctttttaccactaccggggatactattatatttcgtggagatatgcacactgtttgcgagcaaaaaaacgagaacaccctattttacatcaagttggaatagtctaaaaaagaagtttatataactgaaagtaagcatgttatacagaaatcagcttcaaaacgtagtgagggcatagggtataagtgagggcaataatttttactataactacataagttgcttataatgagtttgttgtgtacgaagtgaggtcatgagggcataaatgctcccaactttttttgaatgatgcgtcaagaagactttcggaaattgttcgaagaagaaaatgatgctttaagagcgttccctcttcctatgattttgcaggtgagccgatgtttacccaatattcattttagtctgt

SEQ ID NO: 5827 - DNA, 12005 bp, Unknown
  gut microbiota DNA sequence
aatagagaataggataactttagatggtcttatgggaacacaatgttttacgaaagaagagcttgaacacatcgcttatgccttgaaagcggtagcacatccgaatcggttggctatcatttgtctgttgtccagaaacgaggaattgaatgtttcggaaatctgtgaacagatggcttgtagccaggccttgatttcccatcatttgacggatatgtacgcaaaaggtattcttcaaatccggcgtgaaggacgtaacgcctattaccgtctagccgacgatcgggtgactaacgtgatgcgttgtatgatgaaggctggaggttgagaaaccggaagctatttttttaatttattgtataaatatatgtttgaatatttaattataaaaaggaggttcttatggaaaaatttgaagagtttataaatagtgagacaccggtgttggtggactattttgcggcctggtgtggtccgtgtaaaatgatgcattcgatattggatgaattgaaagagcgtttgggggataaagtccggattttgaagatagatgtagacgttcctgccaatcgtcaaagtgtttacgcttatcagatccagtctgtaccgactttgatgcttttcaaaaaaggacggatgttgtggcgccagagtggggtagtcagagtccctcgattggaagaaataatcaaaccctatttagcctcttaaattaccggacatgaagtatatgattatcggcggagttgccggtggtgcgtctacggcggctcgtttgagaagattggatgaacaggctgaaataatactgtttgaaaaaggagaatacatttcatatgcgaactgtggattaccttattatatcggtggggtgatcgaagaaagagagcgtttatttgtacagactcccgtaagtttcaaagcccgttttaatatcgaagttcggataaaatcggaagtaaaagcgatcgagcctgaaaataaacaggtcgttataaaagattgggctacaggaaagacatatcgggagtcgttcgataaattggtattgtcaccgggcgccgagccggtacttccaccttgggaagggattcggaccgaaggtatttttaccctccggaatgtggctgatacagatcggatcaaagcgtgggccggccgtcaggaagtgaagaaagccgttgtcgtcggagctggttttatcggactggagatggcggaaaatcttcatgagctgggtatacaagtgactgttgtcgagatggcggatcaggtgatgacacctgtcgatttcgagattgccgcagtagttcatcagcagtttaaagatcgaaaagtggggttattgcttcaggaagcggtggctgctttctgcaaaacagagaacggattgcaagtagaattgaaaagtggtaaaaccttacaggccgatttggtcatattgtctatcggcgtgcgtcccgataaccgtttggctaaagaggccggattgaagatcggggaaaccggtggtatttgggtgaatgaatatttgcagacttcccatccggatatctatgccgtaggagatgcgatcgaatttccccatcctgtaagtgggcgtccgtcgctttcttttttggctggtccggcaaataaacaaggacggatatgtgccgaaaatatcgtggatggaaatatacggccttacaagggagctatcgggacagcgatcgctaaagtgttcgatctgacggtcggggcaaccggattgtcggcgcgggtacttgaacggttgggaataacctggcaggaagctatcgttcatgccggttcgcatgccggttattatccgggaagtattccgatgactttgaagattaatttttccccggaagatggaaaattactgggagctcaggtggttgggatggacggagcggataaacgcctggaaatgttggctgcagtcattcgtaccggtggttcggttcaggacttgatggaattggatcaggcttatgcaccacctttttcctcggcgaaagacccggtgaatatgttgggatttgtagccgataacaggatgcggggcaaagtgaaaatgatcggttggaaagagttggaagcgtgggataagaataccctgactttagtgaatgtatgttcggaagaggaatgtgagctgaatacgatcgaaggggccgtcaatattcctttgaatgaattacgtgaacgtctgggagagcttccgaaagggcgtcctgtggtcgtgttctgtgccgtaggattaagaggatatatagctgcccgaatcctgatgcaaagagggtatgaagtttacaatctgagcggtggtttaaagacgtataaagcggttaccgtccggcagagcaatgagattttaccggagactttacagaaagaacagagtcggtcgggtggaggaggccgacacctgaccgtggatgcttgcggattgcagtgtccgggacctgtgatgaaactgaaaagtggaatggagggtttgaagatcggggagaggctcgagattacagctaccgatcccggttttgtcagggatgtcgggtcatgggctaaaatgaccggcaatcggttggtgcaggtggtacaggaaaaaggaatcattacggctaccctggaaaaaggagaaggaggacagggaggcgggaaggatggtgtttccgctgacggaaagaccattgtcgtttttagtgatgacttggatagggcgttggcttcgttcgtgatagccgatggggcagcttctgccggacgtaaagtgacgttgttttttaccttttggggattgaatgtgatcaagcggaaagctactgtaccggtaaagaaagatatggctggaaagctgttcggtatgatgttgccttcggggagtcgtaagctggctttgtccaaactgaacttgggagggatcggttcacggatgatgcggggaatgatgaaaaataaaaagatagattctctggagactctgatggagcaagcgaaagcgaatggggtagagtttatcgcctgccggatgtcgatggaggttatgggaataaaagccgaagaattattggacggagtgaaaatcggaggtgtggctacctatctcgaaagagccgagcaagccaatatcaatcttttcatttgaaattccgtccctgaatccgaaaaaaagagattagcatttgctaatctctttttagtagcgggggcccgactcgaacgaacgacctttgggttatgagcccaacgagctaccactgctccaccccgcaatcccggtcaatactttctgtattgcgggagcaaagatagctctttatttctttcatacaaatttttcactatatattttggaactccgaagcttccccgtttgctggatgtcccgggttgattcatcggggaaatacggcaggatgcatttgggtgggggagaatgagacgaggggacaagtaattcattttacggtatatgaaatccggttgacgaacggatgggacgggctcaaagccggggagaaataattacggttgaaattgtcgagccttaaaagaagaactccgggacggacctttcgtcccatttccggacgaaaggtccgtcccggaatccgaaaaaaaagagattagcatttgctaatctcttcttagtagcgggggcccgactcgaacgaacgacctttgggttatgagcccaacgagctaccactgctccaccccgcaatcttggtcaatactttctgtattgcgagtgcaaaggtagtgtttattttttataatccaaatattcgggaagaaaaattattcttagtttttgttaaaatcggattttgtgctgtaattttgtatacctttgcatgaaaatcggtgagttatccaaataatgaaagtatgatgtatcggttgaaagggttaatatatggggtaatttcctctgcaacattcggtttgattccgctttttgcacttccggcgattcgtaatgggatcggtgtggattcggtaatgttttatcggttcggtatttcggctttggtattggggctttggttggttatccggcggtacgatctgcggatatcgggacgggaattgttcactctggccggattgggtattttttatgctatgaccgctttgttgctgactacttcttatttgtatattccgagtggtattgcaacgacgattcattttctttatccggtggttgtgacgaccgttatgatcctcttttttaaagacaaggtttctgttccggtcatcggagctactttgatggctatcttaggggtatatctgctgagtaataacgggactgccggaacggtgagtctgaaagggttgttgctggttttgacaacggtcgttacttatgccctttatattgtgggtgtaaacaaatcctgtgtacaccggatggatggtttgaagctcactttttatgtgcttttggcaggggctatggtgttcggtttgaatttatcggtgaagggagtacctttagatccgattccggattgggaaacaggagtatatttgttattattggctttgattccgacattggtttccgattttacgttaatcttatcggtacagcatgtcggctcgacgactacggctgtattgggatgtatggaaccgttgactgccgtatgtatgggtgtctggtttctgcacgaaagcctgggcttttggcaattggcagggattgtgattattttgtcggcggtatcggttgtcattctggccaatagtaaagacggattcaggcctcggcgtttgattcctttgaaattgcggaaagcggttcgatggataaagccaatcaatttcagtcattaaatattgctcttatggttactttaaaaagaattacgcaggcggaagatgaagctttccggaaattaacggccctttataccgaagcctttccggtagaagaaaggcgggagatcggtcagctcggagagttgctgcataccgaacctgccatgtatttcaatgcagtggaatgtgacggtcagcttgccgggttgtttgtttattgggatttcggaagtttttattacctcgaacatttggctgtttttgctgaaatgcggaataaaaagatcggacaacagattctggattgggtgaaagaacagctgcaaggggtgagattactcgaagtagagcctgcagaaacggagatggctacccggagaatccattattatgagcggaacggttaccggattttagaccggaattatttacaaccaccttatgtgaaaggggggaaagattttccgctctgggtgatggggaacgggagcggacagtcggcagaagtattgaaccggcaaatacagaccatcaaagacaaggtatattaccgtctgtaatatttatttttacaacataccggaaagtagaaaaatacctgagatcgaatcattatctttgacttcaagataagggtaaaacaaggtcaacggcatcggaaaagtcaactgactgtttggatgtcgttgaccttttgttttggtcttttgagaattatataatacactttttatgttattaaaaacgttgaaaatcggtaatctttctattcaggtgccgattatacagggagacatgggagttggaatctccctttcaggtctggcctctgctgttgcaaatgaaggtggggtcggagtgatttctgctgcaggacttggggtaatttataagaatttgtccaaaaattatctggaagcgagtatattgggactgaaagaagagctgagcaaagcccgtcagaaaacccagggagtcattggagtaaatattatggtggctctttcgaactttgccgatctggtcaggacggcgattgccgagaaagccgatattatttttgccggcgcgggaatgccgctgaatttaccctcctttctgcaaaaagacagtaccactaaattagtaccgatcgtttcttcggggcgggctgccaagctgatctgtgagaaatggaaaagtatttacaattatttgccggatgctttggtggtagaaggtccgaaagccggaggacatctgggattcaaaaatgagcagatcgatgacgaacattatcaactggaaaccattttacccgaagtgattcaggaagctcatgagatagaagaaaaatacggccgtaagattccggtgatcgctgccggtgggatttattccggcgacgacatccgaaaaatcatggagttgggagccgacggcgtacaaatgggtacccgttttgtgactaccgaagaatgtgatgcttcggatgttttcaaacaaacttacctgaatgcacacgaagaagatattcaaatcataagaagtccggtagggatgccgggaagggcgattttcagtaattttatccaaaagatcaaagaggggaaaaaacaaccgaaagtgtgccctttcaattgtattaaaacctgtgatatcagtaagagtccgtattgtatcattacggccttgtacaacgctttccggggaaatatggaaaatggttatgcctttgccggagccaatgcattcaaggctacgaaaattatgtctgtgaaagaaactttccgttcgttgctggaagaattcaaccgcacaaaataaaccgtatttttgctggatttcttaaatatttacctatatttgaaaagatcaaaattactttcaaaataggtaaatagtagaacatatggatcaagataaagcccagcaatcgatcgatacgctatcggaaaaagtgaatggagtagtcagaagtgtgcgggtgagctgtagtcctgaaaatgattaccggggggagaaagactatcgttctgtattcggcgtacaggaaatagaatgtttgtatgtggatacggaagtattgaataaacagtttgaaggcgaaccctgggaggggaagatgactgtccgtttgtttcgcctggagaacggcaaaggacagtgcttgtctgtgaaagagagcggaataaaagtagagcgtcaggatgctttgccggtgtatgaagagtggatagaccgcgcagatttaccggaacaggcctggaaacaggggatatatcgtatcttggcggatatcgacggagtggccggacaatcggaagatctgtatatcgtcccgggggaggggaaacccgaaaaatattttcgcatcctgcatgccggtctggaccgtttttgtgaagaaaccgagtccgaggctcagaaacgtcctcattctttccggatgttcgatgccacccgattgaaaaatatccgtttcttcctgatggcccaaaacctgctggggggagagtgggtatatgaattcgttatccgggtggtagaccgtagggggagtatcaaagccatgcagatcgtaaaatccgcccaatatatcaaggatcaggccgggaatagtattctttgttttgctgtcgatctggggagtcaggaagatttcgtcactccgggagaatataccgtgatggtttcctgtttcggacagacggtcctgaagatgggctatggaataggtcataaagatattccttatgatttcgagcaggagatactggccgatggtggagaagtggccgtgaagcaaaatctgaatccggtatacaccgctaaagataaagatgaaatcctcgaccgtttgtatcgtttggtggggttgcgtaaagtgaaagaagagataacccggatcatagagtacgtcgaatttatccgtctccggcgggagaatggcttcagcgatacttttcctcaattgcatctgatctttaccggatatcccggtaccggtaaaaataccgtggcggagatggtgggagaattgtatcagaaattagggcttttgagtcacggccgggtgaatcattacagccgtcgtgatttggtgcgtgaaggcactgctgcagaagagcaattggttcggcaggccctgaaaaacagtatgggggggattctgtttgtcgatcaggccggagatttatttcatcccgaagatccgaacgatcggggggtgatcgctttaggaatattgtacggtatactgaccagggaaaaaccggaagttttggttattctttccgatatcgatgaagagatgactgttttgctggaagcttttcccgatttgcagaagctttttccgcgccggctttgtttcgaaaattatagtcctgaggaattgatggaaatcgcccggatcaaactggaaaaactgcaattccgttttacgccgggagcagaagagaaattttataaacagttgaaaatagcttgccgggccaatgaggtggattttaccaacggacgttacatcgacgaacagctcgaacaggcttcggcccggatgtcggcccgtctgatggcgaaccgctgcggagagtataagaaagaggacctgatgctgattacggaggaagatatcgtaactttacccgagggagaccctggcaaagcattggaaaaactcaaggcgatgatcggtttgagggcattgaaacaaagtattgtacaacatctgagttacgtatattttatccgggaaaggcaaaaacatggtttcgacgatacccttcctcccctgaatatgatctttagcggtaatcccggtacagggaagatgactgtcgctaagatgatgggagaaatctatcattcggtgggtattctgttgcgtccgaatgtgacggtacaggacggacgtcagctcaccggcgatggagggctgactccccaacagggagccgaagtgttgatgaacggtgcggccggaggtattctgtatatcgaccatgccgatgtattgccccggagtgaatggggattggccctgttcgaagctttattgtcgaatttatcgaccgaggaatgcggggatacgatcgtggttttaggcggatatcccgaaagagtcgataagatgctggagatgaatcccgctttaaagaattattttccttatgtattttcgttcaacgattatacgcccgaagaactgatgcagatcgctgaaaataaactgaaagaaaaagcttatgtatttcatcccaaggcacgggaagtattcggtgagctgatccggaaagcttatgaaaacagagataaaaatttcggtaatgcgcttttcgttgaaaaagtcgtggcagcggctattcgtcatatgtccgaacggacgatgaaaatccgtcaggaacgggagctgacccgtcaggagatgactaccatccgcaaagacgatataccggtcgatagttttgaacttccaaaattggaaagggatgtattcgatgaagaggagatcggccgggcattggaagagctggataaaatggtcggacaaacgggaataaaaaaacagatccgtgattttgtagagctggcgcgtcattatagccacgagggggtaaaattgagcagccggatgtccctgcaatggtgtttgaccggtaattcggccatgggaaagggaacggtagcccggatcatcgcccgtctttacaaagccatggggatcgtcgataagggacaggtattcgattttaaggtggaaagaatgatcggactgatggaagacgaggctcagcgtagtatcggggaagcgttggtgaaatccagcggaggtatcttgcttttcgatgaagattcacccaaattgaacgaagctgtcggcttccgtgaaagagtacgtgctctcctgatgaatcagatggccgaacatcccggaagttatattatcatctatgcagaaccccggaacagggtatcgggcatcaacggagacgccgaacacatgtcggatttggtcaatgtactggtcttcgaagattatacgaaagaagagttgatgattattctgaaacgtcgtctggagaaagaacgaatgaaaatgacagcgacagcccgtcagtatatgactgtttttatcggttcgctggttgcgaccgaggaacgcagtcatgccagttcgcgcctgatgcggatcgtagccgatctgattgtccgcaattgtctgcaacggatggcaaagagtaaccggacgagtacagtaaaagaggtgatttctgttcaaaaacaggatgtggctatgtttaccgaagcttttgtggcaggagtaatgaacgaacggaaaagaatcggattcatttgaatcgggcagataagaaagtagaacgatataaagagattggaaatgaaaaagcaaatgatattgtggacttgtatgctgttattggtattggcaggatgtaagaaggacgatgtgcagtatacagaccggtatgaactgaaaggaaaggtagaaaaaggaccttttgtcagaggatcggaagttacggtttatgaattgagcgaacggcttgaacggaccggaatcagttatacgaagaccgtacaggacgatcagggaaatttcgatttcggtattttggatatccggtctccttatgtagaaattgtggcgacaggagctttttataatgagctgaccggcgaacagacctccggatcgttgagtttgcgttcgattgcagatctttcgaatcagaaatcggtgaatgtgaatgtattcactcatctggaaacccgacgattattggagttgaacggtggagaaaagcgctttaaagccgtcagtcagcaggcacatggagaagtgttgaaggccttcgggttgcagagattcgagatggatgaggtgaatacctattcactgacagatggaatcaaaggagcgggtagtttgttggtggtgtcggcttctctgttgaaggataaaaccgagacccggtttgcggaatatttggaagggttgtgtgaaaagttgaaggaaaccggtacgcttccggacgatacgaaggaagaaatccgtaaaaatgcagtgagtatcgattggacaaaggttgctgaaggattagttgcaaagtataaggaaaccggcctggaaattactgtgcccgatttgagttattttatcgactgggacggcgatggagaagccggaaatgaattcggagggatcgtaggcgataaaaaattgaaattcaagaccgatactttacgggtaagtcaggatgggggagaatatgctgtagatatcctggctaatttatcttatgattttacttatcccggtatggaagaagaagtgccgaaatccggggtggaggtagataaattattccagttcaagtcagaggaaatggattatacagtgacgctcgataaggtgcaggggcagcttaaactgacggtacagccggcaaaaggatattggatccgggatgaacgcattactttgtacagcctggatggtgaagtaagcgccaccctgctgattactcaggacggagatatgaataagttcgaagtacctgaaggagtcgaagaagcggtgagcggcatattggggagtatccgtgaagcctgtgattatatgtatacgatagaggcttattatacgcaatgtttcccggaaccacaaaacaagtggcagaaatattaccggcatgaaaaaagtgtcatggccgatatagacttgaagcgggcctgggaggtggcttataaagctattgccagtgccaataatgggtatgatatcctggagaaggaaaaaatgggtaacctctgttcgcctcagtttaagttgttgcgttcgatcatgtattatccgctgatcgtattgtggggaaacattccttatccggaacatttttcgacggcggcggcaccccggttgacagagcaaaaagcttacgagaagttggctgcggatctggaggagatccatcggctgatactggactggagaagtgctgaatatcaggattacatcggtatcggtgaactgatgctgggaaaagtgtatatgcaattgggaagatacaatgaagcgaaaaggggcttggagatatttttgaagaatgaagggtatgcctttaatgccagccgcaaagaggccttgaatagcg

SEQ ID NO: 5828 - DNA, 11581 bp, Unknown
  gut microbiota DNA sequence
tcagaccattgatccggtaataggaggaaggagacttctcccgataatccagggttgcgatatctttcaataaaacaatccgatcccccagtgtcttgatcggcatattcagcatatcgatctcatgactcagcggattaccccggaaaataatataagcatattctttggcaggaacggtatcgatcaatacttttcccccatcccggcgcatataataattgttcaaagccgagcggatatcggaagcactgataccgatattttcaagcacttgctgatcgtaaatcagtacccattccatgggaacagccccggttaccgtcacactttctatccccggcatggtagagacgatgttcgagatattgtcttccgcaaaacgggagacatcctgagtagtaccaggccctgaaataccgtaagtcaataaaagctgccgttcttttttagcttctttaccggaactgtattctcctccacgtacttccgacacctgtactccttccgggaatccgcttttcaccgaacggacgacagaccccagatacagtttaatggcatcgatattttcttctttatcgatagaaagcctgattgttccccagccattcccggtctccgaaacaatttcccgtaaccctctcgtccgcgccaaagccccttccaacttggtcgtcacctccatttccagtaattcggggccggcattatcccaagagaaagataccgacaaatcgttcgaacgggaagaagggagcaactgcaaagacaacacaggaatcagactgatccctaaaagcatcagtacgacaaaaatagtattgacagaaaaagcagataatttcaccttccaagtgttttcaggaactactactcctttttatttatcagcgtcacctcacactcgtgcgacaaccccagattattctcgtaaatagcctcttccccctcttttaatcccgattcgatacacacttcccggctattttcaaatcctgtttcgacatatttccatatagcccggccgttctcgtagacaaacacgacttttctcccttgccgcggcaacaccgctgttttcgggacgatcaatttatcggcgatttgccgtttagccaatatactgacattcattccatccaccaacactgcttcgggattatcggttgtagccctgactttcaccataccgttttcatcgattttcggattcacttcagtcaccgtgcctttcagggtaactttatcgtttgcataaggcgtaatctctacttccatccctgccttcaaatgggcgatctcggtttccagtacgttaaacacaatctccatggtagcatcgtcgattaccgaacaaacctctttataggcagaggactggttgtattccttcacctccagatcggcgatcacgccgtcaaaaggagcatacaccgtgatgttcgaataatcgtacaccgctttttcatattctttagccgcagaggtataaccgatctgtaatttgatattttccagccgggttttagagattacacgttcgtccagcgtatcttccaatgaatttatcccctcattcatcagccgtcccctcaattccagcttcgctttttcccagctcaggcgggcggcttccaactgctgaccggctttcagttcgtccacgctcacgatgggatctccttttttcaccctttctccatttttcacatgtactttcctgaccacatcattcgtgataaaagccaaaaccgctttccgacgggcattaactttgccattactgaccaattccatttcaaagggagccagccggacttttgctgctttcacctcgattttgtcctgtttctggctgatccgggccaaatctttttcttcttttttctcctccttcttatttccacaaccaccgacaagccccaaggcgagcattaatgcaaaaaaagcgattttattcatatcttttctttaaaatattgcgaaagtataattagttgtaaatatattaaaaccttacaatctcccttcacttttccccttctttttcaatccgaacggtactttttaacaaattctctctttttcctatggttgcagtctttctttcaattctgctttcatttcttttacggcatccgacatcactttgggtgctttctgaatcacctgccgggccatatcacggcctttctccgattgtccgctttcgaaatacattttcgccaataaatagaggggatataaacgatgaggcaccatataggaagcctgcttaaaacaggcttcagcctgtccgaaatgcttcaaggcttcggcgtctttccccataatattatagaacatcggatcggcactgagccgtgtaccttctgtcagaatccgaatcccttcctcatattgcccggttttcgacaaacactgtccatactcgaaaagaaatttcggctggtctttcaaaaaaggatataaatcccggtaatgatctaccgtttcctcaaaaatatccatgctgaaataacgttgttcctctccccaacggatataagcctgcttccattcctccttatgctgcgtcaatcgccaggtaatacctgccatcaagagagaagctcccatgacaaaccatgcacccacagtcctttttcgttcctccgcaggcagtttccggtcatccagcgtaccggcaagcgccataaacagaacgaatacaatcaccaaaggaatcacactcaacggataagaaaaacaggcgaacaccgaaaaggctgtcagccctcccaacaccgctcctttctcggggcgggaagaatagagcaattgccggaccgccaacccgacagccaataagaaaaggatactcccgacaatccccaattccacccccaactgcaaatattcattaaacccgtattccggcgagccggccacccactcttcttgttccgaggcttcctccgtggtaaaataagcagcctgcgctttcccgaatgcaccgccaaaatagcccaatccacatcccccccaaggattttcggctatcgcccgaccagcgattttccacattaaacggcgtccatcggccgaatcttttttcatcagataaagtccactgaacaacagcaacagacacaccacaccgatacccgctacccaccaagccttttttcccagttttcgtcccagctctttcagctgtttcctgatccggtaataaaatgccgttaccaccccgcatccggcaaccgccgccaaccagctgctccggctcattccggccggcaaaatagacaaaatcaacaacagtatcccccagacaaagccggactccaacttgtacctccactcaccgacactcttttgccgaccgggatacaccgataaacaatagaacaaaacgaccggcaataccatcactaaaaatcccgaataaggccccgggttaaaaaaagatcctgtcagccggtaaagcgaatgccccgaggcgaaccaaccatacaattgtccgaacccataaatcgtctctaccaatcccgctcccatgagcgtccacaacatcaccgtgacggcattccggcaaagcgaagaaagcagacgcaataaaaaataaaggatcacaaacaaaatccataattctgtccgataaccgaccatcccatccccataaaccgaacgcagcaggacatatccccccaacaacaatacccccgcatccggcaggcgaaaacgaaattttttccgaacgcaccaagccactgcaataccacacaaaacttctatccaaatcacccgatagaaaccgaaacgcacggccgttacatggctttctgccagctcacgatcacgatcgtaccaaaatacaaacaacagtgcagtcaacaaaaacaccacgatccctttagttgtggcaacccaccgattatccgaaaccatccgattcttttaaaaattaatatagtgatcccatattctgtttcatcaaataatcataacgaatcagaaaataagacaaatttaaagatttttccgatataagccgttttaatacaccatatatataaaaaaatcggaaattataatagaattcggagatacccgttggggaaatattccacaaaccggggaattattactcagctatcgcttgtgtaattaaaatgtaaataattgtttctcagttgtaaaatcttgcaaaatccggttggcatgtgttttattggatgctatagtatattcaaaaaatggaaaatatgcacaatctgaaaaaatttaatatgaatagaaagtatagagtccggatacgatgcctgacctttctggtaactttgttctggctgccgcttcatgctcaggaggccggaaaagaattccggccggccggagaaccggtttcttatgcagaaaaggataaccggaaaaaatctccggaaccgttggaagaccaaaaggataaattgaaaaagcagcgtatcattacggccaagggacgagtgaccgacgctgccggagaacctttgatcggtgtaaatgtactgatcaaagaaagcggcacagggcaagtgaccgatcttaacggcgagttcaaattaccggatatccggttcggttccccgttacgcatctcctttatcggatacaaaaccctcgaggtcaatgcgcgggaaaacatgcgccttaccttgtatgaagaccggacaaaattggatgaagtagttatagtaggatatggttcacagaaaaaggcaaatctctccggagctgtttcctcggttagcatcgatgccttggccgagcggccagtcaccaatgccgagaatgccctggccggattggcctcaggactgaccgtaaccaattcgggggggaatactccgggtttcgagacttctacgatccggatccggggtgtcggtacattgaacaatgccgatccgctcgtggtgatcgatggcgtagccggttgtgctatcagtgatatcaatccccaggatataaaaaacatttcgatactgaaagatgccgcttcgtcggccatctacggttcgcgggctgccaacggagtgatcctgattaccacaaaaaccggatacgaaggcagtgccaaaattacgtacagcggcaatttctcgtttgaaaaggtagctaaacgtttgaatctggtcaccgactatgccgattttatggagattcagaatgcggctctgagtgctaacgggcaagccccccgtttctcccagacctccatcgacgcctggcgcaatgacaacggagctaaccccaccgtttatcccaataccgactggcaggatcatatttaccggaatccgtcggtggtacagaatcataatctttcggctatcggaggaacgaaaacggtacgttataacctgtctctgggctatgtgaaaaatccgggtatcgtttataataccgattatgagcgttatcaattgcgttcgaatgtcgaagtcgacatcaaaccctggatcactgccggaatgaacatcttcggttatatggattccaataatccgaatgccgaaaatgctaccaacggaggagacgtgatattcggttcgggagcattgaatacggttcccggcatgacgctctatgaccctgaaacgggtctgtacggaggtgtgcaaaatccggaggaagagaacgtcagcaattttaatccttaccggcgtatgtggttttacaaagaggattttccgataaaaacccgtcgtattgtccccaaactgtttgcccgtttgtcaccggtagaaggtttgaccctgagtgcttcgttcacctataactcctgggaacggaatgaagaatatcaattatgcgacaaaaatttatatcgctttacactggatggacctgtactgctgcgggaaggtacggtccgtacttatatcaaccggtataatcgtcggaatacgttccggacttcggatgtgacggcacgctatgaatggaatgtcagcaaactgaatgcttctgcactggttggtatcagtcaggaatacaataaacgggaagacgaacggttcaggaaatacgatctggccgacgatgctctgaccagtatcaacggggggagtaccaacggtgagattgaaggaaactatacagaatgggccatgcgttcatatttcggccggataaacctgtcgtgggacgataaatatctactggaagtaaacctgcgggcagacggttcctcccgttttgcccccgataagcgctggggatggtttccttccgtatccgccggttggagcatttcggaagaacccttcctgaaaaaagctgccggttggctggatatgctgaaactgcgggtttcttacggtacactcggcaacaacgccacatcgactttctatatgtatcagcccctctatgcttcagccaattacgtactgggcaatgcggtggccagtggcctggcacagaccaccctcgccaatcccaatctcacctgggagacgacgcacatgaccaatatcggtctggattacgggttgtttgcccatcgtttaagcggttctgtggatgtattcaacaggctgacgacagatatcctgatttcattgccggcaccgttagagcacggcacttctgctgtccccaaccaaaatgccggcaaggtacgcaaccggggtatcgatttcgatatcagctggttcgatcatatcggcagtatgacctattctcttggcttccacatgggatatgtccgcaataaagtgaccaaatttcaggggaaagtcccctctattaacggcgtttataaattgcaggaagggaaacccatcaatcagttatatgtcatgtctgtggaccgtattgtccgcgatcagtccgatctggactatgtacagtctctggtcgataaaaatccggactatttcgccacttatcaaagaccggaattgggcgacttcctgtatgcagatgcgaatcatgacgggaatctggatgccaacgaccggatcgagatcggcaacggcgactcccccgcatttactttcggcagtaatatcggtatttcctggaaaggattcgatttcagtatgttgctccaaggggtaggaaaacacaaagtctattataacaaccaggcattccggtttgtcactgtcatgggacaatccttgaataaagatattaccgaccatgcctggacacctgaaaatccttacaattccaaatatccccggctccggaacaatgccaacagtaaaaacaacattgccagcgatgccttggtgtttaacgcctcttatttacggtgtaagaacatacagttaggatacacgcttcccaggcatatttcggagaaattttttgtcgaaaatctcaaaatatataccagcatcgacaacttgtttaccttaacggatttccccggtctggacccggaaatagccgccggcgtaggttatcctcagttaaggcaatattcggttggaatcaatgtcacattttaaaattcagcactaatgaaaggacactatattttttccgctcttttaggtataggtttattgctccaagggtgtgaaacgctcgattatactcctgccgaccagttgaacgacaaaacgttctggcggacagagcaacatgccaatcaggcggccgtcgctctgtatgctgccatgaaagccggctgggctttcggacgcgactttactttcgatatgatatccgatattgcggacggtacgtctccccatgccggaattgcccggggtacctctttttcatccggtgacgcttctgtccagaacacctggcaatatctctacgaagtagtacaccgttcgaatacggtcatccggaatgtctccgccatggatatcgatgaaacagtgaaaacacgtgtcataggcgaagccaaattcctgcgtgccatggcctatttcagaatgctcaattgctggggaggagtaccttattacgatgagagctgtatcatcgaagaggaattcgccaccttgtccaacccgcgcgaatcggcagaaaccatccgcggtcacattctcgacgacctgacggatgccatctccaaacttcccgtagcctgggaaacatccgattacgggcgtgccacgaaaggggctgcctacgctttgcgcgggaaggtatatctttacaaccgggagtggagcaaggccattgccgattttgaagaaatcgtctacaacaaaacgaataattacggctatgaactgcatccggattacaatgaactgttccgcttgtacaacggcaaacgcagcaaagagatgattttctccatccagtctctggacggtaacgtggcagggcacgggctggaattgtgcagttttctgggcaataaatccactatgcgcctcattgccagcaattgtatcgtaccttcgacccacctggtggatatgtacgagaacctcgatggcagtccgtttaactgggacgatatctttccgggattcaacgacggtagtccggaattccggcgtgatgtcctgagtgttgcgatagatgacgggagtacaaagattaccgacttattgaattgtgacacaactaaagtcctcgacgcataccgcaagcgggatccccgcctgtgcctgaatgtcattacgccttattcccattatctgggaacagacgccggttcggtgccgatggataagcagtttgtgcttcacaatccccaaaaaggcggttcaccgatggaagcacaggcctttatccggaattccgaaggctggaattcttatttctggcgtaaatttattcccaccggtaatcttgacggttattggggagaatatacgcgggtaccttatgaatttccgttgatccgcctgggggatgtactgttgatgctggcagaggcatataacgaagagaacagtttagacaaagccgttacagaactcaacaaagtacgcgaccgggtggggatgccgtcgttgaacaatggcagcccctggctggctgtcaacagccaggaagaaatgcggcaacgtattcgtaacgagcgggcatatgaattgccggctgagggccaccgttattgggacctgaggcgttggggtatctatggcccgacagtcaaaaatgcaaccgatatctacggcgatttgatgtttacacgtgagtaccagccacggcatgagttatggcctatcccgcaggtagaactggaacggaatcctaatcttcagcacgatcagaatcccggatggtaaaatgaatgtaggattaaatgtttgtatgaaaggagccatcgtctttcatacaaacatttaatccggcacaccggcaggagagaataaattacagtttaaagcgatagattatcgattcatcgtcgatatacctgactccataaatgaagtgtttatcgacacaaaaagtgcttattggaaaaggtaataaatatttttttattttctcacctttccaattaaaacaaagaatttcatttgaaataaatccggctttattagctttcgcataactttctgcagaataagtaaaacaaatcatttcatcagaaacagccatcttcatcaggccggctatactttcatttattctgattccatagcgtcctgctctttcacgaataagagggatgtgattatatggattaagaaatatacgatggatatcttttccttcaatttgataaatctcaaaaacatcggatgctaaggttaaaataacaaatttattctgaatatcatttgaactaatttttgtttggtatacactccctctatatattccttccactccttcataagcaaaaggataatcgaaaaaacaaccgagtatattattacttgaatcaagcaaaccaaagtacccttctttaaacgatccaactgcaacttttacgtgattgattacatccatatgcctgggcctaaaatccaccgtatatggataagcttctttctctatatggtaaggaattttattctcaatcacatcagaaatcgaaacataatttatttctttctgcatagcatccaaaaaaaccaattttgacccacaaaccgtaaatccagttcctatttgaagatattcaccaggacctcgtcctctttttcctaatctttttatgatcttcttcccattgacatcaataaatgaaaaatgatatgtgtcattcatatgcttagttatcaagacactgtccaaaatcgccatatcagttattctattaaaaacgtcattcttatcagaataaacactgtcgtagtcagtgatttcctcgacaatatcgaaaacatcgatatctgaacgcttgcatgcatcacaaatgataagaaatagcaggattttcaaaatatacttcatgatcgattttataattcggtttattctcatatgctacgagatttttattttttcaaacgataaagaacaatgaccggattatccgattctttcacattcaatcttgcagctatatctggagcccattgggtaaaaatataagcattttcccaagcaacgaagtaaccgtccgtataagttaatgttgaaccgaagggtacaaatatatcctcttctttatgcttcgctcccgtaattacttctcctgttcttctatagaagtaagcctcctgactataacctttacgtacaaaaacgaaataaataacatcatccccagcaacgacctctgtaataataccggtcttcgatctcagattttttatattatgctgtatgtaatcattccccaaaacatatttatctttcccaaaatcgacataaaaagcaggacagaaatgtcccttgttaatctgataaatggtatcactcactaaaggagaataagccaatactaaactatccactccatatccaaatcctccttctgcgtagcggtttaatggacttgcaggcataaatccttcctttattccctcatcaaaatcataccggtagtaatgactggcatcgcctttattaaaagaagcacttccgaaaaaataaaaccaccactcaccgttctccaaggcagcctgagcaggaaccaacttcgatttcagattccggctttcgatgtaattcccttccaaatcgtaataataaaatttataccaacccggaaataccaaccgatcatttttcttatcaatcaaaaacgctttatgagaattacaaacatttaattctccaggtgcacggcctatcggaatcaatttttggaatctaccattccggtcaaaaatatacaaccctcctgtaaatacaaaacaataaaattttcctttataatactccatgcgtcggaacatcgaagcgtcaatcaaacattcgtccgtcgtttccaaagggatataaatcgcagtgtccacgatttcgctcatcgtcatccatacatcattagctatttcaggaactttgattgttatcacaggagaaaccgaaaacttttgacatgaatacatgcatacaataaatagtaattttaaaatacttttaatcatattttatcaattcacaagaaataataatcaagaatgtcaacaaaaccattttcctattctacaaaata

SEQ ID NO: 5829 - DNA, 53907 bp, Unknown
  gut microbiota DNA sequence
ttctgaggaggcacgccattcataagaaacattacccccgtccctttgtttcctactaccaggcattatgacgatgggacggttgtatcattttatgggtgcagggtgatcagaggggagattgtcgctatgattcctgtggtaatcaatccgatatagatcatgaggcgggtatgggcgatctctttcgggtgttcgatcagataacggttgtgttcgtcgtatttcaataatccggcgattttcttttggcgaagggtatagcgtagtaaataatagaagatcagcgcaccactcagcccgacgaacatacctgccaataagtcgcccgggtaatgtacacctaaatagatgcgggtataacaattcaggacggcccaacatagaatgaaaatacttaaccaacgttgtctgaagaaaaaaagcaggaagaaggctaacccgaaggaattggaggcatgacaggaagggaacccataactgcctccccgtttcccgtttacgatatgaacaaattcggataaaggattgttgagattcgaaggacgcaaacgctcgactgcgggacgtatccaggtggcacatagctgatcggcataggtgatggttaaagcaatggcgacggccgtgagtaaagtcacatatacattaaaatttttgcagagtatatagagaatcgtagcgtacatcgggatccagataaatcttccggtaaaaagccacataaaactatcccaatagggagaatgtaagccgttcagtgttaacaacagctgttggtctaattgctgtaaagtttcaagcataagatttgttttttcatgtaaacgtaccccggaatatatagttcactgaaaaaaggaacgtttaaattggttgaaagaatagctatctccggcgtaaaggtattatttttcccgaaatttaaagtaataattttcaaaagattacgactttgacctgctctccttatagaagtcgttgaaaaccaagtaaaaatgttcgtttttgagtttatcaaagtgtgtaaactttatgtgttcggtgcagaagatttcataaataacttacaaactgaaagcttctaaacgaagagtaccgttcaacggttacaaaagttgttgtaattcaaggagatcagaaattggggttgactgttttaactgggaacagtggttttccggcctaatccctgggaatcgtgaaccagaaagtcgatcctttctccggttccgattctactccgatttttccgttgaatttgtcgatgatagtagaacagatcgataggcctaatcctgttccctggatgaaattgtttaatttgacaaagcgacggaagacactggcttgttgatctttcggaataccgattccggtatcttctacataaaagtaaatatctttttcccggagtcggtagccgaaaaaaatgtggccttgtcgggtgaatttcaacgcattgttcaggaaattagaaatcacctgattgaggcgtatacggtcgattttgattgcatactcttcagcctgttctggtatgaatttaatttcgataccggttttggcttttagttgaaagacggattcgatttcctgaaaaaattgattcagttccactgtgttttccgtaaaatccatcacaccggcttcaatcttggagatgtccaaaatgtcgttgatcagttgcagcaaaaggtcgttgttgacagagataatccgggtatactcggccttatcttcttcgctgaagtccatttcgctggccagtagatttgaaaaaccgacaatggcattgagcggagttctgatttcgtgactcatattggcaataaaagcggatttcaaccgatccgattcttctgctttggcttttgcctgaatcaaattcgcttcgatctttttcagattatcgatatctgcactcagaaagaccagttcgacttgttcgccggaagcatgaggatcacgaagagaggcatgatatttataccaatgccattcgttgttctggcggatgcggacatgtctgccgaaagtatgggcttgcccctgagcagcttcgtcgataaattgtaataatgctgtccggtcttccggatgcatatatcggtaagtatcgatcacttgtgtgatatcccgggtggtttctcctaaattgataaaccactgatcggtagcaaatccctggcgagtagatacgttccattgagctactccgatatgggcctggatcgaagcaaaactgaaaagtgattcgagttccgctacccgtcgtttggattgggtatttcgtttttcactgcggaaatgttcgatgcctatacataaaatttgggccagggtttgcaaatagattttatcttgctggctgcaagggcggacttgccggacgtagtcgaccccgacatatccccacaattggttgttcacatgaaggggggcgacgaacatagagataattccttgctccagcaggaggtggcgctctttttcaaatttgattttttgtgtcacgcgcaggtcttcggtgatcaatagcttatcttcctgcatctgactatacaaccacggaatatcctcgttgggaatatgctgaagatattcgatttgaggggggaccgtatcggcacaaatttcatatgtattcttgctggtattgtgttgcatatcgaactcgaaaatataagcccggtctgcttccagttctttcaacatcctttgcagaattttttccacggactccttttcatttttagcttccaggaaaacccgtaaggctgcggataaatgttcctggttattcatggaagtatcgatttcactttgtgttttgtccaattttttccgataaaaaacaaatcgtaatgaagtgaaaatgaccagataaatgagaataccaccccccaggctaccaccgcacaacaacaggagtgtccggtgtttagtccaaaaggtcggaggccgattatagaaatagagccgggaggtgttacaattgccgatgtttaaatgattggcttccaatagagtttcattgatatgtacaccgagggattgagtattgctctggaggggaatagctttagccggtactccgccgagaacccggagggccagctccgacaataaaaccccgtaatcgaaactttcagcataatatcctccgatataatcgatattgttattcccccaatccgtgacagagaatacgggagtcggagccaattggcaaatattatggtgtactttttcatgatcgtataagtacccctctgcatcctgcatccagccagtcagtaatataccggtattcggcgaaagatgctgcaaacgttcatatagcgtgttggtcgaaaggaaacggccgtccagaaaagtgaatttcagatcggaaggatattcctgaaggtatttttttaccagaagggtagaataaatcccgaaaaactggcaatctccgataacggcgatttcttgtaaatcaggacgtaaagcctgcatgagctgtatgttttgcgggatgtatatatcttcggtaattccggtggcattataagatcggcataaatcttgggtaagctgaaagttatgggcagacaatcgggtagggtgaaggtattcactcaggtctaaactatatttttttactccgactagtagaacatctacatttttccaggagtcctgacgtgtataccgataggccatccaggcggcatccgcgatgaggataaccattttggggggatgtaaccgatgattgttcaaaatgaaacgggtactttgaatccagatttccggtgaagcaaacaaatcggtatttaaatattcgctatataccgggtaggggcaatcgtttttttttaattcttgacggaatgaggcctcgagcgtttttgcccagcttgaattactattgtatgaactgattaataaaatataatcttccctttctccttttacttgagtaggtaaaattatacctgtaattacaatcagaataaccaataggctttgcatgccgttcgtgtgtttttcctcacaaagataggtttttatttcgagtctgattatgatttcccggaactttacattataaatcaactaagaaatcgataccttatagaaaactgttccgaccgggtaacccaggtatccgtctgccgataggatgacttgttctgatgacacaaaaaccgaactcggaatagaaagaaaaaaatatacctgccttttactggaacaatagagagaaaaataagtggttgattattcgtatgatatgataatggtgaatattttatttcaaaaataatcgaaaaatggtaacctcgggttggttttgcccgtagaagagggtgtaaatgatgattgaatttatgattttattttagctgttatttagattaagattatttagcacacaccacgagggagaggaagcttatcaacaagctgattttcggaaaagttctttatattttggaaagtgatctacgggaataatacaccacgcacatatacaccacacagacgcacgcacatataataacatcttttcattaatcccactattttccgatataaagaatctacgaaaatgtctccctttttttattttatttaccttttacttaaaaccttttatttcctgtttgttgttttttccttaactttgcaagttatttgtaaggattgaaaaaatgaaagaatttcaggaagaagagggacagattgtcatttacggtgcacgtgagcataatctgaaaaatatagatttgactattccgcggaatagtctgactgtcattaccggattgagcgggagtgggaaatcgtctctggctttcgatacgatatatgcagaaggacagcgtaggtatatggagactttttcggcctatgcccgtcagtttctgggagggatggaacgtccggacgtcgataaaattacaggattgagtccggttatttctatcgaacaaaaaacgactaataagaatccccgttcgacagtaggtacgacgaccgaagtttatgactttttgcgtttgcttttcgcacgtgccggcgaggcttattcttatgttacagggagccggatggtgaaatatacggatgagaagatcatcgaattgattcagaaagatttcgctggaaaaaagattctgcttttagcaccggtagtgaaaggacggaaaggaaattacaaagagcttttcgaaaatttacggaagaaaggattcatttcggcacgggtagacggggagatccgtgaaatcggactcggtatgagtgtggatcggtataaaatccatgatatcgagattgtgatcgataagatgattgtcgaccatatcgatttgaaacgcctgaaaagctcggtggctaccgccatgaaaaacggtaaaggggtgatgatggttaaaccgttggatcgtggggatattaaatactatagccggcatctgatgtgtccggataccgggatttcttaccgggatcctgctcctcattctttctcttttaattcccctcacggagcttgtcccaaatgtaaagggttggggtatgtgaatgcggccgatatcgataagatcattcctaataatgcgctttcgatttatgaaggagggatcgaaccgctgggaaaatataaaaatagcattcttttttggcaaatagagacggtgttgaaaaaacatggctatgaattgcatactccgatccgggagctttcggaagaggctttgacggatatcctgtatggttatcccggacaaatccggttagagaatacagctttgggtgtctcttccaattcgctttataatttcgaaggtattatcaagtatgtcactatgcaggaggagaatagcacttcgaaaaaagcgaataaatgggccgaacagtttatttcggttgtaaaatgtgacgtatgtaacgggcagcgcctgaatcaggaagctttgaatttccggattgccggtaaaaatattgctgaactggcttctatggaactgagcgatttgtatgaatgggtatgtaccaccgaagcacagctcgaagacaaacaacggcagattgccggagagatatttaaagaaatccgtacccggttgaagttccttttggatgtgggcttggaatacttgtctttgaatcgtcaatctatgactttgtccggcggggaatcgcagcggatacgtttggctactcaaatcggttcacagttggtaaatgtgttgtatattctggatgaaccgagtatcggcttgcaccaaaaagacaaccggcggctgatccattccctgcaacaattgagggataatggaaattcggtgatcgtagtggaacatgaccgggagatgatggaaagtgcggattatattgtcgatatgggcccaaaagccggtaggaaagggggagaagttaccgctatcggtacgatcgacgatattaaaaagagcgatagtctgacagctcaatatctgaatggtaccaaaaaaatacagatacccgaaaaaagaagggaaggaaacggaaaattcctgaccttgaaaggatgtacggggaataacctgaaaaaagtagatgtaagcattcctttagggatgttggtatgtgtgacgggagtcagtggaagtggcaagtcgtcgttgatcaacgggactttgcatccgatcctgaccgaaaagttctatcgcgcgattacctcgcctcttccttataaagctatcgggggaatcgaacatatcgataaagtagtggtggtggatcaaagtcctttgggccgtaccccccgttcgaatccggcgacctataccggtatctttaccgatatacgtaagattttcgagaagttgccggaagctcagattcgcggatatggagccggacgtttttcattcaatattcccggcggacgttgtgaagagtgtaagggagccggagtgaagacgatagagatgaatttcctgccggatgtgtatgtgcattgtgaagcttgcgatggaaagagatataataaagagaccctggaagtgaggtatcgcggaaaatcgatcggcgatgtgctgaatatgacgatcaatcaggcagtcgagtttttcgaaaatgtctctttcttgcaacaaaagctgaaggtgcttcaggatgtgggattaggctatgtgaaactgggccagcaatgtacgactttgagcggtggagaatcacaacgaatcaagttggcggctgaactggcaaagaaagataccggtaagacactttatattctcgacgaaccgactacgggattgcatttcgaggatatcaatatactgttggaggttatacagaaactggtgaataaaggaaattctgtcatcgttatcgagcataacctcgatgttattaaagtggccgattatctgatcgacatgggacctggaggggggaaagaaggaggaaagatcgtggctacaggtacacccgaagaggtagctgaatgcaaaaaatcggagaccggtaaatttctgcgggaagagttgaaaaggtaaaaggctaaaggctataagctaaaggctaaaggctataagcatatatttcgaactgcctatagcttttagcttttagcttatagcctttagcttttagcttatagcctatagcttttagcttatagccttttactttttaaatgattcccagtacgttcaggaggatcaggaatatacagataggggctatatatttgagaataaaagtatagagccggaagaagcgggttttcaaactgccgttgttgctgatttcactgtagaggatgcttttatccaggtaccatccggcaaagatacaaatcagaatacctcccaaaggaagtaatatattcgaacacagataatcacaggcatcgaaaaggctcattccgaaaatttgtacatggcggaggggtccgaatgagagagtattgaaactaccgatacaagtgatgaccagcgtggcgattaccgtagcccaggggcgtttcagtttcttttcttcgacaagataggctaccggcacttccagtaaagatatggcggaagtcagggcggcgaaagtgagcaggatgaaaaaaaggatcgcccaaatttcacctgcaggcagtccctgaaatactttagggagagtcaggaaaaccaatcccggaccggcttgtggatcgatatgaaaagaaaatacggccggcagaatagcgatacccgctaaaatggcaaccaaggtatcggtgataattactttcagggagataccggtcagattgtcgtttttaggaatataagaagcataagtcagcagaatacccatccccacagaaagtgagaaaaaagcctgacctaaagcggataaaatactatcggcggtgagctcggacagtttgggaaagaataagaatctcaagccttctgccgaaccgcttaaagtcatagaattaatactcaacgcaataatgatgataaacagtaggggcatcatcagtttggaatacctttctatccctttttgcacccctcccatgataatcgctccggtaaggaacataaaaccgatatgccaaagaagtgctttgtaaggatgggaaatgaaattggtgaaaatggaatttatatcttctgcactttgcccgtgaaaggagttacttatcgacaaccacacatattcgagcgtccagccggaaaccgttccataaaatgaaaggatcagagtggctgcaataatcgagaggagaccgaacaaaaaccacttcgtgcccggtgccaatacgcggaaagtaccgagtgcattttgttgggaacgacgtcctaaagaaaattcggccaacatcaccggtaagcctatggctatggtaaagaatatatagacgagtaaaaaagctcctccgccgtttgtacctgccacatagggaaatttccagatatttcctaaaccgactgccgaacctgctaaagctgctatagccccgaatttggatttaaaaccgattctatggtttgaatggtgcatatcagatctatttttgactgtaaaaataaaacaattcttgttcccagttaactttgcaataaagtttaacagattgaataataatgtttttgaattcaatttgatttactttcaatttgaaattgaattttcttatcatgtaacgattctgaagtagaaaagttgatgcgagctacttttccggttaatagttgcaatggttgcaaaagtttcagaaattaagcctaaccgctgccgtgttttagtccaattaatatttcttcgataaaaaaattgaaaaccacttgtatgttactatggagtaacatatatttgtgactgaacggtaacatatataaaaacagtaagaaaatgaaaatagaaaaagacagggaaactacagaaaagcgtttgcttacggcagtcggtgaaatcatagaggaaagcggacttgagtctttaggggtaaatgccgtagcacaaagggccggagtatcaaagatgttgatataccgctatttcggatcattggaagatttgatagcccaatatatcatacagcgagattattgggtaaatattccgacagagattcccgggaagaatgaactaaatgcatttgttaaagatatgttccgggaacaaattcggcagttaagggaggataaaatgctgatacgcctataccgttgggaattgtctgtcaataatccgatagtagaacaaataaggcggaagcgagaggaaaacgggattaaattgattgaatttattagtcgtatttccggtgttcctttttctcaaattcaatttttggcaacaatgattagtagttctattacctatttagcaatgttcggggatgtcggaaaagtttataatggttacgattttaagaccgatgatagttgggaacagttagaaaaaggaattaatttgattgttgataaatggatatgatatataaaaaatataataagtttagtaatcatggttttaggaaatataaatatacatgctcaaaatcccgatttcctgtttatggtagagtatgccattaaagcaccgtcagggcataacacccaaccgtggcttttcaggatcaacgaaaatagcatcgaaatacatcctaattttgacagggcgttgcctgttgttgattttgataaccgagaattgtttatcagcttgggatgcgctttggaaaacctttgtataaccgctttagaaaaaggttatgattatgatgttgaattaacgaagacggggattataactgtttacctctcctctccggatacctctggatataattcgttatttcagcaaattccgttaagacaaacaaaccgtagtatatacaacggaaaacaaataccggaagaaaatattgctgaattaagagaagttataaatgatgaaaatatcaatattcgtttttacaaacatggaactcctgaattcgatgccataaggaattatatcgaacagggcaatcggattcaaatgcaggacaaagcatttaaaaaggaattgaaagaatggatgcgttttaataggaaacacagcgaaaaaacaaatgacggtttaagctaccttgttttcggtgcccctaatctacccaggtttatttcaaagtctattattggccaagctgtaaatgaatggtcgcaggtaaaagaggataacaagaaaatcgcatccgcttcacatttggttttatttacaacgcaaaacgataatattcccgaatggattgatctcggacgaaacctgcaacgtttcctgctaaaatctactgaactgaacattattcattcttactttaatcaaccgaatgaagtacgggaattatctgtaaaaatggctgaatccctcggtttagccggggaataccctacaatactattacgaatgggttatggtgaaacgatgccatattcgaaaagaataaacgtaaataaagttcttataaacaattgataaaaacactgcgagaatgataaataagtgtagatatgtatatcactgtcttcctgtaaatttaagtttgacatttatttttactataagcaaaacggcggacaaatggtagcggaaaacgatttatgatgtctgtaaagtacccgtcgtaaacagatgtacaatgtaagataaaatccctaaaaataggtattgccgggtaatttcaagccctgtacttttacaaaaataaagacagaaacatcgttcattattaatgcaagtgctgaaagaagacatacgggggcgtattttggcggttgccaaactgcaattcgggcagaaaggttattccaaaacttccatgcgcgaaatagccgagttggcaggtgttggcgtgggaaacatctacaactactttacgggcaaggatgaactgtttggcgaggtggttcgtccggtgatgcatgcactggaggcaatgttacaggagcatcacggtatacggggtgaagatgtgatgaggatgaagtcggaaaagtatctgaaagcctgtatagacgaatatgtttcgcttattgacgagcatcgtaccctgctggagattctgttgtttcgcgcacaaggctctttgttggaacattttcgtgaaagctacaccgaccgctccacggaattggtcaaggcatggttcgcatccatgcagcggaaataccctgaaatcaatacgacggtgtccgatttcatcatccacctgcatacggtatggatgttcaccatgtttgaggaattgctgatgcattcagtacccaaacaagaaatggaagccatcctgcacgattacatcttatttgaaatccaaggctggagggcaatcatcaagatatgagagacagaaaacgtacatacggacaaccggccatatcacaacggctgggaaggaggaaagctttacggaggtttcctcctttttttatgaacaattctgaatatcgttcactattaaataataaaaaatatgaaacagaaacacgagtttaagagcattgtggcggaaacactgctcattccgctatacatgcgggcaaaggagagccgccgggaacgtcccattctgaatgacaaggcggctgagtgtctggcagacagtctggaatacgactattcccgcttcgatggagcaaagctgagtgaggtaggctgcgtggtgcgtggatggtatttcgaccgtgccgtgcggcggttcatcggaacacatgcccgtccggtggtcgtgaacgtgggctgtgggctggatacccgcttccagcgcatcggcggcgggaaagccgttttctacgatatggacttaccggaagtcatcgcgttgcgccgtgaactgatacccgaacagccgggtaatgcttatatcgcagcgtctttgttggaaaccggttggatggacgatttgctccggcgacaccccgatgcagagttcatcttcatcgtggaaggcgtgctgatgtacttttacgagaagcaggtgaggtctttcctgcacgccgtggtaagccgtttcggagggggcgaactgtggttcgacgtatgtggcacgatgatgagccggcacggtgtgaaacctgattcgctccgcaaacacgaggcgcaaatccgttcaggcataaatgacggccaccgggtagagcaatgggaacctgccttgcaactcatcgaacaagccaattacatgaagttcttccgcccgcgctggggtttcttcttcggacagatactgggacggctgacccggctgtgctaccggttcagctcgttgttgggctatagaatcctgaagggatgagaaagcctgtttgcttgctttacgtaaaaatgatttacatccattatgaaagctaagaaaaaagaaggattgtcctgcctgttcgagattgcagggcaaaagaaagggctgcttgtataggcaggcttactgtctgccggtagtgcagtatgtatgcttgtgccctattgggccatctatgaaatcttgaaagaactgttgtcgcacggcggaaatcctcctggtgcagacggggaagccgtgatacggtggggatggacggcattcggcggactggttggcggactggtattgctgtatgctgccctgatgtcctcccatgtcgctgctttccgtatcctgtacggcttgcgcgtccgtctgtccgaacatatcggtaaactcccgctggggtatctgagcaacacttccaccggagccatcaaaaaaacgatggaacagaatgtcgagaagatagaaggttttatcgcccacactatcccggatttggtgaatgtggtggctacagtggcagtgatgctcgctgttttcttctcgctggatgtgtggctggccttggtgtgtctggttgtcgtggtgctcagcctgttcctgcaattctccaattttatggggaaaagggcaaaggagttcatggccacctattacgacgtgcaggaaaagatgagtgcatccgctgtgcaatatgtgcggggaatgcccgtggtgaagattttcggacagagtgtccgctcgtttcgtcagttcaacgccgagattcaggcctacaagatctttgccttgaagtgttgcgacacataccagaacgggatgatagcttttaccgtcctgctcaattcactggtgacgttcattcttcctatgggtattttgttgatacaagccaatccgcagtcgctttcgttggcggcggtgtggctatttttcatcatcatgggacctggcatgacttcgccagtctataagctgacgtttttgggaggcaacacgcgcgacatcaacgaaggggtaagccgcatcaactgtatattggaaaagaaacctgtgccggaaccggagcatccgcaggtgcctgccgcttacggtgtggaattccgccatgtgtcgttctcttatgaaaatacagagcaaggaacacggacgaaagccctgcatgatgtcagttttatcgcaccacaagggaaaattactgctcttgtaggcccttccgggagtggcaaatcaacaatagccaacttgataccccgttttggggatgtggaacaaggggaaatatgcataggtggcgtggacatccgccggattgccacggctaaactgatggacatggtgtcattcgtattccaagacacctttttgttttatgacaccctgtatgagaacataaccgtcggttctcctgttgccactaaagaaaaggttatagccgcagccaaggccgcccaatgtcatgacttcattgagaaactgccacaaggttacgaaacaaggattggtgacaaaggcgtgtttctctccggtggtgaagcacaacggatatgtgtggcacgtgccatattgaagaatgcaccgatattagtgttggacgaagccactgcttttgccgatccggagaacgaacacaaaatgcagatggctttacaatcgttgataaagaacaagacggttattgtgatagcccatcgcctttcctccattgtttccgcccatcagatagtcgtcatgaaggaagggcgtattgtacaatgtgggatacatgatgtgttgtcgaccgcagaaggggtttataagaatatgtgggatgcctatacgaatgcttaccagtggacgttgaacaaaaattgaaaaaacagagaagaatcatgaaagaaaagaacttattgagcagaattttacaaaacataagttgtcccgcagggattttggggacggatgattttacggggaatgaattgctttcacacacctttggcttatcgtggatacatattatagcacataaatgaaaggatttaagatatggatgcaatcgataatattacaataggccatacggaacggctttacaagcccgtgggctataccatgcttaccaatctggttaacatcgtgccgttctgcctttccattgaagcggtacgtattattttcggcgcgtttgacgggagcggacagccgcttgacacaactcgcctgtggtacatattcggtataatggctgtttatatgctggtcatgtctttggcggaacgggcttcttaccgagccaatttcaggggagcatacgaaatgagtgctttggggcgtttggcactggcggaacacctgcggaaactttcattgggttttttgtccagacgtgaccccggcgatttgtcttccatgctcattacggacttcatgttggcagaaaccggaatttcgcaccacttgcctcaattgatgggggctgtggttatgcctgtgctggcttttgtttcgttggtctggatagattggaggatggcggtcagtatgtttgccgccttgccgctcgccctgctcgttctgtgggcaagcacaagcgcacagaaaaaattaagtggcaggcaaatccaagcgaaaatcaacgccgggaaccgattggaagaatacctgcaaggcatccgggtaatgaaagcctacaatctgttgggcgaccgcttcatccggctgcgtgatgcctttgctgaacttcgccgggcctgtatccgtcaggaggccttattagggccgttcgtcctgttgagtatcacgttagttcgtgccggactgacgatgatggtactgtgggaaaagcacggtgatgaagctttgtgcccgtttctacgatccacagcaaggacacctctttttcaacggtgttccgatggatgaaatagcacctgaaagcctgatgagccacatctctatggtttttcaagatgtctatctgtttcaggatacgatacgcaacaatatccgcttcggtaaaaccgatgcaatggatgaagaaatcatcgctgccgccaagaaagcctgttgccacgatttcataatgcgcttgccgcagggatacgacacgatggtaggcgaaggtggttgtacactttctggtggggaaaagcaacgtatatccatcgcacgtgctatgctgaaagacgcacaaatcattttgctggacgaagcgaccgcctcgcttgaccctgaaaatgaagtggagatacagaaagccatcggcacgcttatcaaaggccgtacagtcatagccattgcccatagactcaaaaccatcaagaaagcagaccggataatcgtcttagataatggacagataaaggaagaaggaacgcatgatgaacttatccgacaagaaggactttattctcatttgtggaatatccaagaaagtatctcagggtggaaactataagatgatattgtgcaatggtcctgtagtgctgacggaagatgccgggttttgtgccggaagaccgtttaatagtcacaacggttacaacagtagcagaagttgggcctaaccgttgtaaccttggtcgttctttcaacttttgtaaaaacgcaaaggcctgagttcagtgtcatttagaactcaggcctcggctttgggggcgtttcgtatttattgtaccgttttgaaaagtatcggtttacgggtccggtcggtccattccgttatcaaagaacggaaagccggatattcggccggcgttatgagttgctttttgatttgaagggctagctcgatgtggagactagaaccttcggaagtcagcgttattttgaaactaccgatagggttatcgattttcttttcttgaatcggtgtacaaagagtcagattttcaggaagctggatatcataagaataattttcgtctaccgaagccggtaaatataaattctttgaccgggaagtgttgtaataggcataggattttcccgttattcctttataacagacaggaagataaaaaaagtaataattttcttcctgcttcaatcccgcttttcctttaccggaaatagtcgtcgttttttcacccggagtgacagtatattcccgaataccgggtagtaaggtaccggcgtagttggaagtatagggaatcaatagattattgagggtagctttgatgtccatatcggcttcttgttggggagtgatgacgatcgaagcctgataaccgatcgaagcgatagggggatcaggaagcgatttcttcccttcggctaaatcgacaaggaaagtgcagtctgttgcagccggatcggcattttggacgctcaaccgataaggtcgtccgtcagcctcggctaatatgacaaattcccggattgcattcagaccgcagttgtctgtttccgaagggatggaataagcggctgcaggtactgcctttattccggcaacccgtaataagttggtcatcaaattaaccttttctataccagttccataagctgtccggatcacttcggccgaaggacggaatcggaaaccggtttcagagagggagagcggacaatcgctcagctccgtttgaatatattgttggatacgggttattttttctgaattcgactgacatccctcggttatgagttgtactaactcctgtatctgtggggtgggagccggatcgaattgccggtaaaggttttgtaaagcctgtgcagctgtgggataagtggtaaacagaattccggccagatcaccgttctgtaaaccggtaccctgttctctcgatcgggccggtagattgcggaatgtccatttcagttgctgcctgtcttgtcgttgcgatttttggggttgcgcttttagctgaagaagggcataatgcggaataacggaggccggtaaattgaaggtcaggctgtattcctttatcggtgaactttcttctaatggtttgcatacatcgattgccgggagataccctgccttggaaataaccgaataatccagatagatcgtagctcctaattcaagtcctgtatgtacgatgaccatttctttcaaccgattataggccggagcatccgctgcaccggcaggcaatacttcgacaaaggcattgtccggagtttggatcgtcgttccatccttttgttttacgtaggcactatgtatctttaattcctgaaaatcgggattataagtgataaaagtctggccataagtagagttcatcgctgtatgggtaaagagggtcagctctttgtaataacgatattcctggctaccgtcctgatgtaaagtccaggtttctgctaatttccggaattccgcttcggaagggatggctgacaaagaaccggagaaaaggaggaatatccagaaaaacaggttttttatagtatttgttttcatatcggatctgatcggatttatttattaataatcaggtgattgccaaaagctttatgagcatttacggcagtacggaaaccgttccaatccccggcttcatatactctttttttcaaggccagtttttggtgtatatcgattttattgttttcttgccggatatagccttcaaaatcggctgccgggctcttccggttatcttcgacggattgcaccagacgatatccctgaggtaactgaatcgtctcgtccagttccaccaaacgggaacagccgtctttaaatccatactgacgttccggaatatctgtgtcgatccggaggtatgagcgaacctggtcgtaaagtccgtgcatagtcaaaggaaccagcgccatttcgtcgttgccgatgattgcataatcgggaatttcataccagaatgtgattttgatcggggctgcctgatagtctttgggatttttactccagtctactttcaatagtttggctttgggagaaatactcagcaattggctttccatcgaatttttccagtcgctttgccagccggtagtgaatatccggcgtatattcaggtcggattggccttcggctgtgagggtgaattgtccggttagtttaccgtttttgtccagtttattattggctttgatgcgaaaataatggttttcgggagcggaaacaggcgtaatacaaagatccgaaccttccggtacaccggggaggtagttttgctgttgttcggcactgctccaaagttcccggcagaagggcacccaggtcgggtctaaaggcatataggtaccgttgcttaattttaccactgcaacacaatggttgaaatggtcggcgggtatactttccacccgacttccggccatagtcatggccggataggcttcgaaacctgccattcgcagaaatgaaatcagactgccggcaatgtctttacatacaccgcaacggtctgtataattcattttcgtattgtgcagggtaaacccttctccttttcccatcgtgattccggcatagcggatattatcggcaacccagtgggttaatacggcgattttttccatttcggttttcttgccccggatgagctcattcactttttgccgggcttcggggagaggggcgaagctgccgtaatcttcgttggttttatgaaaccaaagggatttatctttccaatgtggcgtggaggacatcattaatttgggagcggcatcgtacagatcgaccatattgggttcacgacgtacgggcatcatattatttttggcaaaagtatagactttacgatcgttttcataacgcatagaagaagcacattcgccttggtagaattggaattgcatctctttctcccgggggagagtaacggaatataccttgcgcatggtcgggtcgtcacaccagaaaggaacaatatcataaaattgtccccgcataggaggaacgaaccgttcttcgtccggttgatcggtcagcagggcataggtgaacccttttttatgtatttcgtattcgatgatatctcctgggtcaagccggcccagttccagcatgatttgccgggctccccaatagatcatccgtgccggagccgtataatccagtgttttaccgacatctaccggacgaacttctccgtttgctttgtaaatattcacccgatgaaattcggcaaaagcagtcaggggatcgtaatcgtatttcagtacccggttagccaaagctcccgaccggttctgcaccagaataaccttgttgatcgtaaaggtacctgtcccgctgggagctacagaaacggcggtactgtccaataggatgatttgtctggcagaagccagctcccctcgcttttgggcttgttgttgcaaagcccgccaactttgtccctgaaccggaaacaaagccggcaggagcaggagtacacttaaaaatattttgttcataagctggaaatttggttaacacatttttccaaaaatagtaatctttttttggtttttgaaaaaatagttccgaaagtacgattgaaatttgagttaatgcctgcttctgtttgcgataggggtataaaaattaccggatgaaaagtaatcgttcttttcatccggtaaaatcagggcagaccggtcgtttatctgatctcagcgcctaactgatgtttgtaggttcccatcagtttattcatgatcttatcgatctgtttgtcggtaagtgttttttcatcgtcctgcaacgtgaagctgatcgcataagattttttaccggctcccagcttttcaccttcgtaaacgtcgaataaggtcactgatttcaacaggcttttttctgtccggaaagcaatgtcacgcacctctttaaaactgatttttttgtcgagtagtaaggccaggtcgcgtttaaccgccgggaacttaggcataggagtaaaggtgatcgtatggtttttaatcactttcagtatattttcccaggaaaactcggcataataaacctcctgttcgatatcgttcgatttcaaaactttatgactcagcatgccgattgtgacgatgtgcttaccgttttgtgtatagcttatcccttcgcggtaaatatcggcactacattcttctaaagtcagcatttcggttttgaatcccaaacggatcaggatcatctcggcataactcttgagattgaagaaatcggtcttttgttctttactgttccaggaagcctggattttatcacccgtaatgaaaagggccagtttatcttcttctttgtattgtttcaggtgattttcgccttcttttttgtggaaggtataagcttttccgaattcgaagagacgtaaattgctgtttttgcggttaatattataggcgatcgtctccagccctccgaatagcaggctttgccgcatagcgctcaggtctgagctgagcggattgaacaacataaccgtttcttcgggacgataagtctccagatgctcgtaataagaagctttggtcaatgagttgttcatgatttcattaaaaccgttggcggccaataaatctgcaattttatttttcaattggaaatcatccggtttttcgctgtaactcagggtagagtttactttagccggaacttcgatattgttgaagccgtatattcttaaaatatcctcgatcacgtctgcttcgcggcgaacatccacccgataaggggggatctgcaacgaaagcccttcggtatcttcttttacaatctttatttccagagcattcaggatttttttgatcgtatcttgtccgatttttttgccgatcagacgatcgatgtgggcatactttacttcgacttcgaaatcggctaccggattcgggtagatgtcgatgatttcggacgtaatctttccgccgcccagttctttgatcaataaggcagcccgtttgagggcataaataacgatgttcggatcggtgcctctttcaaaacggaaagaagcgtcggtattcagcccatgacgacgtgctgtcttccgtacgaataccggatcgaaacaggcactttcgaggaatacattggtcgtagcttcggtgataccgctttccaatccaccgaatactccggcaatacacatcggttcttcggtattacataccatcaggtcgttctcgttcagttcacgttcgacaccgtcgagtgttgtgaatctggtacctgtcggaaagctacggacgatcactttatttcctttgattttatctttatcgaaagagtgcaggggttgtcccagctcgaaaagaatgaaattcgtaatatctaccacattgttgatcgggtgtaaaccgatggctttcaaacgcgtttgcaaccactcgggagattcctgaactttaactccttcgatacatactccggcatatcggggacaagcttccggacgctgcacttcgatcgagattccggcagtattgctgtcggctgcaaagtgagctacggaaggaagggtataatgaatctcctgggtttgctgtaaataggcagctaaatcgcgggctactccaaggtgagaagcgccgtctacccggttgggagtaatatcgatctcgatggtgtaatcggttgtaatgtgataatattcggcagctggcatacctacccgggcatccgacggaagtacgataattcccgcatgatcatgaccgatacggatttcatcttcggcacaaatcattccttcggattcctgtcctctgatttttgattttttgatggtaaattctttgtctccatcgtaaagcaccgtcccgatggtggccactaccactttttgtccggcagctacattaggagctccgcaaacaatgggggtaaggcggccgtctcctaaatctaccgttgtcaggtgtaaatgatcggaatccggatgggcttcacaggtttttacttcaccgatcaccagacctctcaaaccaccccggatagattcgaatttttcatatccgcccacttcgagcccgatactggtcaatatttcgcagactttttcaacactcaaatctattttcaggtattctttcagccaatttaaagatatattcatagtttttgattttctgatagtttatactcctgttttgggaatacagctgttttatttgatttgtaacattttctcgataggggcccaggctctctgacggatatcttcagccacttcaactacatattgctctttctccaaagcttccagaaccgattccagcgttacttttttcatttgtccacaaatggttttaggatgaaccggaataaattctttgtccggattatcgtttttcagtttatggatggtttctatttctgtggcaatgataaattgctttttgtccgaccggcttgcatgtctgatcattcctgccgtcgagtacatataagcttgaggaagatttaaaatggcctcgtcgtgcgaacagtggctttcggggtgaatgaggatatctgcctgaggatagtcccggcttttttccaggatcatgtcggtggtgatgcgttcgtgtacacaacaatctccatgccagagttccatttcccgtccggtaactttcctgatccaggctcccaggtttttgtccggtacaaacaagatcttacgatctggaggaatgctttgtacgactttcagggcattggccgaagtgcagcaaatatccgtccaggccttcacttcggctgtcgtgttgacgtaacttacaataatcccgtcaggattggcttttttccattcccgcaattcataaccggtaatgctttcagccagtgaacatccggctcctgaagccggaatcaggatctttttgtccggagaaatgatcgctgcggtctccgccataaaatgcacaccgcaaaaaacgataatccgggcatccgttttcccggcttcctgggataatcccagtgaatcccccagatagtctgctatatcctgcacctccggacgagtatagtaatgtgccagaataacggcatttttttctttttttagttgccggattctgtcaataatctctgtattcgtcataatatattaattttctgcttcaaagataacaaagaaagataaaaaggtgaaattatttaatcttcatttcttcctgaatttttttactctcccgttttagaatgagcgtggaaaatttagattttaaaatactgatggatattttttcgtttacactcaattcctctttaaactgttcgtaatatttttctgtataatcgttgaaccgggcctgtattttttcccattcaggatcggacagggtggtacagtttttttctgtttgggtgataaacttttcgaagtcttttaaatagctgtctttgttcatactacatcgacagaaaatcaatacaagacatccgatgataaataatttgagtgctgatttcatgaaattagtttttttgaatattcatactgatgtccaaagccgttacggagtgagttaaggcaccgacgctgataaagtcgactccggtggctgctacttcttttaaacggggaatactcatatttccggaagcttcggttttggcctgtccgtgaatgattttcaccgcttcggccatctcggcgttactcatattgtccagcatgataatatcggcatgcgtagcgagggcttcgcgcacttcggccagattggtcgtttctacttcgattttgataccggccggaatatgggctctgaccgcattgaccgcattggtaattcctccggccaccttaatgtggttgtctttgatcatggccatatcgtataatcccatccggtggttggtcgctcctccgtctttaacggccattttgtccaatacccgtaagcccggagctgttttccgggtgtccagtaattgggtgtgagtaccggctaattcttcgacgtatctggccgtttccgtagcgatgcccgacatgcgttgcaagatgttcagcgaaagcctttctcctaataagaggcaacggtagctggcttcgatacgcaggataatatcgcctttttttacccgatccccgtcttttactttggcgtcccaaaggatgtctttctcgaatttttcatacacccgtttggctatcgccagtccggaaattacaccgtcggctttcattttcatttctgcaacggcccgggaatgagccgggatgatggagttggtcgttacatctccggtagcgatgtcttcctctatggcgaggtcgatcaggcggtcgattaattggtcgtattgtgtcattttatagtgattttcagtttaaagactttttagtattgacaggtagggtacggaggtctttttctttctgttgtacgatatggaaaagataggaagcatcgctacaaggataatcttcccggaaatgtcctccacggctttcctgacggtaaagggcagaacagataatcaacctggcaactgtgatcaggttacggcaaatcagggtattatattcgtttatttcccggggcagattgtcttccagactttccaattcgttcaatccctgtttcagtttttctgcattccggatgatgccggcataatcggtcattatccgcgaaatctcttttttcagatggacataaagcgcagcataattgtcattgcaatgatagatcggtttgaatacctgggtaggagaggttttcagatttttccgcgaagcctcgatggcccgtttcccgaataccagacattcgatcaacgagttggaggcgagccgattggctcccatgattcccgaagaggccagttcgccgcagataaacagacgtttgatgttggtctgtccatgggtgtccgtcctcactccccctaccatataatgtgctgccggtgctacggggatccggtcgcacatatcgatacccaattcctggcatttttcataaatattcggaaagcggtgtttcaccacctgaggatcgaggtgtttgagggacaaccagacgtactcctgatcgtatttcagcatctggcggtaaatagattgagcgacgatatcccggggggccagttcggccaattcgtgaatcgccggcataaagcgttctccgttttgatcgatcagataagccccttcgccccggactgcctcactgattagaaatgcctcttccgattcggtatagatggccgaaggatgaaattgaatgaattccatatcggcgatttcacaacctgcattaaaagccagagcaagtccgtctccgatcgtggtatgcggattggtggtccgtttgtaaatagccgaagtgcctcctaaagtgaggaaggtgttgtcggcataaaacagttcttcgctttctgtcactaaattccaggcccgtacgccgtaacattcctgattttcctgaaggataccgatcacggaatgattttcgaaaatatctatcttcggattattgatgactttgctgatcataaaactggtcaccatacgtcctgttgcgtcaccgccggcatgaagaattcttttccggtgatgtccgccttccaaccccaaggcgaggctgccgtcttccatatcgaaatgcatacctgcctctatgagttcatgtatccgttgcggaccttcgttcactaaaatatcgacagctgggtaatcgcaaagcccgcgtccggcaataatcgtgtcctcgaagtgaagtgcaggagcatcgtcttcgtctgtaacggcggcgattccaccctgtgcaaaataagagttgctctctgtaataccggatttggtcagcaaagcaacttttccataagcggcagcgtgataggccgtgtaaagccctgccaatccactccctgctataatataatcgtaatggcgcatcttcaaaaaatgtaaattagtgcgaaagtaccatttttttggaaataggggagaaatttttcaattattttatcgtacttttgtgcaaaaccaaatcaataaaaagaatgattacgaaaaataagatggtatccgtaagttacgaattaagaacggaacaaaacggagagttactcgaagcagcaggtgcagaccggcccttggattttatctgtggacaagggcagactttagaatattttgaaatgaaccttctggataaaaatgaaggggataaattcgatttcagcattccggcagcccatgcttatggactggtgaacgaagatatgattgtggatttaccccaggaaatatttaaagatgtagaagctgaagagatggtggtcggccatgttttaccgatgatggatagtgtcggaagacgtttgcagggcaagatcctgtctatcggtgacgaggaagtacgtatcgattttaatcatcccctggccggtaaagatttgtttttcaagggtgagatattaggtgtccgtgatgcaacggatgaagaactggaagctttacattcgcataaatgcggggggtgtagtggctgtggttctgaaggaggttgcggatcccacgacgagggctgcggatgcggaggatgtcactaaatatataaggaatactttctactttttatgtccggtaattctataggaaaattttttcggctgatgtcgttcggagagtcacacggtagtgctgttggaggggttatcgacggttgtccggcaggaatcgccttgtctgctgattttattcaaggtgagttgaaccggcggcggcccggtcagtcggaggtttctaccccccggaaagaagaagacaccgtagagattctttccggaatatttgaaggaaaatctaccggcatgccgatcggatttctggtgagaaatcagaatcagaatagtaaggattataatcatctgaaagatttataccgtccttctcatgccgattatacctgggaaaagaaatacggtatccgggattatcggggaggcggacgttcgtcggcccgggaacacattgcccgagtcgttgccggggctgttgccaaacaggtgttggccggttacgggataagcattcgggcatatacttcacaagtcggaccgattgctgttacccggccttatcaggagttgcccttggagcgggcagaagataacatcgtacgttgtcctgacgccgggattgctgaagaaatgattgcattgatccggcagctgcgggatgaaggggatagtgtcggtggaatagtcagttgtgtgattcagggggtacctgccgggttaggcgaaccggtgttcgaccgttttcaggcaagactggcgcatgcaatgatgagtatcaacgcaaccaaaggttttgaatacggaagcggatttgcagcagcctctatgcagggaagcgggcataacgattcttttgtcatgaaaggaagtgaagtacacacggcgacgaatcgctcgggaggtatacaggggggcgtgacgaacggagaagatatctatttccgggtagctttcaagccggtcgccactattatgaaacgtcaggaaacggtgacacgtgatgggaaagaagttactctggaagcacacggacgccatgatccttgtgttattccccgcgctgtgcctgtagtcgaagctatggcggctatcgttgttttggatatgctgctcgaggcccggaccgattggggccgttgatttatttttgaagaaaaatctttccgattgtttgattttagaaaaaagtttttcatctttgctccgttgaaaagaacaaaatatgaatttattactgacaaataaagcatggtggtggcgcctttcgggaataaaccggtgggacgcacgctttatgatgtctggtcagtaatatcagtgaaggaactgtattatcagcatatagaggctatcggaacaccggtagccttttttgttttttgtccttaatgaaaattccaaaagtaaatcatatgaaaaattttaatgtaaacgaccaggggttttacggtaggtttggtggtgcttatgttcctgaaattttacatgcgaatgtagaaaaattacgtgaatgttatttgcgggaaatggaagatgagtcttttcagcaggagttcaggctattgttaagggattatgtcggtcgtcccagtccgctttattatgcccgtcggctgagtgaaaagtacggtacccggatttatctcaagcgcgaggatctgaatcataccggagcccacaagatcaacaatacgatcggtcagattctattggcccggcgtatgggaaagaagaggatcattgccgaaaccggagccgggcggcacggagtagcgacggctactgtatgtgccctgatgaatatggaatgtatcgtttatatgggagcgaccgatgtggtccggcaacaacctaatgttgaaaaaatggagatgttgggagcgaaggtggtagctgttgaaagtggcaataaaacgctgaaagatgccaccaacgaagcgatccgcgactggtgttgtaaccccgcggatacttattatatcatcgggtcgacagtgggacctcacccttatccggatatggtggctcgttttcagtcggtgatcagcgaagagatcagaaagcaattgttggaaaaagaaggaagggaagaacccgattatgtaatagcctgcgtgggaggaggaagtaatgctgccggggctttctaccattttctgcattctcccgaagttgggttgattgctgccgaggctgccggaaaaggtttgggaagcggagagtcggcagctacgatccatttgggaaaagaaggtattatccatggaagccgtacgttggtgatgcaaacggacgacggacagattgtcgaaccctattctgtttctgccggactggattatccgggaatcggccctttacatgcatttctggcagaagaaaaacgcgctgaagtattggctgttacggacgaagaagcgttgaatgccgctttttgcctgacagaaatggaaggtatcatcccggatttggaatcggcccatgccctggcagttctggaacaaaaaacattccggccggaagagatcgttgtcattaatttgtccggtcggggtgataaagatatgcagacctacaaaaggatgaataaatttttacacttatgaaatatagaattaaaacaatcacccgtattcttccggccgacttgcagactcctgtgggaatttacctgaaggtacgcgacttatttccacaatcggctttgctggaaagttcggattatcatacgactcaaaatagtttttcttttatcggcgtggaaccgatggccgatttttcggtaacgaaggaacagatcgtacgtcgttttcccgatggccggcaactgacggatgctcttacagaaggcgtggatgttatcgaaatcctgaaagattatatcgcttcgttcgagaccgaaacaaacctgaccgggatcaacggttttttcggatatacggcctatgatgccgtgcgttattttgaagctgtccgtatccggaagaaagaagagaagtttgctgaaatacctgatatgatatatatattataccggtatattattgtagtcgatcattttaaaaatcagatgacgatcgttgaaaatttaccggaagggcagcattcccatatgccggaacttatcgatgtcattcataacaataatatggctcggtatggtttcgaggcgttggacgataccggttctccgattagcgacgagcagtatatggaaacggtgaaaaggggtattcggcatacccaaaggggagacgtatttcagattgtactctcgcgtcgtttcagccgtggatttcggggagatgattttaatgtataccgggccttgcggtgtataaatccttctccatatctgtattattttgatttcggccattttcgcattttcggttcctctcccgagactcatctgcgtgttgccggaggtaaagcttatatcgatccgatagccggtactttccgccgtacaggagacgatatccgggattcggaattggcccgtaaattattggaagatgagaaagaaaatgccgaacatatcatgttggtcgacctggcacgtaatgatctgagccgcggggctggtcaggtaaagatcgagttcttgcgtcagatccaatattattcgcatgtgattcatatggtgtcgagagtgagtgcttgcgtttccgaaaataccgatgttttgcggctctttgcggatacttttcctgccggtacgctcagcggtgctcccaaagtcagggcgatgcaactgatcgatgacatagaacctcatagtcgcgggatttatgggggctgtatcggctatatcggttttcagggagaattgaaccaggccattacgatccggagctttctgagttacggtaaccggctttatgctcaggccggagcggggattgtagcgcactcttcgcctgaaagtgaattgcaggaattgaataataaattgggggctttgatgaaagcggtggaaatgagtgaaaaggttaaaaattgaacttatggaaaaaatattgatactcgacaactacgattcgtttacttataatattgttcatctcttacatgaattgggaaccgaagtggatatagccagaaatgaccggatttcggtggaggaagccggccgatacaaccggattattttgtctccggggccgggaattccaagtgaagccggaatattacccgaagttgtgaagcgttatgcggctgaaaaatcaatcctggggatttgtctgggtgaacaggccatcggggagtgtttcggcgctgaattggagaatctgccggaagtttttcacggtatttgtacaccggtgcgggtgattgccgaagaaaagatgttctccggtctgggtgaaagttttgatgtaggcaggtatcattcctgggtggtaagtcggaagaatctgcctcaatgtcttacagttaccgctgaggatgctgcaggcagaattatggccctgtctcataaaagctatgatgttcgcggacttcagtttcatccggaatcgattttgactcctatggggaaaatgatgatggcgaattggttgcatgcttgaagtaaagggaatgtatatgatatattgattactatgaaagaactgttatataaaatgttcgggcacaaaagcctctctaaagaagaagctaaacaagtcttgttgaacatttccgacggccggtataacgacagccagttgtcggcttttatgaccgtttttctgatgcgtagtattacgacggaagaattggccgggtttagggaagccattctcgaacggagggtgatcgtggatttggattgtcatgatgcaatcgatattgtcggtacgggaggggatggaaaaaatacgttcaatatttctacggcggcttgttttgtggtggccggagcaggctaccgggttgtaaaacacggaaattacggtgccagttcggtgagtggggcttcgaatgtactggaacaacatggggtgaaatttacaggacactccggtcggttacagcaatcgctggaagaaagcggggtcgcttatttgcatgcaccgttttttagccctgccttgaaaagtgtaggaccggtacgacgtgctttaggagtacgtacctttttcaatatgttggggcctttggtcaatccggtactcccacgctaccagttattgggagtatataacctgaaactggcccgtttgtataactatatgtatcagcagagcggagtgaattacacgatagtacattcgctggacgggtatgatgaagtttcgctgacctctccttttaaagcgctgaataatcggggtgagggcatttatttgccggaagagatcggattcggtcgggtggcggaagaggaattgtcgggaggaaatacggtgaccgaagctgcggcgatttttgaccgggttttagctaacgaggctacccggggacaagaagactgtgtgattgccaatgctgcttttgcaatccgtaccctgaggcccggaatagctttgccggatgctattgcagaagcgcgtgaggcgctggagagcgggagggcactgagggcgttccgtaaatttgtagaacttagtgaaaaatgatatgtcagttttaaaccggatattgaaaacaaaacaggaagaagtgactgagcggaaaaacaggatttccgaaagggatctgatgagtacgcttttagctgggagacaacggttatcgatgcgaaaggccttggaggaatcggcaacagggatcattgcagaatttaaacggaagtctccttccggaggatttattcatgaggcagccggagtgcaggaggtggtcggcggatatgtacggaatggtgctgcggcttgttcggtgttgacggatacggattatttcggaggatcgttattggatctcgctatggccaggagggtttcggatattcccttattgcgtaaggattttatcgtcgattcctatcaactggccgaagcggtggcttatggagccgatgccgttttgttgatcgctgcagctttgtcgccggcacagtgccgggaattggccgatgccgctcatggactgggattggaaatactattggaaatacatcgggaagaagagttggaatatgtctccccggaaatggatatggtggggatcaacaatcggaatctgactactttcgagacggatatttatacttctttccggttagcttcacaagtcccggttgcttgtctgaaagtggccgagagtggaattcgtgccatggagacagtcgtcgcgttacgcagattgggattcagaggatttctgatcggtgaacattttatgcgggaagcacaaccggctcaggctttaaaaaattttgtcggatatgctgattaaaatttgtggcatgaaggaacccgggaatgtgaaggaagtcgctgctttacatcccgatatgttgggttttattttttataaagcctcaccgcgttatgccggtgatttgtctccccgggctttggaacgtttacctgcagctatcgggaaagtaggagtttttgtgaatgcagaaaccgggtttatcgaaaatatagtacgaaggtataggatggatacgattcaactgcatggggatgaaccccctgaaatgggtcactattttgtacggaaaggctaccgggtaataaaagctttcggtatagaagaggccggtgattttcaacggactttgccttatgaatcggcttgtcagttgtttttgttcgatacccggagcagacagtttggagggaccgggaaatcgttcgactggaatttattgaaccggtacgaggggagtgtaccttttttcttaagtggaggaattgcctgggaaaatagagaagagatcggaaaaatcaaacatccgaagcttgccggactcgatttgaacagtcggttcgaaacggctcccggaatgaaaaatatccatttattgtttcgttttttagctgaactaccttaatttttttagttatgaatcggattacagagttgtttcaaagaaaagatagaaatcttttgtccgtgtattttactgccggttatccggttttggaagatacggtcgaaatcatacagatgttagaaaaccggggagtcgatctggtggaaatcgggattcctttttccgatcctatggccgatggggtagtcatccagcaaagtagtacacaggcactgaaaaatggcatgacgttgcctgtattactcgagcagttgactagtatacgaagtcgggttgaattgcctttgctattgatgggatatttgaatccgatgttgcggtacggtatggaaaacctttttcgaaaagggatggaaatcgggatcgatggaatgattattccggatttgccgtttcaggaatacctggagtcggttaaaccgctttgtgaaaaatatgatattccggtgattatgttgattacccccgaaacttcggatgaaaggatccgtctgatagacgaatattgtggcggttttatctatatggtctcttcggcttcgacgaccggagtgaaagatcggtttacagccggacagattgaatatttccaaagaatagaccgtttgaatttgaaaaataaacgtttgatcggtttcggcatatctaatggcgagagcttgtcgaccgtttgccgttatagtagcggagctattatcggaagcttatttgtaaaattactgggaacggagcctacggtggaggaagctgtcgatcacttgttaaaaatagctcacagggacgggctatagcctgctgcccgcgtccccgtgagctaagagctaaaaaaaagttgaagaaaggggagaaatctctgggatttttcttatttttgaaaaaatttaaattcttgaaaattatggcaagtattagaagattaaagaaagacatcgattgtttgacttttgctgttgttgacgatagcttaaattgtctggctgtaggtaaaagtatggatgatatcagcgaaatagtacagcatattatagattccagaaatgatttaagacaacgtgtaaatgctggaaaacaagtggcgaaagcagatagaaaaggatattacaggactatcggaaaggatttgattgcttctgtagacggtgcatttacaaaattaagcgatttggtaaagcaggcttaagctgttcgtagagaaaagaataaaaggagaatgcgatgaaggcatcctccttttattgttctttaatgaaaaatagtttttcagatcatggaggtattggaacttgcgggtattggtgaaataaaggtccggcggagtgcgaatatcaagtatttgcgtattcggatggctccggggcgtggggtttgggtgagtgttcctttcggcgtgagccggaaacaggtggagaaatttctggaagagaatcgggagtggattctcaaaaaccggaaagatatgaaagtttatgaggaagacaccggagtcggtttgggaataggggcggaaattaagacgaagttgcatgtgctgaggattgtggagaccgaggaaccgaagccttcttatcggcttgaacaggaaaaaataaccctgtttattcctaaaaaagtcgatttcagtaaagtagagaaaatcgttcagcagtttttgctggaaatctatacgatggaatgccgtcgatatttgccgcagcggatcagaaactatgccgaaaaattcggatttcgttacggacgggttacgttcaggaacaatatttccaattggggtagttgttcttttgacaataatatcagtctcaatatcaagttgatgaagctaccggatgaaattatcgattatgtgatcttgcatgagttatgccatacggtagagaagaatcattcggctgcattttggaagttggtcggcaaagtatgtccggcttatccgactttaagggccaggctgaggaaatataatacccggatttaatctggacggagagtcgttttggcgaatcggctatttttactattttcgttacccctaaagggatattaaatttttaaatgttatgatgcaggaaaaacttaaagaaatcagggatcttctcacagaagtgaagtatcccggtacttctaaaaatattgtggaactggatatggtgcaaaatatccggatcgagggagagaaagtgttgtttcggctggtgtttcagaaagccggcgatccgtttgtcgggtcggtgaagaaaaaagcggaagccctgataaaagaaaaaacttcttatacggaggtagagatcgaaaacctgtttgttcaggatttggagagaccgttgtccctggaaaaggtaaaaaatataatcgctgtttcctcgggtaaaggaggagtaggaaaatctaccgtggcggcaaatttagcggttgctttggctgctgaaggatataaagtgggtttggtggatgcggatattttcggtccttctattccgaaaatgttcggttgcgaagaggctcagccctatatggagcagatcgacggaaaggatttcattgtgccggtagagaaatatggcgtaaaattgttatctatcggtttctttgtcgatccggcttctgccactgtctggcgggggccgatggcttccaatgcattgaaacagatggtggagcaaggtttttgggacgaattggattatatgctgatcgaccttccgccgggaaccagcgatattcatttgactttggtacaaactgtcgccctgacaggagctattgtagtcagtacacctcagcaggtggctttggccgatgcaatcaaaggaatcaatatgttcgagtcgccgggtatacaggtgcccgtgctaggcctggtggaaaatatggcctggtttactccggctgaattgcccgatcataaatattatattttcggacgggaaggggcgaaacaactggccgaacaaagaggtctccggttgttgggcgaaatacctgttgtacagactatttgtgatggaggcgatgcaggtaaacctgtagctttgaatgccgattcgattacgggaacagcgttcaggcagttggcggatgaagttgtgaaagccgtagaggaaaatcacgacccggcaaaaagagtgagagtcaccagacaataggacagcatgtctaaatgaaatattcttcttatatattaacggggatgatggtggtgctgtgcggttgttcggtgaagagaaacaatttcttttcacgtaactatcaccagttgactacccgttataacgtttattttaacggtgaccaggctttgaagtccgggataaagcatatggaaaacaggcataaggaggattatacccaccttttgcctgttttcgtatctaatgacgaacagacgcgtagtatttgcagctccgatatggactacgtgatcgaaaaggcggctaaagcgatcgataaacattcgatcacggctaaacccaggcggagaaagaataaagattccaaaaattatcagaccttccgaaagaaaaaagaatttaataaccagttggataaatgctatctgttattggggaaagcttatttctataagaagaaatacacgatggccaataacacttttcgttttatacaaaggcaatatgccgaagacgaggccttgatgaccgaggtgtcgatctggttattccggagcctgacggaaatgggacgctacgaagaggctgcccggatcatggaccggctcgacgggagcacattaaagcggaaacaacgggagatggttgctgcggcgagaaccgatttctatgtgcgtcaaggtatgtacgaacaagcgattcctgaggcagaaagattggtcaggacttgtaaaagcataaaacgtaaaccgcgctacaattttttgttgtctcaattatatgtaaaagaaaatcaggatggggctgctaaactggcattgaaaaaagctacccggttcaatttcaattatgaaatggtcttcaatgcccggatcggtatggcttcagcctatcaggaaggagatgcggccgtagaaaagaaattgaagaaaatgttgcgggattcccggaacgaggaatttcaggatcggatttattatgctttggccaatatcgaaaataaacgtggaaatgaggaaggagcggccggtttgtattggaaatccgtgcatgcctctgtagataacgataatcagcaggctttgtcttttgtaaaattaggggattattatttcaaaaacaaggcctatgtgcaggcacagagttgttacgattcttgtttgcttgtcatggattcgcgttatgaagattatgaaaaactaaaatctttactgaccgatctgaccgaattggttacgaatctgagaattatacaaacgcaggatagtttgcagcggatagcggtgttaccggaagaagagagaaaccgcttgatcgacgataaaatcactgcgattaaagagcaggaaaatactcgcaaagaacaggaacgaagggagcaggccgagcgtaatttttatcgccgtaacgatatgcttagccggggagatgctttttcacagggtaaccgcggaggggattggtatttttataatcccgtgacgattgctctggggaaaaatgattttaagcggaaatggggacggcgtaagctggaagacaattggcgcagacgaaacaaagcaagtatcggtttggcagacgaaaccggcgaagaattagcagagatgacgggaggggaaagggaagtgaaagatgtaaagagcagggagtattatttgcaggatctccccctgacaccggaaatgctgcaggcatctgaaaaacagatcgaagaagcttattataaagccggcgaaatttatttgtaccgtttgaatgatccggaaaaggctttagagtgtttcgatgcttatattcagcgttttaaaaataccgctaatctgccgatggtctattatctggcttccacgaccgctctcaaggcaggtaaggcggcagaggctgaaagatataaaacagagctgaccgctcttttccctgaaagtgatttcgcccggggactacaagacccgaactatttccgtcaggtcgaagatgtgctgaaagtggtagagaaaaagtatcaggaagcttaccgatattaccaaaaagtttattaccacgaagcagcacaaatttgtgacagaatcctgaaagcgtacccggataataaattgaaagcaaatgtgctgtttctgaaagcgatgtgtgttgtaaataccggttctccccaggaggcgaagaacgctttggaagaggtaatcgcagcccgtcccggaaaagagatcctgcaggtgactagcgacattctggcttctttagcggtaggagaaaaacctgttcggtattccgaagcggaaatggctcaggtccgttctttacaggcgaaccgcaattggcaattcgatgaagaagtactggctggtcgtagccggaaagaagaaacaacttataaaatcgagaaagaaaaagaacaatgggtggtattgtttttgccacaggaatttacaaccgttcaggaaaccagatttaaagcgcgtttgaagtttattcatgctgccgaaatggccgaagggaaaagttatgaaatgaaaaaagaagagctcgggtacaaaaaagaggtgctggttgttcgtcggttcggacagtattcggaagcttccgaatatttgtataaaatagctacggataagtttttgttgaagattctgggaaacgaaagttaccggatgttcgctatatcgccggacaacttctctatcctgaagcgattgaataatatcgatcagtatgtcgatttctttaccgagaattattttgaggatcgttaccaaggtgagaaaattgtagggaaatgggggactgctgcccatgtctttaacaatgaagaacaagagaatcatcattttgttttggctgttcctttccgggaagtcaatacgaaacgcattgtagaagctttgcaggaagtggatcctgcatttacattcgaaaaaggggattataaccgggatctggaattgatagtggtcaagcatatcggtaataagaaacaggcgttggactatatgtcggcagtcctgaaaaataagaaattgttcgatttgctggccggggtagattatgaagtattcctgatcactccccataatctcaaagctatgcaggaaaatgaatacctggaagaatacctgaaatttttcgatgatcattatctgaaaagtgcgggagctatcggggttgaagatggggattatatttacaataagagcgtagcacacaagttcgttttgttctatcccaatacgatcgatccctaccggctgaaaacaattttcgaagaattcaattttgcaggactgactttgaacaatttgaagttcgatgaagaacacgattgtatggtggtgtccggtttcaataacaaagaagaagcgatgcgttatttcacgacagtcatcggtaaccggaaattattcaaatcgctgagaaatgtcgattatacgaatttcattattactgaagtgaatttgcagacattgaccggcaaaaagaatatagaggtttatcttgaattttttaagaaatattatttgaactaatggatttagaagcctatgaaatggacaatcaatcatctcgaagatctgaataaagtggcggcagaatttttggattatgtcggagacaaaactatttttgctttgtacggaccgatgggagtagggaagactacttttgtaaaggccgtcgcagcctgtctgggggtaaccgacgatgtgagttccccgacttttgccctggtcaacgagtatcagacaaaaaatgggaaatccctatatcattttgatttttatcgcgtaaaccatatagctgaagcgcttgatttcggttatgaagagtattttttcagtggagaccgttgttttatcgaatggcctgaaaaaatagacgagctgcttccagaaggtatcgtcgattgttattttactgaaaatccggatggaagtcgtgaattgaaggtggaaatttaacttttaagactatggacaacacaggcagaatgtcgggaacgattaataagcaatggtttctttatcaggaaaaagaagtttttcaggataaaaggcagaagaaattgattctggggataccgaacgagctggagaaaggggagaaccggatttgtctcactcccgaatctgttcatatcctggtttctatgggacatgaagtgttgatccagcgtggggccggtaataatgcctattacggtgacacggaatatgccgatgccggtgctatgatcgtagagactttaggtgaagtgtatactgccgacgttgtgcttaaggcgacttctgtttctgccggggatacggtttatatgcacgaccggcaagtgattctttcccctctgaaactctgtgacatgcggaaggatgccattaccgaaatgatgcagaaaaaagtgacggcagtcggtttcgatattttgaaagacggagaggggtattatccggtggtccggattatgagtgagattgccggtaattcggccatcatgatagccagtgaatatcttaataattcgcggggaggtaaagggattgttttgggaggtatcagtgggattacgccggcggaaatcgttattctgggagcaggcaccttgggtgaattcgctgcccgtgcagccttaggcctgggagcgaccgtgaaaatcttcgatcattcggtcgagcgtctccggaagctgaacgaggttttgggacagcgggtatttacctctgtttttcataaaccggtattggataaagcgttggcttcggccgatgtgcttatcggagctatgcgttgtttcgataacggagagaataccgttgtttcggaagcccaggtgaggttgatgaaaagaggagcggtgatcgtggatatgtctatcgatcatggcggatgtatcgagacagcgggtccgacgactcacgaaaaaccggtgtatacttatgaaggagtaatccattactgtgttccgaacgtattgtcgcgggtagcccggactgcttcgatcgcttatagtaatgttttcttacctatgcttcagcatattgccaggcaaggaggatttaccaatgccatccggatggatgcagggttaagggaaggggtttatctttataacggaattttgactaagaatgtgattgcggataagttgggcttgatagccagagatataaatttattgatcgctgctttgtaaaatcggggcagatgtcggttagttggatgtggttatgaaattttttctgattatttgtggtgtgctcgtcggaatgatgggctgttcttcaaaatattatatgaggagaggggatcgtatggcggagaccggacgattttataaggccggatcgaaatacgaaaaggcttatcataaaacaaaatccaaagattttcaggcacttgcagcgataaaggctgggcaggtaaatcaaaatgtaaatcggctgaaagaagcttacaactggttgagaaaagccgaaagagccaatccgcaaatgcctgaaatctatctgaaagtggctcagcttgcggtgatgaacgacgataccgctacggcgagggaatattatcgtaaacaagaagcattgttcggtgatggaaaaggaaacgatggcctttattatctggaacaagtggataacgatctgagagaacaagggcgttaccggatagctttgaagcgggagtttaactccaggtacagcgatttcgctccggtgtatgtgccgggggatacgacccgggttttattggcttctacgcgcaaacccgatctgagaaaaaagagaataaagacagacccggttaccggcgaagggtatagccatatctacgggacgaggtatgtgcaggaaatcagatctacggataaacaaggtaaagtgaaggtaaagcgttttaaggaaccacgatggttgcaaccggaattgcagaaagattctatttattccaaccggagtgaaggagtcatgtgctttgctcccgatgggcgtacactttatttcacctcttcacgtatgatcaaagagagccaggtaggtacccgtatttataaagtaatccggcaagccgctaattccggggaggaaaccgaaaaaaaagaatggggtagcgtttctttagccggtatttgcggggattctgtttctatcggacatccggcattgactcctgacggattacggttgtattttgtcaccgatcagctgcccggagggttcggaggaaaagatatctggtatgtggacaggctggaggaaaaatgggggcaacctcagaatgcaggcgaattgatcaatacggccggggacgagatgtttccttatgtgagagagaatggagagttttattttgcttctaacgggcattatggttttgggggattggatttgtataaagtggggaatgtagctggaaaggaggttatcattcatttgcctgcacccttaaattcttttgcagatgatttcggtattgcctttaaaccgggaacggaggacggtttgcttacttcgggacgaagcggtcgaaacgatcatatttatcgttttagttttataccgcaacaattgaaaatcaatttattgacagtcaatacagtgaccgaacttccgatagccaaagtaaatgttacggttactgccgataatggagaagtctcttatttagagacggattcactgggaagggcagaaatggaagtcgtttctgattgtgagtatgtatttgtcaccgaccatccccgtttcctgaaagggaagggactggtatcgacttatcgggaaaaagccgaccggctttatgaattacagatcgggatgcagccgatagaaaaaccgatcgtcatacctaatatctattttgatgtggctaaatgggagttacgtccggaggcacgacagaatctggaagaattattgactattctggaggataatccgaatataacggtagagttgtccgctcatacggatatggtgggaaacgacgaagctaatcggattttatccgagcaccgggctcgggctgtggtcgattatttgatcgggaaaggggtgtattgggaccggcttgaagcgaaaggatacggggaaactcaaccccgccaaatcaatgaaaaggatgcccgtgaatatccgttctttaaagtcggggaggtattgaacgaaaggtttttcggccgtttgagaggagagcaacgggaaacggccttgcaattgaatcggagaatcgagtttaaagtattgcgtacgaattataagccgggaccgaactctttattcaatccgaaccagatggctgttgctgctgaagaaggaactaaaaaaatcggagagactcagttgagggaattaagggcggtaaaaggccgtttttttactttgcagttgggcgtatttaaaaatgtacctgctgtcctcaatcagtttcgggtagtgtttacagagaaattaagccatggggttgtgcgttattgtaccggtgtatacgatacccgtgaagaagcacaacaagctgctgcagctttaaaacaaaaagggatcgggtatctgattaaagaattcgaattcagccattgaactatttcaaaaaagtctttcgtaaccggtaatcgggctattgcggttgtgtactgttcttcggagggctcggattattgattgcatttatattggaatataagtattcccggaaaaaataaatcctttcctgtttaaaggagccacgtgaaagcgtggtttttttttatataggaataatatagtccaaagtagatagaataaaattttagctaaaatgaataaattgtataattcatttgcttttttatctaaaaatagttattacctttgtttcggtacaaagagttgtacccaagtttgtaataacatgatgtaaagtttaatctttttcaataggaagtcggcaaaacttttacgaaataagaaagatgaactgtatgtcgcgtagagatatgtgagcgatacgtttatcctcttatttctgggactgccgactccactattgagaggtagactatcggtcacttctatatcttggagtgtgggcatacaatgaaaaaggtgaaacatgaaaaaagtattaatctgtctaatctacttgcagagggattattgacagtggtgtgtgaaaagaatgatctggtgtggacagttcctttctcagtagagcttcatgcgcaaattgtaaaagaattattgtcgaaatttaagatttcggatagctgaaaaatcgataaaaaatgctgtttgtttgaggtttttagggggattttttgtatatttgtaacatgaaaaagatatcgaaaaacacagtttttatcactccggtacgtcctaccgaacgaaaatttatccttgattctatgatagcttctttccgtatagaagggatttttattccggaagcaaaagttcaggctatttatgcccgggtaaatgaaaaactcaaaaaatagtttctataattctttgcatcgggagataatttttttcgctgacccgctgtacggcaacgacgtagtccctgaaatgtattttatcgaaccttaatccttcatagccttgtttgcgtaccattagattcgccaggatacgggccgtccggccatttccttcccgaaaaggatggatgaaaagcaattctccgtggacgatggctacatctttggctaaagaagccttatcgggataagtatcgggtaattttttcagaatttcatcttcaaaaaattgcatgctctgtggtataaacagagcagaagggaagaggaatcctcctttcgacatattgaccgtccggtatcttcctgcaaaggtgtagagttctttcagagccagtttatgtatattgcggatatattgacagtcgaaacgagtggcggtagtcagtgtttcggtcagcatgatttcagctaacaggaatccttcgaattctgcttctgcaatctccccgggacgggttaaaccgagccggttaggcagacattggctttcttcttcatttgtcgtatacttgctcatgacaaaatagctgaatagactgctgtaaatataagtatttttcaggacttatttttcagatgcttatctttataaccgcttatactttatttccccgaattttgttttatcgaactgccgaataggagatcatagacaaaggagagaagcgggttattctaaaaatccgtttcaaagacccggtgttaagacacctcgtgtcggaaataaatctgtatctttgtacaaataaaacgatcgaacgatgaaatcagattatattccggccccgatagatgtcagcgatatacaactaccttcggaattatgcgaattggccgagatcattgcaaaaaatgtacatgaagtatgggctgcaggccgtttggccgaaggatggaaatatggttccgaaagaaatgatatgcttcgtacccatcccggtttggtgccttatgaggaattgtccgaaacggaaaaagattacgaccgccggacagccatggagactttaaaattgattcagaaaatcggcttcgggataaaaaaagtgaaaaactaaacgtttttcacttcgacaccgattcttttatattctttggttaggatatctgcaaattgttcgatatccagtttcttggcgatgatttttttttccttatccaggagatacatgaccggagtagaatcgatgtgatagtataccctgaaattagtttgattctgaggatcccaacagttgatgaaatcgaatagttcatgttcggtaacaaaattttcccatttttctttatcgttctgagtgtgtacggcaaatactttgaaaccataaggtttgaatttatccagtaatcctgttttgacctgaggtacctgttttttacaatgtccgcaatcggcttcccagaagagcaataacgtaaagggggcttcggtttcatatagactgacccaatcgccgtccatagtcggcagcttcaattcctgcgctttcaggccgatcagattatattgcgtaaggatcacttcccgttcgatattttcgagggtctttttgtctacccagtcggcctcgcctgtcaggtaatatttttttgccagatatacaaaggcggcgtccattcccatatacttgttcgatagggcataattgaaacaatagcttaccagatagcggaacatggctttacaacctctcgatttttcaatgatattcaccgattctttatagacactatccggaatcatcaatactctggtattgaagaattcgtcgagcttacttttgaaaataggagtgcggattaaagtactgtcctgaaaattagtattgtcccaataatgtgcctttgaaaagaggtattcttttttttgtatttcaaaatcccggttgggggtattttcaggtatttcttttgaaaaatcaggagtaggaacggagagtgtaaaattggcgaaggtagctaaagccgagttcggaaattgtttgcaaagtccggcgatatgatcacggacttccttatcgatctgatcgaatcgggcggaatatttcttttttgcttcggggcttgtttttgccggatctttttccatggcttctttgatctgccggcttttttgggttgccgaagtcattactttttgaaaacccagaaaagctgtattttcaggcgaaccttcaaaacggattttatctatgacctggagggtatcggttgtgatggaaaaattttggttatccccgatcataatatcgaaataattactgggggagaaaaggagaatatacattccccgtgccagttttttattgtttttctggaaatatcccgtaccgttgctattgatttgggccgtatctacagcgtaaacttttccctcgaaataattggcgaggataacttgtttattagacatttgtggaatattcacctggattttatatccctgtgcaaacgaaccgacggactgaaagcacagtccgcataccaaaagtaagaataaatttttcatattcatcgaattatacacacacctaaataccctttcgggctatacttagttcttgaaataatcggcgatcaccttgtcggctgcttcaaagcccaaccgggaagcgatctccaggtcttttaaagcttcctcggattggtagagtgccattttagcaatggcccggttataataggaacgggcactcgaaggatcgatatcgatcgcttcggtgtaatccctgaccgctgcttctagttggccttgtttctgcaatactactccccgattgaaatacagagcactggaattcaaaccgaattcttttgccttcgcaacttctaaatcgacattttttccgaggcgcagggcttcgttataatcttttaaagccccttcgagatcgttcatcctgaaccgggctattccccggtaatggtaagcctggataaaatcgggacgcaggctgatcgtctgggaatagtcctgaatggcattggcataaatacccagattttcataaagaataccccggttaaaataagcatctgcatgatccggataattggctatgacatagttgaaatctgctaaagcttctttgtaacggcgggtattggcatacgaaatagcccggttgtaataaaccggaaaccaggtattgtttatactcagagcgttgtcgaactcggtaatcgcttgctcatacaggttttgtttcatatattccagtccacgcttattagcctgtttcactttactgttacaggctgtcaggaaaattactactataagcaataattgatatctcattggaatatgattttctatacactattcgggcagatgcccaacgatttgacaaagttaacgaatcgtcctgaataattaaaacattgattctatttttctctctcttttccatataatttcgggattagatccgcccgatggattctacggagcagggtcatgatctgttcccggaattctcttttataccaaaagaaaaacatgttttgttgttttttttctttttctgattttgctgtgtcgattttttgcagcgaataggggtgataaccggaatagtaaatggtggtcgccacagtcatcggcgtgggggtaaagtcttgcacctgttcgagtttaaaatccagagcttttgtggctacagctaattccgccatatcttcggggcggcaacccggatgagaggagataaaataaggaatgatttgttcgttcaaacggtgttttcggttaatctcatcgaaaatcgatttcagttgctggaacaaaccgaaagcaggtttgcgcatcaaacctaacactgtaggagaacaatgttcgggagcaactttgaaacgtccggatacgtggtgacgaatgacagtctcaagatatcgtctattcgttttatcaacttctttatttcctgtatcacttaaacacaaatcataccggatcccggaaccgataaagcaatgtttgatgccgggaacctgacgggcctcttcgtaaattcgtaataagggtccgtggtctgtattcaggtttttacatacggtcggataggcgcaggaagcccgtttacacaaccggcaaatttcctcatttttacctttcatgtgatacatattggccgaggggcctcccaggtcggtaacggtacctttaaagtcgggcatggcggtgatttgttccaactcttgccgtatcgattcaggagagcgcgaaacaatgaattttccttgatgggcagagatggtgcaaaaagcacatcccccgaagcatccccggtgcaaagtcacggaatgccggatcatattataggccggaatttctttccctttgtaacgggggtgaggcagacgggtgaacggtaaagcatagacggcatcgagttcccgggtagtcggcggaggataaggaggattgacaatcacttgccggttatctacgggctgaatcagacgggccgcttcgatactgttcgattcttcttcgatataccggaaattttcggcatggtgttttttattactcagacaagattcgtgggagtgtagaatgatcgttcgccactttttattggtcgcgacagtttcatcaccggctctcaggacggcggtctgtggtatgttggtcagattgcggaagggaattcctttttgcatcaaccggcaaatatcggtcaacggtttttctcccataccgtagatcagcatatcggctccactatcgatcaggatagagggttgtaaggtatccttccagtaatcgtaatggctgagacggcgtaaagaagcttcgattcctccgataatcaccggggtatcgggatatagttttttcaggatacgggtataaacgatcgaaggcatatcgggacgtgcacctgcccgtccatccggggtataggcatcgtccgacctccggcgtctggcagcagtataatggttgaccatcgaatccatacttccggcactgacaccgaagaacagacggggagtacctagttttcggaaatcccttaaatcatcctgccagttgggttgaggcaccaaagcgactttcagtcccagagattccagtaatcttcctacgacagctcctccgaaagaaggatggtcgacataggcatctcctgagaacaggatgacatccggaacatcccagcctcgttcctttacttctctgacagaagttggaagccattgtaatgtttgcgtcgtattcattcatttgagatattgcgcaaagataactaatttttgtacctttgccctccccaaagttgaaaacctcggtgaccgaagagcgtctttgggtatttttagatgtttttgacgatatgaaaaaagtaaatattatcagtctggggtgttcgaagaatctggtcgataccgaaatgctgttgaaacaactggatcaggcaggctatgatactgaaaccgatgtagaaaattcggatgcagaggtggttattgtgaatacctgtggatttatcggggatgcgaaagaagaatcggtaaataccattttggaacaagtggaacggaagaaagaagggattgtagaacaagtatatgtgatcggttgtttatcacaacgttatggagcagaacttcaagaagaaattccagaggttgatgcttttttcggtaagttcgattggaaaggggtattggagcggatgggtgaacatttcgacgagcggatccgtaatcaacgggttttaactacaccggaccattatgcttatctgaaaatttcggaaggatgtaaccgcacttgctcttattgtgctataccgatcatgaccggaaaacacaagtccagggattttgaagaattgctggaagaatgccgggcattggtaaaggggggagtcaaggaaattttggtggtcgctcaggacttgacttattacggtatagatttgtatggaaaaaatcggttggcagaactgatcgggcggattgcagatatagagggcctggaatggattaagctgcattatgcttacccggccggatttccgttagaattgttaacggtgatgcgtgaacgtcctaatgtatgcaaatacctggatatcgccctgcaacattgtagtgatcatatgctgcaacagatgcgaagaggcatatctaagaaacaaaccatagaactgatacgtaaaatccggcaggaagtacccgggatatttatccgtacgactctaatgaccggacatcccggggagactgccgaagactttgaggaactttgtgaatttgtccgggaaatgaggttcgaacgcttgggagtattcccttattcacatgaagacgacacctggtgtgaccggcattatcaggatgatgttcccgaagaaatcaagagggaacgggccgggcgaatcatgcagatacaagccggtatagccgaagagatcgggcgttcacaaatcggacaggttgtgaaggtacttatcgaccggcaggaagaggagtattatgtcgggcgtaccgaacacgattctcctgaagtagaccccgaggttttgattcctggtgagagaactttgcaagtcggtgaattttaccggatggtgattaccggggcagacgaatacgatttatttgctgaaatcagggaagaagaatagtttgcactgtataattataataaaaaacggaaaacaatgaaagaaatgaaattaatgttgttggtgctgctggttgcggtaaccggatgtaaaagtagtgacaattcactgactttgttaagagccaaagaatggcaattgaagtcgatgactgaaaatggaaaggaagtaaagaatcctcagcaaattccgactctggtatttagcgatagtagtgcggtatatggttctgcaggatgtaatcgtttcttcggaacttatgaagttggggaaaaagggaaaatgacctttaagaccggaggggctaccatgatgttttgcccggatatgcctttcgaagatgcttatttaaaggcattgaacaaggtagagcagtatatggtaacggatcaggagttgcagcttaaaggaaaagatcaactgctcatcgtgtatgtacctgtcgataccacccaacgcatcggagtggccgaggacgatcacggatgtaatgcagctgcaggttatacctggtcggaagtaaaacagaattgtatccgtttgttcgaagacggcgtgcagttggtgtctgaaacggataaatccagttcttcggctgcttatgtcgtttttgctgccgattcgttaaaagcagaagtatatgttcccgggcatgataatcatccggtgctcgaccgccgtactcttcctgcaggaggatatgtctggaaccaggaagatgacgacacttacaatgtacgccggctcgacgggaaatgggtgatcgaacaacgggggaaggtactgtataaacaagctgacaaataatatcgataacttaaaagagtcctcattgccggggactctttttttgggaacttatgaagttatttaaatctaggtttatttcgttaataattcgtcttcggtgatcggaattgtcgaaccggtcgcttctgtcggtcgtctaactttttctatcactgaccggcggaactcctcacttcgcaaaaaactttacgttacgtttccgtcagacaccaccggtcgggtgttcagaaaaagcaagacgacactcgccagagttccaatggtctccaatcccgatcacctccgactaacgttatcactgaattgcagcccagtcttaatttaagaaagattattctcactggaaataatccggatggtccgtcttcctgctgctgcaaatttccggttgtattttctttgccggttagctctgatgtcagatgaaggggggataccggaagctcgtgggagtagtgagtaattacactgacgacggtattgacaggagcttattcatttactgcgattcggatcggtttttacaaagggaatcaaaacttattgaaaaaatggcttaaaaataaataacagataattt

SEQ ID NO: 5830 - DNA, 3268 bp, Unknown
  gut microbiota DNA sequence
tagtttgctaaattttgtggaaatgctatttttgtatcagtcatattttcaattataaaaaataagtcatatgagtaagaaagagaaaagtattgaactgttgaataaagcagtaaacgatgagttattggctgtacaccaaatatatgtattttcatttccggtgtgatgatatgggattcgatctggtttccaatttattcaaacggatcgctatccaggagatgatgcacgttgaacaattggccgaacgtattttattcctcaagggagaagtagaaatgaaagtggccggagaagtgagaaagctgaccgaggtaaaagatatgttggaacaggcggtgaagatggaaatgaatagtgtagacgattacaacaaatgggccaacgaatgtgccgccaatgcagattctgtatctaaaaaattattcgagacactgactgccgaagaagaagttcatcaggatcagtttgaaaccgagctggataatctggagaaattcggagatcattatttggccttacaatctatagaacgtagtaagagcgtagctaccggtactccggcagaataacgtccccagacgtttgataacgaacgataaataacaaatcgggattgtaagtatttgttatttatcgtttttttattcactataatctattttacttatgttaaatcaattattttggattgtaccgatttgttcggtaatcgccttgttatttgcctggtttttcttcaaagggatgatgaaggaatcggaaggcaatgagaccatgaaacggattgccggccatgtccgcaaaggggcgatggcttatctgagacagcagtataagattgttgggctcgtattcctggtcttgtgtctgttttttgcctggatggcttatggtccgggattgcagaacggttgggtatggtttgcctttttgaccggtggttttttttccggattggctggttttatcggaatgaaaacagccacttatgcttcggcccgaacggcgaatgcggccagccggagcatgaacgacggtttgaaagtggctttccgttcgggagctgtaatgggtttggtggtagtcggactggctttgctggatatttctttgtggtggctggtactggattgctttgtcgaagaagccagtgctacccacaaagcagtgatgattacgactaccatgctgactttcggtatgggggcttctacccaagccttatttgcccgtgtcgggggcggtatttttactaaagcggctgatgtcggagccgatctggtcgggaaagtagaagccggaattcccgaagacgatccccgtaatcctgcaactattgcagacaacgtcggagataatgtgggagatgtcgccggtatgggagccgatttgtatgagtcctattgtggttcggtgttggctactgctgcgctgggggctgctgcttttatcactgtgccggaattacaattcaatgcaatcctggctccgatgttgattgccgctttcggcgtgatcctttcgttgttgggtatatttatggtaaaaaccaaggaaggggcatctcagttgcaattgctgagggcattggaccggggaatcaataccagttccgtgctgattgtggctgccagttttctggtgattcatctgctgggcctgagttattggatttgcggctcggtgattacaggcttgctgaccggtatcgtaatcggaaaggcgacggaatattacacttcacatgcttacaaaccgactcaggatatagctaaaagttcggagacgggtcctgctaccgtgattatcaaagggatcggaaccggaatgatttcgacggcaatacccgtaattacgattgtggtcggtatcatattggcttatttatttgctgcacaattcgatatgaccgatatgtcgatgggattgtatggggtaggaattgctgctgtggggatgctttcgactttgggcatcactttagcgacggatgcttacggtcctatagccgataatgccggtggaaatgctgaaatgagcgaactgggagccgaagtccggcagcggacagatgcattggatgccttgggaaatacgaccgcagcgaccggaaaaggattcgctatcggttcggctgcgttgacgggtttggctttactggcttcgtatattgaagaaatcaaaatcggtttgatccgtttaggacatacgacactcgaggtcggggggaaagtggtcgatacagcttcggcaggtttgaaagatatgatgacttattacgatgtgaatctgatgaacccgaaagtgttggccggcgtatttatcggttcgatgatggcctttttattttgtgggttgacgatgaatgcggtggggcgcgcggcgcagaaaatggtcaacgaagtgagacgacaattccgcgaaattaaagggattatggaaggaaaagccgagcccgattatgcccgttgcgtagagatctctacccgtggagcacagcgtgaaatggtctttccgtctttgctggctattattattccgatcgttgtcggattgatattcggtgtggccggtgtaatgggacttttagccggaggattgggagccggattcgttttggcggttttcatggctaattccggaggagcttgggacaatgccaagaaatatgtcgaagaaggtcatctgggaggtaaaggttccgaatgtcataaggcaacggtaatcggggatacggttggagatccgttcaaagatacttccgggccgagcctgaatatcctgattaaacttatgagcatggttgccattgtaatggcaggtgtaacttgtatgttcagtctgttgtagatgcagaaagatacgatactttcaagcattgaaaattttctatatattatctgcttaatatttttatgggatagaaaactctttagaactactttgggtaaaatagggattattgctaatgtctgcttgaagaattaaaatgataagtcgagatagtcatcccttaaaaagtatatttcagcgaggccgttttctctctaagtgtctcgctgattttttctataaaccaacaagtctccctcatgtttttttgaagttatatactatgtctaacaagttttgacatgcaccccaaaagttttgtgtccaacttttagggtgcatgtcagatatgtctgacaggggtatttgtatgttggaatcaagggagctggtttattttggtacaaaggagaagattcgcttgtttttt

SEQ ID NO: 5831 - DNA, 270 bp, Unknown
  gut microbiota DNA sequence
gtccaacacggtcctctcgtactagtgtcagagccacgcaaatttcatgcgcccacgatagatagagaccgaactgtctcacgacgttctgaacccagctcgcgtgccactttaatgggcgaacagcccaacccttgggaccttctccagccccaggatgtgacgagccgacatcgaggtgccaaaccactccgtcgatatgagctcttgggagggatcagcctgttatccccggagtaccttttatcctttgagcgatgtcccttccat

SEQ ID NO: 5832 - DNA, 875 bp, Unknown
  gut microbiota DNA sequence
cctttatccatgcagtaggggttatccttatacttttcaagtatctgtttgggaatgctcaaaagcgggatgttacagaggttgtttgtcttttcacggggtttcactatccacaggttgccgttgctgtcctctgaaacgtgttcggggcgtaagttatacacgtctatgaatgccagcccggtatatacgcagaagataaaaacatcccgtaccagttccagccgttcaatcctgaactctttctgccatatccggtttatctcggcttggcttaggaactgtttgtttacctccacctcgtgaaacttgattccggcaaacgggttctttgtcagccactcgttggcaatggcaaggtttatcactttcttaaaacatttcatgtaccggataacggtattctgtgcgcaatgcttctccgtctttaggtataaatcgaatttgcgtaccagttccccgtttacctcacgcagtaacatatcatctaccttgtaatcccgtttaaccagttccatgaggtatttaaggcaattgtcgtaacgtcttacggtgatgtcggcatagtccgtcccgattagcttccggcagttgtcgttgtgttccttgaatacattatacaatgtcttgaaagtctcgtcctttccctgatagcggttcactatggcacgtgcggagataatctttccctccagttccaagtcttggtaaatctgatagaatttcacacgcaaggcgtcaatgtaatggtttagttccacggaattgcggtctttgcctgtcgatttctctttttcctgtgaccaaagtgggacttttacgctccgctttagttgaagttccacgtataggcggtcataagtgacacgcacacg

SEQ ID NO: 5833 - DNA, 5379 bp, Unknown
  gut microbiota DNA sequence
ttatggttggttatggctgcttacaagccattattttccgatgcaaaaattcttaaaaatattacccagaacctcatccgtagtaatctcgccggtaatttcaccaagataatgaagacactcacggatatcctgagagatgaattcgccactgagtccggattcaagaccttcgttcacacgctcgatggctgtgcgggcattacgaagggcttcgtagtgacggacgttactgacaatgacatcggaagtattgagggtatttagatttacagtccgggtcaattcctgaatcaagcgatccagatttgctccggtacgggctgaaatcggaataatctcttcaccggaggtaaaaagccggatggtttcctgaggcgtcaataaatcttccacctgatcggttttattaaggacgatgattaactttgcatccgaagtgaggcgggatttcacctgatgataatattcttcgaaagactctactccccgattcagatcggtcaataacaggacgacactagcctgaccgattttagcaaaagtcctttcgatcccgatattttcgacctcatccgaggtggcccgtataccggccgtatcgataaaacggaaagtgattccattcaaattgatcgtatcttcgatcacatcccgggttgtaccggcaatatccgacacaatagcccggtcctcacgcaacaaagcattcaacaaggtactctttcctacattcgtattgccgacaatagctacaggtaccccatttttaatcacatttcccaaagaaaaagatctacacaagcgggtcagtaattcatcgatatttccggcaatacgtctcaattccgaacgatcggcaaattcaacatcttcctctgaaaaatccagctccaactcaagcaaggaagtaatatgtaacaattcggcccgcaatttcatcaattcagctgaaaagccacctttcatttgcttcagagccatccgatgcgatgcagccgaagaagaggcgatcaagtctgcaaccgcttctgcctgcgacaaatccatttttccgttcaggaaagcccgttgcgtaaattcgccgggagtagccagccgggccccctgattcaccaacagctgcaataaacgctgttggatatacaaggagccatgacaagcgatttctacagactcctcccctgtgaatgaatgaggtgcatgaaaaatagtcaccaggacttcatccaacaaacaaccttcttcaaggatcctgccgaaatgcactgtattcgctttcgcgccggtcagttttttcccggatggagactcgaaaatccggtcggtaagagcgatacaacccgtcccggacattctcaaaactgcgatagctccgattccgggagccgtcgatacagcgcaaattacctcagaagtttccatgatagccagaatttatcgttttataaaatcaattttatcatttttttagaagcgtcattcccaatatggcataaaatatgcaaaacctttcctaacagctatttctgacaaaagtactcttttttactgacatgacagaaacgaagttttatacttttttaaatacaggttgaaaactattggagaaattaacacgtatatgagggaaattaataaacggtgatatatgataacaatctgaataaccggatataatataaaacaactaaataaaaacgacctattatgaaacgagtattatttttattgctggtatctgtatttatgctgcccgctttccatagcgaagcacaggtacaaggaacacaaactccgactcattatcaggagctaaccaaacaacaacaacgacaagtgaagcgggatcttcgcaagaaagcccgtgaggttgctaaccaacaagctttcaacgctgctgtagatgctttgaaagaccggaattgggtattaatggccagtacactttatggccccagaggttcagctatacctgtatccgacaataccaacttcatccaatttaaaggcaataccgtgtatgtacagttagctttcaacggcattgccggtccgaacggtcttggtggaatcaccgtacagggtactccttcacaaatcaccaccaatacggataaacatggaaatatcacttattccttctatgtgaacggaatcgctttaaccgcccaggttgtggtcaatctgagtgcaggcagtaactatgccaatgcaacggtttacccgatgatgaacggtaataacctgactttctccggaactcttgttcccacctcacaatccggaatcttcagaagtggattcatcagttattgaccggaagtttataaattacggctttacacttaaagccggtaaaataaaaggcgccttgcggggcgcctttttacgatcgttgttaatctaattattttgccttttccaattcgacagtaaagtggcgcatgatcggaaattctttcgtaattacataaccacgggtaatggattcgcggcgatcatatacatttttcagtgcagcagctattacatccatatgattattggtataagtacggcgcggaatagccagccttaataattccaggcggggataacggttttcgcgggttaccggatcccggtcggccaatatcgaaccgatctccacaccacggattccggcttcaagatacaactctactcccaacgtctgagcgataaattcttctttaggtacatgagtaagtactttcttggcatccacaaaaatcgcatgtccaccggcaggacgctgataaggtattccgtattcatccaatttcgcccccaaatattccacctgtttaatccgggtttcgaggtattcgaattcagtaccttcatccaatccctgtgccaaagcattcatatcccggcccgacattccgccataggtaataaacccctcgttcatgatacagaacatctggcattttttccacaactcttcgcttttgaatgctacaaatccacccatattcacaatcgcatcttttttcgaagacatggtcatgatatcggcataagagaacatttcttttacaatctctttgatggatttgttttcataccctttttcccttgttttaatgaaataagcattctctgcaaaacgggcagaatcgatctgcaggttcactccgtactttttacaaagggcagatacttcccgaatattctgcatagatacgggctgacctccggcggtattattcgtaacggtcaatacgactgcagggatcttttctttgggatattttttcaatacttcctccagcttggtaggatccatgttgcctttaaacggaatttccaactgcgtatcagctgcttcgtcgatagtacaatcgatagccaaagctttccggaattcaatatgtcctttcgtagtatcgaaatgggaattgcccggcaacacatctccttctttgataatggtagaatataaaacattctccgcagcacgtccctggtgagtcggtaagaaataatcgaatcccagaatttccttgatagcattcttcattttataataagaacgggctccggcatagctttcatctcccaacatcagctcagcccattgtttatcgctcatagccccggtacccgaatcggtcagcaaatcgatgaatacctggtcgcttttcaggttaaaaagattgtatttagcctctttaatccattgttcacgttcttcacgtgtacttttacggatggtttccaccatcttaatccgaaatgattctgaaaatggtaattccataacaatataaattaagttttaaacaaaaaataacaaaacaaaaccggaaagttatctataactctttacagacatcctcacctcaggaccttttaaacagaaaatatagaacaacaagaataaatgagtttcagaaattaaactcatcgcgctttttgatattcagaaaaagccggtttaaaggcaatatgtttccactgcgctgcatacgattgcaaaaatataaaataatttagaaatgacaagttttgaacaaaaaagatactacaactttcaccgaaccactaaaaaaattattgaccacactattcatataccgttccatataatcctcccgattgaccaaaggataatattaataagtcttaccgatattccaaaggatttgtatgatttgcaattctgccttcgttaattcctccattttattcattattcactcatttttagttatcccatccaagtatcgttacacaaacgcacaactataaaaataattatacaactacttcaatagttattttcaaaacagccgataagaaatttttaaaaacaagctatatcttttatatttgcaaaaaataaagacgatgaacatcaccacttactttttgattccccttgtcttatttgttattttactgtatcccttggtcaggaaggctgttgctttactagaaattctggtaaataaacaggtacagcaaactactcaggaaaagcaagcgaatacgtcgtctacttcacaaacgctatttaatctgaaattattagcttatgaaaggattattctatttattgaaagaataaagccggattcgtttatcccccgtaccctttctccctctcttccttatcaggaatatcaattattactgatcacgaaattcggaaagaatttgaatataatctttcccagcagctttatttaagcgaaaatgcctgggaggtcacggtcaatttcaaggataatatcattacgctgatcaatagtgcagccacctcctgtcctccccaagcaacagccagcgatctggcccgaaaaattttagagcattatatttcgtcggacctgaaaggagatcagattttaaaaatcgtcaaggcagaaatacaataaaagtgataaaactagaggctaaaggctagaggctagaagctaaagactagaggctatgacgcaaagttaaaattattttttcagcttttagcctatagcatttagcatttagctttattgctttcagcctttcctactttttccgtcttccctctttggttcggtctttacgtactttttggggcgttttactatttttggctgatttggcatggaaagctccaccacctttcggtttacctttttgatagacaatattcgaagtctgtactttttcgtcgtcaagtaagacatctgagatcaccagattttccggtaaggcagcccattcgacctgctgcccgatcagcttttcgatttcttcgaatttcggctcttctttttctgtcacgaagctgatagccgttccttcctttccggcacgggcagtacgtccgatgcggtggatatactcctcaggaatagaagg

SEQ ID NO: 5834 - DNA, 7837 bp, Unknown
  gut microbiota DNA sequence
tgtttattttaattttcaaccgactcacttaaatcctggcgaaccttattcatggggggctccattccattataacctcgagaaccggattattttgtggagtaatatctttaaacgtccttcttatcctgtcacacctctttctttcagtgaattacagacttatgtatcttcacattcccattatcggttttcaaccaaagcgttgggaaatacctacatgaccggttcagccaagttggttgccagtgattttgcagaagcggcattagacgaagccggatcatccggaatgccgacccccgaaataaactaccgggagaacttccaggagaccgcctttttctatccccaactacaaacagatccggaaggatatgtcgatatcagttttactatacctgacgcgacaacccaatggaaattcacagctctcgccacgacacccgccttactgttcgggcaattatccgaaacgatcgttacttccaaaccgctgatggtacgcccgaatctgccccgtttcctcagaaccggcgatcagacggaattgcaagtaactgtcagtaacctgtcggatactcttcagcaaggcaaagtaaactttgaatttttcgatccggcaaatcaaaaagttttcatgcagcaaaatcagactttccggacacacccccagggcagtcaaacgctaactttccagttcactgtaccggcagatatcgatttgctgggattcagagtatccgctcaaagcgggcacttcagtgatggcgagcaacatttgctccccgtattgccgacagaaactttaatcactcagaccttaccgatctacacgaatcagaccggcaagcatacctttacgctaaaacaacccaacaccacgatcactccttatcggctaactttcgaattaaccgagaatccgatctggtatgctgttttggctatcccctccatacaacaacctcagaacgaaaatatcaccgacttatcaggtgcctattatgtcaacagcataacccagcgtattatacatgccaatcctcatatcgccggagttatccgcagctggcatctatccgcagacgacccgactttattgtccaaactggaacagaaccaagagctgaaatccattttgctggaagcttcaccttgggtaatgcaagcacaatcggaaacagaatgtatacagagtttggttcaattattcgaccaaaacagattagattaccaacaaaaaagtatactccaaaagcttgcagcattacaaaatccgacaggaggctggagttggttcaaaggaatgtatccgagtcgttttatgactgccaatgttcttgcgattatggccagggctaatcttaccggccaacgggctttcaatgagcaagagaaagagatgcaaataaaagcacttcgttacctggataatgaaatccgaaaagattttgagacaactccccaacgaatcggatacgaacaaatcctttacctctatgtcaggagtctatatcgggatatccccttgggagatgctttgaaagcacacaaatattttatagcattagctcaaaagcaatggagcgatttcactctgtatgaaaaagctttaactgccgttacattaaaccgatacggttttaagcaagaagcacaaaacatactgaaatccctgcgccaatatgcagtcacgaataatgaacaagggatgtactggcctaataaccggagacaaatttacagaaattcagccattcagactcacgttgccttgatggaagctttttacgagttagaagggaatacgcccgagaccgaattgatgaaacaatggttactccggcaaaaacaaactcaaaattggggcaacgtcccttctaccgtcgatgcgatctatgccctgctgttaacgggaaaagatcgactgaatcaatccgaaaaagtaactgtcgaattggggaaacagatgttaccgatccccactaccgccaatccattaggttatttgaagcatacttatacatcatccgaaatccaacccgatatgctgaatgccgatatcaccaaaacgaccgattctcctagctggggcggtttatatttgcaatacttcgaaaaattcgatcaggtacaacaacagaaaggaatactcagtgtcactaaaaaactctttattgaaaaaatagggtcggatggcaagcaagaactccttcctctcggaaaggaaaaactgaaaacaggagataaagtgattacccgcctaacgctttctttaaaacaagacatggattttctttacctgaaagatttcagagctgcctgtttcgaacccatcgggcagttatcgggcaatcaatggaaattcggtaccgtatactatgaagaatctaaagatgccgttaccaatttctttttcaattctctggccaaaggtacctacgtattggaatacccggtatgggtaaatcaggcaggcacctatcaggacgggatcgcaactttccaaagcatgtacgccccggaatatacggcctatagtgaggcaggaaaaataaccgtaaccaagtaacaaaaaaagctgaggtttaccctcagctttttttactcttcaatcaccaaccggaaaccggagccgtgaacgttctctatctttatattctgatcgtctttaaaatatttcctcaatttagtcacataaacatccatacttctggctgtaaaataatcattggtcccccatatctcggtcaatgctttctcacggggtaacaagccatctttataattatacagcaattccagcagacgagcctctttcggggtcaatttgatttgttcctcattttttgtgatcgtccgcaattcggtattgaacacatattcaccgatagtgataaatttcggtttaggctcggcttcttcgtgtttactacggctaaggatcgctttaatcttcaaaatcagtacttcagaatcaaaaggctttacaatataatcatccgccccgatctcataaccttgtttcatatcttctttcatacttttagccgtgatataaacaaagggcacatttccatcgatctcacgaatttttttacctaaggtaaaaccgtccatttcaggcatcataacatccagtaaacagatgtcgaacttatctttccggaaagcctccaaaccatcgttaccattcacacataaagtaacttcataatcggataattccaaataagatttcaataccgaaccaaaacaggggtcatcttccactaacaatattttctgtgccatactttttgatttttgacttacgatttacaatttacgatttcaacttttaatgcaaggcttttcaaagctcttttcgtaaatcataaatctgaaatctaaattattttattcttttttaaattctatctctaccaaagttcctttatttttccttgaagtcaatttcacgcttccaccatgcaactctacgatagacttcacataactcagccccaatccgaatcctttcacgttatgtaaatttccactcgggacacgataaaaacgtttgaatactttcttctgggcttctttcgatatgccgataccatgatcttgcactccgatcagataagctccggtcttttcttgtgtatataccaatatctccggttttccacccgaatatttaatggcattatcgatcagattgcatacagcattcatcatatgaacttcatctaccgaacggatgaaatgatcggcttcaaacttacactccaaagttccgcccgcattttggacaatgagcataaaatgttcgactgcttctctgaccatttcattgatatctacctcagtcttatttatttgcaattctctccgatccaacttcgcttgttgcaagatccgctcgacgtacttattcatccggtcattttcactcttaatcatggtattgaatttcaggatctgttcccggtcgttcaataccttatccttcataatagcagaagtagccagagatatcgtcgctatcggagtcttgaattcgtgcgtcatattattgataaaatcgttcttgatgaccgataatttctgttgacgcataatgataacgatcgtaataataaatacgaacatcaacccgaaaatacagaatccggaagctaaaaacagccaccccatattttccagtaaaaccggctgcaccgactcaaagctcacccccagataatatccttttttgactaaatcctgttgaaacagttccacataataaaaattcttaggagccccaccttttaccctgttcagcagtccctgtttagtcataatctcataagtgaaaggcaaatgaatattataagtccggaaaccatacaataataaattatcgatatcaatatgagccagacgttgttcggcagatacattttcaggatctttttcatgaagcaaacgtatcagaaattcttgcatctgctgactgaactgtgccagtctggcagcccgcgccgtactatcccgctgaggtaactccatcgaccggatcgtttgctcgataaattcctgatctattttcttcccgattccggaacgggcatacgggacaaccgaaaacaaataggaacgctcacctttcaaccgattgatatcgttattcagaatattaaacaaattgttggaataccattcagaggaggttcccccttgctgggaagcgatcaggtcattgtagtttttaatctccccgatctgttcattcatttcctgtttgtatctcaggtaattgaattcatcgatccggttgaccacccggttcaatacatcgtatacctgcgaagtaaatttcgtttcccgttcccggatagcatattttatccacagccattgcacaacgactactgccgtaaatgcagccatcatcacaaccaaaagaattttaataattgtcttctttatcatactccaggaatatctccgtaaaaatagtatttattacaaaataatcaaaatctgtatgatatgaaaataaaaagggggtaccggacaggtacccctaaaaacaactaagtaataaaaacgggaaaacaaaaccatttacatggctttacttttattgcaatttttctgcagtagtcttataaatattactttccttattggcaatttccaattttttgaacagctctctctgtaaatcgagactatctttcagttcgtcttgtaataagaaaagagacaattccatcgtcgggttaacttcgatcaggttcttgacatatttagcacgagcgcggatataacgttgtctttgcaactgatgaactcccaacaatacttcttcttctttcgatcttttgggtttttccatgatctttttgattgctttgtcgatcggttcgatcggtccttcatatttctccttgaacatttttttcaacttcgcatattccatatccaggcccgaacctttcacttcaatttgatcggggaatttaatttttccctgaatccatatctgatctttactatcgagaataaattccaatgtattttttcctgccacatccacccatactctagctggtatttgcaatgcctctgtttcgagatcgatattaccgtcagtaacatcttgctgggctaagatcaccaatccttgttgtcccggcatctctgccaacaattttacagtaccctgtaaaccaataactttccctctgacttttaccttattagaattacatccggctaataaaagcgtaaaagcaattaaaaataaacaaatccttttcattttcttatctcactttgtaaattttatagcgcaattttctacaaagatataaaaaaaccaaatgaaccaagaaaacttaagaatttgtttcggttgcaaaagttaaaaagcgtgtacccttaaagctccaatgtttcaaataattgcaaaatctgtcccgaaggtctgggggcattcgaatttaaaattttcccatcgggtccgatcaggataaatctcggcacactgataatcatataatcttctgcaaatttatctgcggccccactaaaggtatgatttccagcatagggattctgatgcagaaaatttagccaggtattctgctcatcagcgtttcttcccaccgcgacagtcaaaaattgaatatttttaccggcatatttcttttgtaataaattcaaataaggcaattcgcttttacaaggtacacaccaagtcgcccataccatgatatacaaataggatccccggaaagcttctaaagtcactgttttcccctcggtatcccgaagggcaaaatcaggagcatcgtgtcccggtagaatcttttcccataattctaccataccgtcgatataagcgattttattcggatccgtacattcctgatgaaaaacggacaacaaataatcagctccctcaattccgttattttcacagatataattataaacgagctgagtcagtaagaaactcttaatcgtcggactatttacggtagccagtatataatcggcaatcccgtcggaataattctcccatccctgagcaccgcgacttccttgtatataaacataattcaacaagaaatcacggtaatcttttgctccgatcagcctttcattattaatcgagaaagaggataagaaatcggaaaaaacactccccggacgatagtcttcgtccggatacatattcctccggaaagagggatacaacgacgctcttacagcaatggaatatccgattcgttgtttttccaattctgtaaaagaatcgtcaaaatttttcgcttccagcaatttcaccttttcatcgataagtgccctcatcttctgcacgaactcttcttcgttcagcgcgtaatagtctttatcgaaaaagactgcaatctcctgttctttcaggtagctattgatcccacccaaactcccccgaaaatacaaagaccctgagaaattttttgcattcacatagatttccagatcctctcccggactcagataaagattcagggcattatgtaacatcgtggcatatccaccttttaccatatcgatcttacctgaaaaaaaaccttgctgatccaaggacaaagtataaatgctgtcgtctaccaaaatactgacaatagaatctccgttctcaatccgtccactgacttgtacaacgtcacttttcgaacatgaaaacaaagaaaccagcaccaatattaaaacaattatttctttcattatttttcagccaattatcagccataataagccatattactctgattagcaaatataaaacaacaatcgggaaaaatatgttaaagaaaggctaaaagaaaagattgttctgaataagaaaataaaaaaagctgcggaaataaaatccgcagctttatattgaactatggcattcaacttattttacaatagcttggaaatcagcattgtcaaacaatttagcgaattccatatcagtagcagctaatttcttcatagaagcatctttgctacaagcagttttcaagttagaaagcactgcactattatcgttgttacgggcagcgataacagctttcaggtaagaagccaaagcagaatcatctttaccttcattcagttttttagcagcttcgttattgttacctgccaggatattagctaaagcagcattgacacagttgcattttccgaaatagtctacagcagctttatagtcacctttcatgatagccacgatacctttgttgtagtttacttcgttgccagcaccggtagcagcaccgaacagtacttcagcttcttttacgttaccgttgat

SEQ ID NO: 5835 - DNA, 9399 bp, Unknown
  gut microbiota DNA sequence
ctgctttgtggctttgaaagtatacaaggaattggagcgtatgctgaaagtctcagagattaagatgagcgtagacaaggtgcttgcattggctaagacaatcacaaccatacaaatcaaactacctctgaacaaggaggtttatacgcaaaccatgctgatggcaaggcatcagaaaatagctaaactctttgacgaagaattttggggtacgcaatgacgaagtcaggaaaaacaccggatcatctctatcgaagtatggatagctgagctactttatcagaataatttcctgtaaggcattgattttgaaaccaattttactacaagagatcggaaaacctctgtttcgttgaaatttatggtttccaagtccggtggtgtctgacagaaacgtaacgtaaagttttttatacaactgccaaagttttttgtctaactcttagggttcgcttcagtatcgagacagcttgtttttatacctgtacgattttaccggactttacataccatacatacccctctacttctttaaatcccattttccgtaaggtattacaataaaaaccgacctgtttcaaatatttattttcctcactttgtccgaatttataatcgatgatacggactaccgaaccgttgaaaataattcggtccggacgggttttcctgcctccgggaaataaaatatccctctcattcataatattattttcgggtccgaaccattcagaagcttgtgggttggaaatatatgcttcgatcttcgcacagtaagcctccttttcccggatagaaatcaatccctccaaataggcttgttgaacagcctgtgacacatccccggcataccggatgtgtttaaaaatttcatgcaataattttccttcgtcgatcgccgaaagagaagcttgctgaggctcggtatagtcccggaatttgtacttgatactgattctttctcccggttgaaaaaccggataattctgaagagtaacagaagtctgacctgctccggcttttgaagggaaacactgtttttctcccaatgcgacctgcatagttgcattatccactaattcggtttcagctaatacactataaataaaagctccgatatccgacatcgagatgctaccgtctttattgattttgggagagtacggacgtacataaagctcggtcttggcacgcgtcagggcaacatataacaagttcaggttatcgatataggctttcaggtgttcgtccaggtaatcttttttaaagatggtgttcgttaacttggaggaatagttcaatggagcatagtctaattgattgaatcctcgttcgttattcatacaccaaattcgtctgacgggccggacactatccagttcccagctacagaacggcaaaagtacgaattcaaattccagtcccttggatttgtggatagttaaaatacgcactgcatcgacttcttcggaagtggtcagtactcttttaccctgctctttctcccaccaatccagaaataaagttatactattggagttattggtttcatattcatatataatatcttgaaacgcaatcaaataaggaatttcttcccgtttcttacgaagtgaaaatttatccagaatagtttcaatcgtctcatataaggaataagacatgattttatttttatccaattcaaaatcagttcctaagacctcgaataattctttttcccctattccggaaaagatatcgtgcaaatccggattgttctcatcctgaataaaaacccgataaaaataaagaatctgggtcttattgaccatatcgcagggatctaccatatatttcagaatggcgatgataaattgtatatagggagacgaccagacgtacaacgaatcatttgagataaaaccgatcggccggtcagctgtcttattgtattccatcagaaaatcggcaaccagcgcaccttccttcccacccctcaccaaaataacgatatcttttaactgtcctcccctttgccggatatcccgaatgattgcgatcaggtctgccaggattatattctcccccccttctgcctttttgtcggggccgaacacaatatcgacatatccttttttctttttccggggaatctgttgaagtccctgataagcttcagctatcgttttttcctttacttccccacctgcatcggcaatgtatagatcggtcagcataccgactgctttctcaaagaaggtattattgaaatttacgatttcaggggcactacgccagttattttttaaaatgacggtattcactcccaagctgctgaattgccgctctacctcgttggccagcagactccaatctccgtttcgccaacggtagatactttgcttgacatctcccacaatcatagtccggtacccttccgataaactgtttaccaccagggggcggaaatttttccattgcatccccgaagtatcctgaaattcgtcgatcatcagatgcttataataattcccacacttttcaaataaaaacgacgtatcgttatctgcaatcagcatattcagaatatgcgtcgtatcactcagcaacatgagccctttctcgtcacaataggccctaacctcctgataaaggtcatttaaaatccccaactggtacaaattatcggacagcatccgggctgacaaataatagctgtaatcctggtcgaaccgattcagaatatcctgcaggagttgcataagccgggggcatatagacccgatggttgctttgcggggagaagttttggttacccacgccgcactatcctgagctccctttcttacggtagccgtcggttcgtcgaaattcccggcaaccagtttataaaaataagatacacatcctgcctttccacctttaaagtcggtttgttcaagcccttcgctccggatcaatccgatcgcttcctgtccgatagcagcctgccggctttcgtaagcttgaacggtagcggtcaaaaaagagcggtaattcttcaaaaattccttatcactgaatttatccagaatatgcttgtcaaaaagcatgtagttctctttgaacagttcttcaccgagctcggctatttttgatttgatactccacgattttccctcttctacattactactcatcaattcactgatccaatttttcaatcccggattgtctttcacctgttgcatgactttgtcgacagctttgagcaatacaaaatcactatccaattctacattatagcccggaaagatgcccaattccctggtaaaagctttgataatgcgttgaaaaaaacgatcgatcgtcgtcactgccaatcgtccgtaatcatgcaataacattgtacgaagcaaaacagctctgtttttcaattgctcgtcggtaaatccgaattcctgcttcaaggcctctccgtaatcacttgttttcccgtctgccaaacgatgcagttcattgataatacgcgacttcatctcttcggtggccttattggtgaaggtcacggctaaaatattcttatattcagcaggagaagcaaaaatcgtcctgaaatattccagggtcagggcaaaagtctttcctgatccagccgaagctttataaatatctaacatatacttttctgtttttaaggctcggcaggcaaagtttgtcgatccagaatttccatctctgtaattctccggcaaatgatttcgagataatctttcaggtaattcacttcttccccttttagcttattctcttctgccagcttccggcattccgataaaatatctcttgcctgttcgaaatctccggcattttcatacaaccatcccaaattaatcccggcctggacagctgttttaggcgtcaattttaaggcaccggtccatatattgaatgcctcttcgctatcaccatgcctcaaaaaagtatcccccagccgcaacactttcccggaagtatacactcttcgctgtgttttttgccacgaaggaaccaaatgccggcctgaaatcattcctgcttcccaaaaactattgcggatacattccggtatgttatcgaactccccgagtttttcctgatccagtttaaaagagatcttcacagaatcgaccggttcgccttgttctttatcgtacaaccgggtaaaccaaatggtatttatctctcctccaggatctgcgttatcataatactgtagttctatggataagaggtagtccacgtgaaaattccggcacatattcattatactatccggagcgaaagggggcggagtagaggattggttccaatagcccatttcctgttcttttaaacatattatagcatctttgtaccccgaagtttcccagataaatttcaccccttcacagaaatcttcaaataaatactcccggtctaattcaggaatattcttcataaaagtcaatatactgttttcgttgcggatgtttctttctagcaaagccagtttttttccttgttcgatatgaaaaccggcaggttgaagtatctcgatcgataaggtgcgataggtggtacacgaacacagggtggccccccaaaggcccaaaatcaaccggcgaaaaattttagtaaaaaccattccatgcataatagcaaaagtattatcaaccctaatatttttatctcactgaggtctgaaaatcccgtttcacttttgtattcggatatatatctgtcatttgaattcaattcattcgtcaatcggaccatatcccgtacacttaccgactcccctccggtatgccgggctatttctttgagtaaggacagatcggccactaaacgattcaattccggattatggctcttcacataaaaaattccctttttggtgaatcgttctcctttcaaatctgtactcagacgaaaactgtactctccggcctgcaggttacccaaagtcattctatatttttccccgttccgattgaaaagatagttatacgttttcccgccaatatttaattccatctttagatcaggagtattaataagttcataactatcgttatacaactctacattaatcacaatctcttccgactcttcgtagagaggttcaatgtcatccaccaagcgttccgttccctgacgggtagtcagataacccacaattttattgatcagcgtgttgaacggttcgtgattaccattttcctgataggaatataatcgccatttccaaagaccttctccccaaaaataagaaattttttgtccattcaaatcataaaaaccaagaattccattcgaagtaggtgtatttttaattttctgactgaataaaattttcccagcaccggtgttgatctctccaaaaggtacgattataggagggtaatccttataagccgctttttccgtctccgagaattcgaaataggaaaattgttcattgatctgtaaagaggcatattcggtttgatcggcactaatatcggaagtgtataaattttggagtttggagaaaccagcgatacattcgggcgtagtcaatatataccaaaccgacaattttctgcggtttatttcctgcatcaattgctgatagcctgtactatgcggatcaggattatgcaagataaccagattagcattcagactatccagcggttcttcccagcgataaagtttacatcggtatataccggatacaccgactgcattcttaattgcagcaatatccggatgtggagcagtggtataaatagcaactttagcagaattatctataatattcatccaggtttctatccggttgttttcataagtacgttccaccctatcgttttccagttcgacactataccggaatattccttttttcggagcttctacttcgaaggagacttcctgaaaaaaataatcttgtccaatagttaaaatctgtcgggcaatgacctgatcattttgttttaaactgcattttacctggcttcctttctgttttatggcaccgacttcgacttttatcggaaaaatagtatttacaaaattgaatttatccgtttccacattccggatatagacatcgggataagcaacggtatcccccaaagcaacggtatagaccggaaaatcaggtgttttgtatttcggattcacaccggtattgtagatcccgtcggagaataaaatcatagccgccgggcggcggacgataaaatgctggtcggtatagtcgaatactgctgagatattcgtgtattgttccgagaaatcgtattcatcgttttgacggatcgaagctccgaaagttaaaggaacgatatcgaacttgcttttcaaagccttgctcatcttttctaaagatgccttgtattcattccgatagtacaaggaatccttcgtttttatcagagaagcagaattatcctgagccaagaccagcaaaggtttctctttcgtcttttcaacccacgaaaaagcaggatttaaaagtaaagcaagtaaagtaaaaatgacaataaaacgaagcccggaaataagcagggccattcctttagaaatatccggtaattttgaaagtttcctgaatttaagccaggcaataacaaacgataaacctgcaataggcaaaagccatgccatagaatactcaaataccaccccgaaccgctttagcataccccgaagcagcgttttttctgcttcggagcatcacctatattacatattcataccgccgcaaacatggatcacttgtccggtaacatatctggacatatccgaagccaggaaggtacatacatcggcaatatcctcaggcgtacctcctcttctcaaaggaattttagcggcccattctttacgcacatcttcgggcaactgtgccgtcatatctgtaatgataaatcccggagcaacggcattggcccggatatttctggatcccaattctttggccacactcttggtaaaaccgataataccggctttggaagcagaatagttcgcctgtccggcatttccgctcacgccgacaacagagctcatgctgataatcgaaccgcttttctgtttcagcatgatagccgatacggctttggtaaaattaaatacagatttcaggttgacattgataacggcatcccattgttcttccgtcattctcatcaacaaagtatctttagtaataccggcgttgttcactaaaatatcgatccggccgaattcttttgcaatctcttctacagtagcggcagtctgggcaaaatcagcagcattggaggcatacattttagctttcactccacaagcttcgatttctttttcagtagcctgtgcattctcgtcatatctcaaatccgtaaaagcaatatttgcaccttgtttggcaaatgccagagccaccgctttcccaatacctctggaagcaccggtaatcagtgctgtctttccttctaataacttcataataacagttttacttcaactataattaattagacttttaaccgtcgtaacgattaattaaattttaaaccacaaagataatgaaacaaatgaaatgccgaaaaaatagaccggattaaagctccagtttgaatcttaaacgcagacggttcgattcaaaatcccaggatataatcttaaactttccaatttcggcagtcgtaccgacatgttgtccgatacaagcacaagtgtcgtactctccgatctttacaatccgtaaagtagcactggcatcctcaggaagtttactcagatccaccccttcaggcacctcttcccgggtaacaaaacaagtagtgacaggtaaatcttgtccgatcacttcgttcactctgttttctatttctgtgatcatttccgcagttggctcgacggataaaatataatcgcattttgatttttttcgttcgatatgcgtatttttcgaacgttcacagccgaacatccggatcatagtctgattcagtatatgctctgccgtatgcataggaggatactcctgtttgttgtggccgttgagttgtatttcttgttccatatagttttttagtagagacaaatataggtgtttttatatttacgacataagaacaaaagaacatatttttcttaaataatagtctgcatttttaaagaaatcatttttttaacgatttttggatataaaacaccctccattcaaatattttatatagatttgtacgtgtttgtgtgtaactgaaatgttaaaacctaaaataatcattttatatgttgaagtcttacaattttcctagcgtatatgaagcgactaatcaggaacttgctaacgttgcagaaaatatactggatgggctaaagatcaatctcgatgacacggattacattgtcggtaacctggcactggtcgaaggctattctccacataagagtatcaatgcagccccgacagacgaagagtataaattattgagtgaagccagtttgttgcttacccaaccgaaaggagaagaggaaatctatctgacgacaggattcccattcgcaacttatatactctaccgggataaagcgatggaagtcttacaaggacgacatattatcaattacgatgcttccactttcggtggtccgaatacaaccaaacgtgaagtgaacgtaggtaaagtcgagattattcctgaaatcatgggatgtacgacagcaatccgcgaggggaacctgcaagaaaaagaaaacttttttatcgtcagcctcggatacggcacctgcgaagccgtcgtttcgacaagagccggactgatcaaccgttcagccgtcagtacccacggtatccgtcatgccgtaaatttattggccaatgagctcagtaaaaatttctatctgaacctcaaaacagaacaccagatagatgtagctttccaaaaaggaaatatcactgtaaaccgggttaaacacaacatattggatatacgtgaaaaagtattgaaaatgtactataatgaaatcgtcgctcctaacttaagaaaagcatttatagacgatgatttcaataaatgtacgaaaatgtatttagtcggtggtggtgctttgtatcctgaactggtcgattgcttcaaagaagaattcggcgatatcgtatcggtcaatgtatatcctgaaccggagaaatgtgcttctcaggggtattgtctgaactctaaaatcaaatcttccgtcgcccgttcgaatatcccgcataatattgaagcggaagaaattaagatattcagaaatcctcagctagctgtcggtatcgatataggcaatgcgaatacttgtgtcaccatctacaaagaaggggaataagccaaaattcaaattcgatataaagagttgaccttttaaaggcaaactttttttgtttgataattg

SEQ ID NO: 5836 - DNA, 237 bp, Unknown
  gut microbiota DNA sequence
cgtcagacaccaccggtcgggcgttcagaaaaagtaagacgacactcgccagagctccaatggtcgccaatcccgatcacctccgactaacgttatcactgaattgcagattagtcttgatttaagaaagcttattctcactggaaataatccggacggtccggcttcctgctactgcaaatttctggttgtattttctttgccggttagctctgccgtgagatgcagggttttatg

SEQ ID NO: 5837 - DNA, 7504 bp, Unknown
  gut microbiota DNA sequence
gttatctctaccgctcactacacaatacatgcctgaaccatctgtacaatgaacagagaaaacaagaaaagcttctgcacatgccgattgagaaggactcttccccaactctaacgaccgaattagaagataaagaacgagaatacaaccaactctaccaagcgctacataaactaccggaacaatgcaaacaggtgttcactctctgctgtctgcaaaatatgaaatatcaagaagctgctgactatctgggcatttctatcaataccgtacgcacccaaatgggaagggcatacaaaatcctacgcaattcattggacagcaagtcatttcttaacctgctattcctacgtttcttaaaatagatatttgctccattaccattttctcaaaaataaactacctttgcacaaataaatgacagaaatgaaactggttatattaacaggagcaggcatgagcgcagagagcggaatcaaaactttccgggacagcgacggtttatgggaaaattaccggatcgaagatgtttgtacccctgaagcattagaacgtaatccggaattagtaaaccatttttacaatgagcgccggaaacagctctacgaagcccaacccaatgccggtcataaaggcctggccgggttggaaaattatttcgatgtccggatcatcacccaaaatatcgacgatttgcacgaacgtgccggtagtaagcatgttctacacttgcatggagagctgaagaaagtgcgaagcagtaaaaatcccgattcgatttatgacctgaaaggctgggaactgaaaccagggacccgttgtgaagatggctcattgttacgtcctcatgtagttttcttcggagaagcagtacccaatatcgaaccggcaaccgatctggtccgtcaggcagatattttcgtcattatcggtacttcactggccgtttatccggcagccagtctgttgcactatgcccccgaaggtattccggtcttcgttatcgatcctaagattcctcaacaagcacaccggatgggctatcacctgattgaaaaaggagcttccgaaggagtacaagaattgaaaaatatcttactatccgaaactcgttaaagcatgaataaaataaaccattataaaagctgaatacaagtgggaagaggtaaaaaaccattgttagaaaaagtagaaatacaaaaaatcgcagcggaaggtaaatccattgcttatatcgacgaaaaagtgttatttgtcccgaatacgcttccgggagatattgttgatgttcaagtcacccgaaaacgtaaaaattttatggaaggcatagtcacccatacccatcggttctcggccttacgtatagccccggcttgtacccatttcggcatttgcggaggatgcaaatggcaaaatctcccttacgaaaaacaactggaattcaaacagcaggaaatcaacgacaatttgcaacgcatcggaaaaataaaactacaaaatgtttatccgatcatcggatctgcccgccaactctattaccgcaacaagctagagtttacattttcgaataagcgctttctcacccgggaagaaatcagcagggaagcggatatagagcgtactccggctttaggatttcatgtgccgggactgttcgacaaagtggtagatatcgatcattgctgcctgcaaggatcgtcttccaacgaaatccggaatttcatcaaaacttatgccctgaaaaaaggtctttcgttttacgatatccgggcccagcaaggtttcctgcgcaccctgatcatccgaactgcctcgacaggggaaatcatggttatcctcgccttcggacatgaagatactggagcacgcgaacaattattggaaacgcttgtccggcaattcccacaaatcacctccctgatgtacgtgatcaacgaaaaactgaacgataacctaaccgatcaggatatgttccgttttcatggccgggatcatatctttgaagaaatggaaggtctgaaattcaagatcggtccgaaatctttctatcagactaattccgaacaagcctataatctgtacagcaaaacacgcgaattggcaggtttaaccgggcaggaaactgtctacgatctctacacaggaacaggaacgatcgccaattttatcgcccgtcaggcccggaaagtgatcggtatagaatatgttcccgaagcaatcgaagatgctaaagtcaattcagcaatcaaccacatagataacactattttttatgccggagacatgaaagacgtgctgaatgcttcattcataagtaaacatggacaaccggatattatcatcaccgatcctccccgcgcaggcatgcatccggatgtagtccaaacgatccttcaagcctctcccgaacgtattgtctatgtcagctgtaactcagcaacccaggccagagacttgcaaatgatggattctgcctacgaggttatagctgttcaaccggtcgacatgtttccacacactcatcacgtcgaaaacatcgtcctgctcaggaaaagagagttctcccaaactgattcgtgtcagccctagagctttctaatcgacggaagcgttccttttttgattagcacacctatggttctgattgagatttttcatcggcaccgtaggtgcgcttatgaatatcaacaattcgtaagggacatcggaccaaaagcctgcatgcggataagggaagtatccaagtctccgtccggaaggcagttcccgtacaaacttgccgatataaaactaatatccgcttctttgacaaacgtataaaacggagggatgaaataaaaaaagccaggattggtcaggaccaggagcctgtacaatagccatggtcaatccgggagatggcaatttcaccggaactgttgtcaattcttccttaaaaacaaaaaaggtaaaagccccccgtacggtaacttctacctttttatatacaacaatacaatcaaacaattatttttccagatatgcccggatcatccaagccgttttttcctttttctcgatcatatcttccaggaaatttgtcgtaccggcatcatcggtatcctcttctttctcgagttgttcgatgtccttacggatttcacgaattaacgtatcattgtcctgactcaggatagccaacatctgtttagcttcaggcagaggttccgattcacaatgttctttaatgcggttgtgctccagataaccggccaacgaaccgatgggacgttcgtccaaagaacggatacgttctgcaatagcatcaatatcttcaatcaacccattatacaaatcttccatgaaaacatggtaagaatgaaaacttacccctttgacattccaatggtaattccacgtctttgccaataacacaaaatggtcggacagcaaattattcaatactgttttgctggctctcaccataccttcatttaaaccaatattagcagccataataaatattttaacaattagactttatttatgtatggctatataacgcaataaatcagtttttgttacgtaataaacgattgaaataaaagccaacgggactttctcccccaacccggcagttcaaaatttcagggctcagatctttttcagccaattggccaacaaattagtccactgattatggtattcgaaattattccgcattccccagccatgcccgcctttatcaaaaatatacaatacagcaggcactttattctttttcaaagcctgataaaatacgacactattcatcgaaggcaccactgtatcgtcatcgctatgaaataaaagtgcaggtggggtcttggcagtaacatgttgttcgttcgagtattgtgcaatagcttcggcagaaggattcttacccaacagagcttcacgagaaccgctatgtgtcaacccggcagtcatggagatcactggataaaaaagaatctgaaaatcaggccgggaactatattgctccaaacggtcggtagttccgctctttccactatcgaaatgcgtcgacacggtagaggccaaatgcccgcctgcagaaaatccggcaattccaactttcgccggatcgataccccattcctcactacggctccttacccacttcatcgcacgcaaagcatcggtcatcggtatacgatcatgttggttaggcatccgatatttcaatacgatacctgtaatcccctgcttcaccagccactgtgcaaattcttcaccttcatatcccatagccagataagtataaccacctcccggacaaatcaaaacagccttgcccgtatttttagcaggatcaggatgaaaaaccaacagttctgctgtactattgttcgaaattccgccctgatcatctaccgtacggtccactttaatgccattattctcttttactccctggggccataaaggaaatacttccggtgtctgagctccggcaagcatagcacatcccaaaacaaaactcagcaacaagaacttcaatcgtttcattttcacagctttaaacattcttattctacaatttataaggcgaataaatataaacattttttattttatccggttttatttcagaatcttctttaattttttttactttgtaaaaaaagaaatcatgtggcaaaacataatttttgtaggcctgggttctatcgtcggaggggtttcacgttattttatctctgagtggagccggcacctatttccctcaagcttcccttggggaacttttattgtaaatatcgccggttgtttcttactcggtttgttaagtggttttttcacttcccatcctgctccggtctatcgtctcttttttaccgtaggattctgtggtagttttactaccttttccaccttctcattcgaaaatctgcaattactaagcaataaggcatatggtttattttcattaaatatcggactgagcctcattttaggcatactttttgctggactgggatatttgatgaccaataagtgaaaaaagacagtaaaacatggatttcagtattatagacccacatacgaacgcagtttttcagcaaatactttcacgtatccgtcgtcttcaaagcggagggacgatcgatagcctgcaagacatcggcgctaataccgatcatcagatcggtgccagttacgtttccctgaaagaattgtcagcagcttatccgcccgatgaaaaattggcccttttgttatggaatcaaggacaaagagaagagcaaatcgtggcctgcctgcttttccctcaagatttaaataaagaaaaaattacgcaattagcacctcactgtctccattttgaaattgccggttatttaggttcgctttatttatataaacgcccggatttacttgaattagcggaagaatggctcaattcagaaaacccgttcatgcagctggcaatcatgacagcccttgccagatacctcattttaaataaagagagtgacaaaatatctaaagattactttcgtactgttgtcaaccggaattataaagacaagtatgttcagttagcagccgaacgctatcgttttaacatttaataaatgttaaagctggcatttaatgagtagtaagagatttttaataagaaaactttcttacttttgtgaagttattacggaaaaaaagtattaataaatcgtttaatataaatttactactatgtcaaaattagatttaagcaagtatggcattaccgatgtgaaagaaatccttcacaatccttcttacgaggaattattcaaagccgaaaccgatccctctttaaccgggtatgaaaaaggccaggtaaccgaattgggtgctgtaaacgtaatgacaggtatttataccggtcgttctcctaaagataaattctttgtaaaaaatgaagccagtgaaaaaactgtttggtggacttcagaagaatacaaaaacgacaacaaaccttgtagcgaagaagcttgggccgatctgaaagcaaaagctgttaaagaattatcaggtaaaaaattatacgttgtcgatactttctgcggagcaaacgcaggtactcgtttgaaagttcgtttcatcatggaagttgcgtggcaggctcatttcgtaaagaatatgtttatccgtcctaccgaggaagaattggccaactacggcgaaccggatttcgtttctttcaatgctgctaaagctaaagtagacaactacaaagaactgggtctgaattcagaaacagcaactgtattcaacctaagaaccaatgagcaggtgatactgaatacctggtacggcggagaaatgaaaaaaggtattttctctatcatgaattacctgaatccgttacgtggtatcgcttctatgcactgctcggcaaacaccgatctggaaggtaaaaacacagctattttcttcggtctgtccggaaccggtaaaaccactttatcgaccgacccgaaacgtttgttgatcggggatgacgaacacggttgggatgacgaaggtgtgttcaactacgaaggcggttgctatgcaaaagtaatcaatctggacaaagacagcgaaccggatatctacaacgccatcaaacgtgacgccctgttggagaacgtaactgtagatgcaaacggcaagatcgatttcaacgacaaatcggtaactgaaaacacccgtgtttcttatccgatctatcacatcaagaatatcgtcaaaccggtatctaaaggcccggcagccaaacaggttatcttcttgtcagccgacgcattcggagtattgcctccggtatccatcctgaacgcagaacagacaaaatattatttcctgtccggatttaccgcaaaattggcaggaacagagcgtggaattaccgagccgacaccgactttctctgcttgtttcggagctgctttcttatcactgcatcccaccaaatatgcagaagagctggtaaagaaaatggaaaaatcaggtgctaaagcttatttagtaaacaccggatggaacggtaccggcaaacgtatttctattaaagatacccgtggtatcatcgatgccatcctggacggttctatcgataaagctccgaccaaaacgatcccgttctttgatttcgttgttccgaccgctctgccgggcgtagatccgaaaatcctcgatccccgcgatacttatgctaacgcaagcgaatgggaaaccaaagcaaaagatctttcagaacggttcatcaaaaacttcaagaaatttgagggtaatgctgccggtaaagctctggttgctgcaggaccgaaactttaaattacaagactcccggaaacgggagttttttttatagcttcccaaaacctatcaaaaagcatgtaatttgaaataaaattgcatgctatttttgtgagacataattctgatctctgatttgatcgataacatctctgaaaataggaaaacagtattccggattgttttgcttcat

SEQ ID NO: 5838 - DNA, 39594 bp, Unknown
  gut microbiota DNA sequence
ctgttaccggaatatttgcttatcctaaaatgattttcttgatttcactcagtttgttcagggcttcgagcggagtcagaccgttgatatccaggcctgcgatttcgtcacgtatttgcgaaagaaccggatcgtccaactggaaaaagcttaattggaggccttcacgtgctgaagcgatactttcgacattcttttggatcgtgccatttttatcccggtcgttttccagttgtttcaggatttcatcggcccgtttgataacagattgagggagaccggccatttttccaacctggataccgaacgagtggttcgaacctcctttaaccagcttacgcaaaaaaataactttgtgtgcgacttcttttaccgatacattatagttttttatttttttaaaagaatgctccatttcgttcagttcgtgataatgggtggcaaagagcgttttggcatgatatttcggatgttcgtgcagatattcgacgatcgcccaggcaatcgaaatcccgtcgtaagtcgaagtacctcgtcctaattcgtcgaataacaccaggctccggtcggatatattgttgagaatattagcagcttcattcatttcgaccataaaagtggattcaccttgggaaatgttatcggaagctccaacccgggtaaaaattttgtcgacataaccgattttggcgctggctgccggtacgaaacagccggcttgggccataatcacgatcagggcagtttgccggaggagagccgatttaccggccatattcgggccggtaatgatgataatctgttgttttttattgtccagcagtacgtcgttactgatgtattcctcacccgggggcaattgtttttcgatgaccgggtgacgtcctgcttttatgtccagtacatccgaatcgttgatctccggccggtggtaattattggctatcgatatctcggcaaaagaaataagtacatccaatgctgagataatcttggcatcctcttgcagagggcggatgtaaccggcagcttcttgcagcaaattgttatacagttctgtttctatggctaaaatccggtcttctgctcccaggatcttgtcttcatattctttgagctcgggcgtaatgtaacgttccccgttgaccagagtttgtttgcggatccagttggccggtgctttgtctttatgggctttggttacttcgatatagtatccgaagacattattgaatccgattttcaaagaggggattccggttgcttctatctcccgttgttgcatttggagcaacagttctttgccgttgcttgagatattacgaagttcgtccagttcggcatttactcccgtagcgattactcctcctttgttgacctgatgaggagcgttttcctgaagttgaaatttgatcttttcgaataattccgtgcaaggattcaggggttctgtcatttttttcataacggccgattcactctgctggcaaagatctttcaacggcgcgatgcaggatagggcaattttcaactgattcatttcccggggagtgatccggcctacgccgatctttgaagcgagccgttccagatcgccgatgctttccagaaagttttctgcctgtaaccgtcggtcttcctgccggataaaatgatcgacgatatccagtcgctgattgatttcttcgggagatttcaaaggcatacaaatccatcttcttagcgtccgtcctcccataggcgtgattgtccggtcgataatatccaccagggaccgtccttcttcgtaagcagaatgtagtaattccagattacgaagagtgaacttatcgagcaggacacagtgcgattcgtcgatccgggaaatagaggtgatatgagaaatcatatcgtgtttggtcatctccaggtaattcaatatggcaccggcggaggaaataccgcagttcatatgttcgataccgaaacctttcagagaattgacttcgaaatgtttctccaggcgttcgctggctgcgtcccggtcgaaaaaccattcttcgatgggatagatatagaatttattaccgaaaagttcatgaaaacgggcttcctgcccccggggatagatgacttctttcggttgaaaactattcagtaatttatcgatcgtagcatgcgaaccttcggtagtcagaaattcacctgtggacaaatccaataaagataatccggcttcggttttgttgaaatagaccgaggccaggaagatgttacttttcgtgtcggtggaatattcgctgtaacaagctccgggagtgaccaattcgatcacccctctttttaccaggaattttgttttcttaggatcttccagctgttcacagatagctacccgctgtcctgcacggacaagtttcggtaaataagtgtcgatcgcgtgataaggaaaaccggctaattctactgtacctggagaaccactggaacgtttggttaaggtaatgcccaggattctggaagtagtgatagcatctgccccgaatgtttcataaaagtctcccatccggtacaatagaatggcatccggatatttagctttagtagcataatattgttgcattaacggggtttcgttaccttcttttttggccatatttatgttgttttttgattgctggatattttattttgttttgtatcaatagtgtaaacctttcattatctgcacaaaataatgacttaattctgactgctgacttgtacttataaacggcattcaaagataaatattttcggggagaaaagtttaaaagctcgtaaacattatgtaattttgtgtccatgaatatagaggaactgaccgaatattgccagagtttgaagtttgtgacgactgaaattttatggggtgatgtactggttttcaaagtgggtgggaagatgttttgttttgctccgatggatgaaggcgagttaaaaatgaacctgaaatgtgatccggaagaggctattgaattgcgggaacgatttcctgctgtgcttcctgggtatcatatgaacaaaagatattggaataccgtactaatagatggttcggtaagcgataatatgctcagaatctggataggaaattcatatcggttagtgttatcgaaactatccaaaagcgatcggaagcttttggaggtatgattgtcctcttttaataagataaataaacaacaagataatggatggtatatcagaaattttagcaacgtacaattgtgtcagcctggacgaaaaaattcagttcgaactggatggtgttgtagaaaaagagattaagcaggcttattgtattgaaaatctggaattttgtgtttcttgtatggattacacaaccttgaaagtttcagataccgaagaatcagtaaagaattttactgctgatttgctgaaaaaactgaagaagtttaatttgcgggatgtcgctgctgtgtgtgtattttctaattatgccggaattgttcgggagggattgaaaggaacggagattcagacggcagtagtggcgggaaattttcctaattcccagacatttaccgaaataaaattggctgaatgtaaaatggcgatcggtgcaggggcacaagaagtcgatgttgtcatctcggtcggggatattctggaaaaaaattatgaaaaagtatatcgcgaattgaaggctatccggaaagtttgtgaaaatgtccggttaaaggtcattttggaaaccggcgaactgaaagacttggaaagtattttcaatgcttcgttaatcgctgcgtatgcaggagctgattttatcaaaacctctaccggaaaagtccctgtgaatgcaacaccggagtcggtttatgtgatgtgtgaagcaatccggcaatattatgcccaaaccggaaaaaggatcgggttgaaagtagccggaggagtgtcgaaagctcagaatgccatccgatatctgactatcgtaaatcatgttctgggatgtgaatggctgactccttattatttccggatcggggcttctcaattaatggacgatattgtgaaggaaatcaaagctttgcagatgataaagtaagatactgtgtaaacaggaaaacaggactaagtaaatactcagtcctgtttttctttatcttcatgttctatttccagcttatcttcatcgatgtcttcttcttcattgtaaatctgaagaagtggctctgcccggaaagtacgtttactgatgctgtgctccatggtcaatagtaaagaaggaagcaggattaaattagccagcatggcggcgaacagcgtgatggaggttaacaatcctaaagcgaaagtcccgccgaaactagacaggcagaagataccgaatccgaataataagatgatagatgtataaatcatactttgaccggtctcttttaacgccaggactactgaagaacggatactccaattggtagcctgtagttcctgacggtatttagccagatagtgaatggtattgtcgacagaaattccgaaagcgacactgaatacgagaatggtggatgcctttataggaataccgaaatatcccattacggcagccgtgatgatctgaggaatgacattgggtactaaagcaatcagtaccattcttttacttttaaacatccaggccatgaatcctgcaatcaggacgatggctaaagccaatgaagaaaacaggtttttgatcaggtattggttacccttgaaaaaaataacactcgagccggtaaccgatatatcatgtttatctctcgggaatatcgtttctatctttttatacagagaatcttctttagcttccatttttttggttccgatatctttcacccggaaattcattcttactttttgcatggttgaatcgacaaaggaattggccatagcattcatacctcctgtcgattccatgacgtatttcataatgaaatttttggtcatgttactggggagtttgtaataagaagcttttccgttataataagcctggttggcaaatttggccgcttcgactaccgataacgcccgtgaaagatccggatcttgtgatagttcggtatttaaccggtccaatttctctagattgcttaatttgaatacctggttcggttttccgaaatccagggttacctctaagggcatcaatccgtcgaagttcgactcgaagaaagacagatcttggcggatgggatcggtttctttcaaatcgtccaccatataaccggtggttttcatcaaagtgattccgaatattcccgcaataacgagcacaattgttatataataaacggtatgccggcgattgatcaccaagtagatcagtttatcgatcactttgttgataaaaggattataaagatgtttggtttgtttggtatcggggacgggtaaataactgaaaacactgggtatcagaatcagacagataaaaaatacggtagagatactgataaaagcgatgagaccgaagtctacaagaatttggctcgaagtgatgatgaaagtagcaaatcccgcagctgtcgtcaggttggaaagtaaggatgcatttccgactttttggatcattcgctgcaaagctttgattttgttgccgtgcctcacatattcggcatgatatttattgaccatgtagacacagttgggaataccgattacaatgagcaaaggtggtaacatggcagtcaataaggtaatcttaatgcccatcatagccataaaaccgatggcccagattacgttgatcccgatgatcccgacacagaagcctacaatccggaaagacctgaaaaacagatagagaataatagctgtgatcaaaagcgatagggcaatgaacatatacatttcgcctttgatattttcggcattgattacccggatataaggcatcccggaataatgcattttcaggtgatatttttcagtaaaacgtttggtgatttccagtacatcctgtactagttttacccgtgccggagaattcattacctcggcggatacggtgatcatcatattgtaggtatgcttgtcgcggttgataagcataccgtcataaaaagggagatgttcggccacataagccagactgtcgagctctgcctgtgtttcgatgtgagaaggaaaaataggaagaacttcgaattttttgagatcggtatttttctgtaaattaaatgtatgtgtgatagacatcaaggcattgactccctgaagggctttgatatcattgcccatctgaatccagtcgttggtcttgttcagttgatagaaaccggaatcctgaatggcaaaaaccataacattcccctcttgcccgaaagtttctctgaaacgggtatagtcgagataggcactgtctgttttggggagcaaatctgcactttcataggacatttgaatttttctggcttgaaatcccatgaaaatggttccgagtaatactccggctataaaagcaatccgatttcgaagaataatccctgcaatcttagtccacatagtgaaatttaaatgaaatcttcaataggtatatatttattacgaatgccgaaaagtcaattcttaccacaatactgagattccgccataaatcattaacggacaaatttaacaagaatatgtgaaagcttattgtattttcggattgtttttatgcctttttagatctcttgccgttttttttgcaaaattaatttccatcgcttcggtgagatctactccggtttgatttgctaaacaggtcaatacccataatatatctgccatttcatccgccaggttatctttttccccttctttgaaagattgttctccatattttcgggccatgacacgggctaattctccgacttcctccgttaggatagtcatattggtcaattcgttaaaataacgaaccccataagatttaatccattcgtccactttttcctgtaactcttttaactccataaagcactcggtttatagtctgtttttggaatcgattataatcgttaccgggccatcgttaattagtccgacttgcatgtcggctccgaatacgccggttttgatttccttttgtaactctttctgaagcaattgaacgaatttctcatacaaaggaacggagatttccggtttagctgcgtcgatgtacgagggacggttaccttttttggtacgagccattagagtgaactgactgactgctaaaatttcccctgctgtctccagaatagaacgattcattattccgttttcatcgtcaaaaatccgtaagttacagattttactgcttagccattcaatatcttcttcatgatcgtccgcttgaatccccacgagaatcattattccccgtccgatagaagcatgtagctgttgctgaatagtgacactggcttgaataacccgttgtataactactttcatacctgttttatttgtggaacaaaggtataataactatttggaaattggaaaacgtggaaattagaaattaatttcttacttttgcgcttgaaaattggctgagtagttcaatggatagaacggaagtttcctaaactttagattcgggttcgattcccggctcggctacaaaacagaaagaatcggaagaacccggttctttttgttttgttggaattttgaattctatgaaaattcatttgcgattacagagcacaactgctgcatcctccgtaatcttttccgggatggccgtgatattccggatgtctttgcagccaaacgacagcataggagcaagtggcgataggctggaggtgatgtttcagggcgtaatcataagttgcttttactagttgagctgcgatcccccggcctccgatttcgggggggacgatagtatgacggatatccagtttgccgtcccggatgatataagtgacataggccgtgtagccgtccacgactgtcttaaacagattgtcttcaggaagatgtgtgatttccatagtttgtttgtttctacgaagatataaaatattttttaattgtgggatattcggtatatttgtcagagtgatttaataaaacagataatcgataatatagaaactatggagaattttatttttcaaaatccgaccaaactaatttttggtaaagggatgatcggacagttagcgaaagaaatacctgccggaaagcgtatactggtgactttcggaggaggaagtgttcgtaaaaacggagtttatgatcaggtaaaagaagctttaaaaggatttgaggtgacggaattttgggggatcgaggctaacccgaagatcgagacgctgcgtaaggctatcgaattgggaaaagagaaaaaggtggattatttattggctgtcggcggtggttcggtgatcgacggtacgaagctgatatctgccggtattttgtatgaaggcgatgcctgggatttggtgttgaaaggttgtgagaagcacactttacctttaggaacagtcctgaccttgccggctacgggttcggaaatgaatagcggagctgtgatctcccggaaagaaacagccgaaaaatatcctttctattctaattatccggttttttctattcttgatccgacggttacttatactttgcctccttatcaggtcgcttgtggaatcgccgatacttttgtgcacgtcatggagcaatatatgaccactccgggacaatcccgcctcatggacagatgggcagaaggaattgtccatactttaatagagatcgctcccgaggttcttcgtaaacaggataattatgagctgatgtccgagtttatgctttgtgctacaatgggactcaatggctttgttgctatgggagtacggcaggattgggccacccatatgatcggtcatgaactgacggctttacatggtttgactcatggagcaacattggctatcgtcctaccgggattatggcgtacattgaaacagaaaaaaatggctaaactcgtgcaatatggcgaacggatctggcatatcgatcaaggaaccgatgaagaaagagctgataaggcgattcaaaaaacagaagaatttttcaaaagtctcggattacctactcgcttaggggatgccggaatcggggaagagacaattctcgagattcagaagcgttttacacaacgtcaggtcgcttttggagaagatcaggatgtaacggctgaggttgccggccaaatactcgaaaattgtaaataatccgtctgtaatcgcatgaataaaaaggtgtccggtttaccgggcacttttttgtaaaaattattttttaatggaggtattaccctgttgttataaaaattccgggctttccgatgaatttccggcttcttttgttaatttagcagctttctaaattgaaaggagatgatgtatacaattgaacaacttcgggaagttattaaggctgaattagataagcaagaatatgtagaagaaccttattctttgttcgaaccgatcaaatatattatggaagatgggggaaagcgacttcggcctgtactgactctgatggcgtataacctgtaccgggacgatatcgggaaggctttaaaatctgctatcgggattgagattttccataattacaccttgttgcatgacgatgttatggacgatgccgaattacgtcggggacgtcagactgtccataaaaaatggaatagtaatgtggctattttgagtggtgatgctgcggctatcacggcttataagtatatcgagacttgtgaggatccttatttacgccgggtaatcgatggttttaaccaggtggcgatggatgtttgcaaaggacagcaatatgacatggaattcgaaacccgggacgatgtaacggaagaagaatatatccagatgatctacctgaagacttctgtattgattgccggaagtatgcgtcacggtgctttgattgccggcgctcctgaacatgaatacaaagagctctatgatttcggtggatacctggggttggtatttcagctgcaagacgattatctcgatgtctacggagacgtggaagagttcgggaagaaaatcggtggggatatcctctgtaacaaaaagacttatctgctgatcaaagcttttgagttggcttctgaagaagataaggctttattgaaagagtgggtcgtgaaagaaaaattcaatcctcaggaaaagatcaaggaagtgacagaaatatacaatcgttcgggagtaaaagaggcactgagggctaaagtggacgattatcttgaaaaaagccggattgctttggataaaatagaagttcctgaagaaaggaaagtccggttttatgagatgattgattttatcggaaaacgtaagaagtaatatatgtacaacaataaattgaaagcaattgtcttgccggtggttattgccttggctattgttttagggatggggatcaattcgctgttggatcataaagaagtgcctgtaaatatggggcagcggatgataggtagtaaattggattatattctgaatatgatcaattattcctatgtggattcggtggatatacataaaatcgaggaagatgctatccctcagatattgaatgatctcgatccgcatacggtttatattccggctaaagatatgcagcgggtgaacgaagagatggtgggaaatttcggtggagtcggggtccagttttataaatatctggatacggtgactgtcgtcaaagtagttcccggtggaccttcggaagctgccgggttgcaggatggtgaccggattgtgaaagtcaacgattctatcgtcgctggccggaatatgaatacggataaaatcatgtctctgatgcggggagaaatcggtaccgacgtacagcttacgattgtccgccgtggagaaaaacagccgttgatcaaaaatatcacccggggaagtattcctatcaaaagtgtggatgtggcttatatgttcgacgatacgaccgggtttatcaaggtgaaaaccttcgggatgaatacttatgatgaatttatggcttctctggctaagcttgaaggattgggaatgaagcggttgattgtcgatctgcgcgagaatgaaggagggattcttccgattgcaatccgtatgatcaatgaatttttgcctgaaggaaaattgattttatatacgcagggaaaagcttctccccggatggattataattccaatggcaaggggaaatatcaacaattgcccctgacggtcctgatcgacgaggtgagtgcttcggccagcgagatttttgccggagcgatacaggacaatgaccggggaaatatcgtcggacgccgttctttcggtaaagggttggtgcaggaacaaaggctgctgccggataattcggctttacgattgacggtggcccgttattatgtgccttccggccgttctattcaaaaaccttatgacgaaggaaaagaaaaatattatacagatatttatcaacgcctgttgcatggggaattttctcagaaagatagtatacattttgatgaaaaacttaaattccagacggttggcggacgtacggtatacggtggcggcggaatcatgcccgatttgttcgtacccggagatacggtcggtttctcccgttatttggtggaggtaaaccggaaaaatcagtatttgtatgatttcacttttgattttatggaccggcatcgtcaggaaactaaaaatattaaggattataaacaactactgaagtatttggatcgcttcgatctggtgaatgaaatggcggattatgcagcggccagaggactgaaacgggatgaaaaagggatccgggattcttatgatgttcttgattctttaatcaaagcctttatcggacggcatgtattggacgacgatggtttctatccgatcttttatcagaatgatgtaactataaagaaagcgattgaagcacaaggtacaggggtacaagctgattagtaaatggctggaaaaaaaaggtcttcccggcgttggacaaggcttattggtggcttgttaggtttgggaattgtctgggggttttatgtctcccggacttcggataaagaaattggagcagcctctttgcatgaagcaaagaggttgtttgaatatacggaattgcttccttcgggtgagggagaaattgttcgtcatacttattatacgcttagtttcaatagtcggcataaacaagccaattgggtgtattataccttggaattggaaggaaaagaaagggtggccgagcgtacagaccggtttagggaagataaaaaagtaccttccggatctgcgaagccttccgattacatcaaaagtggatacgatcgcggacatttatgccccgctgccgatatggctcattctgctgaggcgatggaggaaacctttttgatgtcgaatatttctcctcaattgccggtttttaaccggggaatatggaaaagcctggaaaagctagttcgggattggggagagaaagaacggatttatattgtcaccggtcctgtttttaaagacaataaaggaaaaatcggtcggactggagttaccgttcccggttttttctacaaagtagtttatgctcccggggcccggcaaatgattgcttttgttcttcccaatacccaagaaaaaaggcaattgcgggattatgcagtgactgtggattccgtagaacggctcacaaacatcgattttttcccacaattatccgatacacttgaaaatcgccttgaagcggcggtcaattatgacagttggagataaggttaatccagcaatcggtcgatgacctcgcacattttcccgaattcttccggatcgtagagacgggtcatgaagactatcttgccttgtttatcgataatgatatttcgggtgactccggctccctgggcagcaaaggagtaaaaggctttaccttcggggtctaaggtcaatggataagtgatttttaaatccttgccaaactgtattgtctgttcccggttttctttcagatcgataccgatcagggcaaaatgaggattatttttgtgtttcagccaaatgtctttttcgatgaaaggcatttctttacggcatactccgcaccaactggctgtaaattgtaacatgacgattttaccgcggaaatcggatagctttttccgggttccgtccgtataagtgatagtaatgtcgggtgctttatcacccacttttacgatataaccccgatcgtcattttgggtataaccgaaatgacttaacgtcaggcaaacaaatagcatgaaaaaatatttcataaaatgaattttaaaggtatgattaccagacaaagctataaataaaacaggacttttagcggtttactgttattttttcggtatttttcatactcaattcttcaatttataaaaataaagacaagggttatcttcttccttgatatttaattcccattcttgagtcagctcaggtatttttccttcttgttcccgataggaaacaagaaatgatgcttctataaaatttaccatatactcatcagtcatgtaaataggagaacttccatgaataaattttccttgtctactgaaaatgaatataaaatcctgttcgtcatccaacagatacagtttatcatccgcaatttccagtttgtcaatttgggaaatcaggcattccggagttgtttccaggggcactatttctttcccacaaaacagcgaatcggcaaataagggtttatccccggatgtcagaggaatattgatttgaaatatatcggaatccttttcattctgtctatcttcattacaaccgaaaacgataataccggctaaaaacaaaattcctatcctaatgcaatattttatattagacataatcatagcattttgaccataattgaagtcgggaatctcccgacttcacaaattattatttcatatctaaccaaaattttgcacaagtgtgaggtttacataaaaaagtgccattcaattcacaatctcttctgactccataaaatgtttttttatatactccctttgcattgagacctacaaattttctaatccccaaaatagtcacataaccatctgcatctatagatgcgctgaaactacaatcaccatcatgcactttataacctttactactagaatctccatctccttcgataatttcaccatctggagcttctcacaaaaaacttcctggcaaattcatacatgtatagccttctggacaaggatcttccaaacattcattaatgtcattaccaaattcatcataaccggggtttacagaacttgtcgtcataatactgattgcgagcaaagcaattgtccatagaatcatttttcgcaaatttgttttcataatcattaattttgctaggttaaacaaatagtgtatttatagggattgccaaaacatgttccggcaatccctttttctgttttttacttgatgaaaggtttccctaacatttggtcaataacaggggtgaagacactgaaatttccgtgcccggactcataggttattttcatgaaatttccttgtccgtcgtttatttccgtcacatttccatttccgtcgaatttgtaggtatattgtgtttccccgtcagtgacggtggcaggaaccgttccgttgtatgtgaattcaagggttctgccgttgcttttgacggattgcaacagattaccggaataggtgaaggaataacggtcctgttcaatccagttctctccggcaggggctgtcatataaaggatggaagtgattctgtcgccttcatacaatgtttcgtatttatgcaaggtgcgttcgtaagtttcctgatggatgtcttccgggtcgtaaacatcatgataaatccggttgatgcagatattgctgttttcattgtattcataagtattgattgtcctgtaagttttcagataggagttgtcaaagtcctcgcctgtacccacatcttccctcggggtgtaatgcacgacgctttgccgtttgatccgtccgtcctcatacagatcgaccttctggctatacaaaaccctcccaacgagcgggatgctgtctttcagactgtaattccctgccccgtacttatttttcagaaattggtccaaacgactgatggaatcgctgtcaatcttgggaatccaatcattgacttcgatttcataattgatatccgagttgttggatatcccgaagttgccaatggtgtccccctctgtatcaatgtggaaagcactctctatctgctccttgttgtaatttataatccaaatgtaatcaccccaatggtcattgtgtccttctatcctggttacccggaacagattcttcttgacagtatgttccgactcttttgctatgttcatatcggcttctttagtacatgccgtcactaacgacaatacgagaattgataaatatagtgtatgtctcatgattctgtgtttttagaacgctttctgtatattggtggctgtaatgcggccgaatcctccgaactcgccgtgcagttcccggttcttctccaaagtgcccgtacccagggtggcgatggcgacagtcctgacgaacccttcccggcttgagggattgtaggtcgacaatacaatcatacggttgttgttgcttacctctatcaccttatcgtcggcatccgcgttcggattgggattggtgtagtccacttttccctgatattctttccatgccatcatggaagtgatttcctctccttcgggcgccgtatattctagggtcacaagaggattggcgatagccaggttgatggaatagattttggtggaagtggcataataaatgacgttctgggtttccgtcccctcaaaaaagcgtgcgtcctgaatctcgggaaaactgttcaggtcgataattttcaatggtttcccattatcagtctcagggtcataagtccgtaaagttatatacgaatagattttcccgttggtcttggccttccctgttttcgggtctttttctttcaggatgatgtgcatctggctgtcgtcaccggaaaacatggccaggcaggtaaagccctgcagtttgttttgatcgaaaggggcgtcggcgggaagcttggcactgttgaacactttcaactggtcgtcgctgtcaaattccaacaagcgtccgtttttctcgtcaaacccgattccattttcccaggccggacggtagaaaatgcccatgtaatagtcggacatatcgctggtctgaagataataggaatacaccttgttgtcttgttgcatgctcctcggatagattttgccggtaatggcaagaagttctgcccctatttgcggatcatagccaatggtagtcacattgtactggccgggatcgatgacaaacatgtcgccgttgccgtcgatataggaataattgaaagggtccacccggtccaaagtgtggtcggtcccgatggtcagcgaacggttgacctgataagtggtagaacggacggctgtcgcaactccattgattttccgaccattgacactcgaaaacagattccgcatcaccgtatcctgttctttgcgatagctatcggtgaaattgtatgccatgatcagcgacacatcggaagtcatctcgtcttttgtgtcacacacgatcagaccgctcccgaacggactcatcaccgtcacatcgaacacttgttcctggatgatgtccgtggtattgtccctcacttcatacaccagtttgtaggcattgttttgcgcactgacatcgaccatgtatttcagggtcatggtggaatcgatgactttaggaataatggtattgccttccagggtccatttgaacgagagatctgcgtccggcacgccttctttgtaagtaatcggctttatctccaaggtgtcgaatgcgaaaactttataggtggtcggttcatcacccagatcgatgacaatcgggttcatcagtttatagttcaaggaagagtcgtcctcgaaacaggaagccagaaacaggcttcccaatagggctacaagtaatgtttttatcttcatgactttgagtttttaggtgatgatttaaggcatggtgaccggctgtcccttatattctccgtcttcatgcttcaacgggttgccgggatgctcattgttgtattcggtcagtttttctttcaccaaagcggcgtaggcttttacctctgtaccggtcatggtccagcgttccggatcgggattgttcggatccgcactgcctctgggagaccaataggggagggagggaagcccggttgcatctaaaatgaaacggtaccatgagtcggaatactccccaaaatagttatttaattgactccaattggccggtcgtccgattttattggtgatatacaggctgaaaaccctcccattcaaatccgtgacaggaaaatcttccgtggccaccacccgcagtctggtcacatagacggaatcgtccagcaacggactgtagtttattttcacctgcaacagcccctgataacttcctgcggggacactccccgacaggagttcatacatactctcctcggctgtaatcgtatcctccggtgacagcctcaccttaatcacacgctctttatccatcgcactcccggtaatgaggaaagggatattgacagtgtcacatccgatttccacattttcaggatgttccgtaaaattataagtggtggagaatccgttgaagtagattcccggagcttccgtatacagcgtcaccttctccttggagcaggagacccctgcaaacagggcggaagctatgatgattaactgaaaaataaagtttctcataaccgttcttgtgttatttattgatactattgccataatcttcacgtcctcctatttcaacctccgtttcgggcaggggtagaacaaacaaggcatcgccggcacctaaggaggcattgggaatgttcaaccccaatcgtttgtaatagaagaacaattgcccttctcctgcaaactccttttgccattctttctgtatttcccggctgatttcctccttgctcaaggaggcgggcaggtttttctcatataggatgcctctggccacccgcacggcgttcagtgcgtcgactgccttttggggattgttcaggttgttatagcactccgccgcataatagtacatctccggtttgcgcatcaagggcatcttgttttttgccctggattctgaatctgccggttcgtagaatttcagaaaagtccaggcttttgcttccgtcttgttaaaccaccgcatataccggatatccgacacgcctgtcccatcggcgatttcataaaggctttcccccttggtcttggtagtatagaacaccttttcattgtcagtgctggaaaagtccgcgtttatcttgtactgctctacataaggacggagtgtcttatatagctggttcacttccagataaaagatgtgctcggcggtaaacgacaaatccctcattttttcttccacatgcacacttgattcaggatccacccaagggataacctgcttcttcatgaacagttcctcaatggccgccagagcctccttgtattttccctcccacatacacacacgtgcctccgttgccttgactgcatagtaattgaagcggctcttccgttccttgaaaaagaggtcgtcctcatccatctcatagtcatctcctttgattgcagttccgtaagaatcccagtagttcagcagtgaatccgcttccgcaagatcccggtgaatgtatcccagtacttcttttacggtagattgtttggtgagcaccttgctgtactccgtcacataagggatagaaagcttgtccaggttggaaggctggttctccagatttccccagccgaatatgcgcagcagttcaaagtgcaggaaagcccgcagaccgatggcttctcctttgatgatgccgtaagtggtgggatgcaggatggcctttttttcgtcgctcacttcgagcagcgcgttcaggttggcgatgatgcggtaggttttttgccagataccgtcgatggtcccggtatagctttcataacggtactgcttgagattgttgtaaggattgttcgtggccatgtcatactgctgtgccagcacatcaaaaaagcagacagtggattcccgcccgtaaagggtggaatccgccatcatcatgtagcatccgatcagggcatctctgaagccggtttcattctcaaacatcttgtcactcttgatttccgttttaggctccacttccagccattggttgcaggccgacagggaaaggagcaggaacaatgacaaactatatatgatattctttttcatggttctcggtgttataaggtcacatttaaggagaaattgaacgttctggcgaaaggataggaggttccccgctcaatgtcgatgcttgaaaaggtgaaaaggtcgtttgcattgaaccgcagcagaatcctttcaagaccgattttcttcacaaagtcatgacggaagaagtcgtatgacagttgcagggaggatatcttcaattcgttccgtttctgcacaaaacgggaggtaggatatgtcttctctgaagcgaactgctgcttttcggacacatacacttcttcgctgattgctttgtacaaggcgatatctcccggtttgcgccaacggtcggtatagatgcgtcggtccacgttatatttcatgtcggcgttttccactttgtcaaccaatgtctggttatacatttgggccccgtactgataagtcagtacagcattgatgccgaatcctttgtactcgaaattgacaccggcattcccctggaatttgggtagttcatcaccgcagatgacctgctgggccgcatcgtaagtataggtccggtaaggattgccgttctcgtctttcgcgatatagatttcgcggccattggccgggtctatccctaaggaaggcatcgcccagatggcatccatggaaacaccgtcgtaatatttctggacaggtacattaccttcagtagccagttcctcctgctgttcgttataggaacgcatggcttcggatatttccttcaggatgtttttgttgcgcgatatcataagggagaacgacagataggaacggtctgccggctgttgccatacggtcgctccggcacgtaggtcgaacccccggttcaatacttttccgacgttttcctgaacggtggtgaaaccggtagacggagccaggctcagagggttcaccgcattgtttgtaatggaatggtagtattcgaaagtaaacgaataacggtttttataattgaagtcaaagccatagttctgctctactttctcctgccactgtaaatcctcgttgcgcatgttcagcaattgcgctcccaactggcctccgtatgtcttgtcaaggaaatattcgtatgaggccaatgtgttataagctgccgagctttgggaaccggtcgagcctgtcgttgcccttaagcgcaattgggtgatgttggaaccttccatccagctctcgttgtgtatgttccagcttcctcccacactccagaatttcccccaacgactgttggctccgtacatgctggatgcactctgacggaaagtggcgtcgaagtttagacgattgtcataggaatagtttgccgacagataataaccgaaatcctttacagtctcctccgtccctttgggcttggcatctttcagatattgccgggcaaagataatgtcggtcatcttgtcgctcggaaaaccttctgcctgttgcagattggtggaagactgtttgcgcgacagatcaaaacctgcattgacaaaaatgtcatgcacactcaggaaattcttgttatattgtacgtcgaacttaccgctcaaggaatgttgttcgccgttttccaggtcgtagctccccttttccgtcagacgatcggtactgtaggaggcgaatttcagatgatccgacggataaaactcgtcgctcctgctgcgttgttctgtaagtccgaaacgggctgtagccttcaggccggtcatgacaaaccattgtagttcgaaattattggtgatgtcgacgtatttgtcctgtaagagtgtgttcaactgtgcattgtacaggggattcgcctcaaattcaatatcctcataccatgcattcaccgtgacactgtttcccggatccaaagaagggacgatgttgtcggtcaaatgaccgtattgatcgtagggtgtgtaataagggttgagtttggtgtattcatcgaaagtcccgtacttggagtcgtgcgcttcgttggaagtgatagtcaactggtttctgaacagaaaattctgatgcctgtacaacagggagattgctccggagatgtttgtacgatccgaacctttcataacccccttgatgttctggtaagacaaatcgacgatggcctgtaatgccttgtcgcccaattccacagaaaggctatgcttgttgcccacacccaaccgcaacggcttggatatccaagccgtgttgattcccgatttgacggccgactggcgttggttatacattttaatcatcatgcgctgtgattcgaaatcggctcccggatcgttgaacatcccgaaagcctgttccacctccagtttttccgcagcattgcacaaatcgtacgaactgaggtccggagcctcgatttccatgcttccattgtaagtgacgcgcaagtctccggacggattcttcttcaattcaatgacaatcacaccattggctgctttcgaaccataaatggcctttgccgaggcatctttcagaatggtcaaactttccaccctgtccatatcaaggtccatgattttctggagggaggtctcgaaaccgtccagcacgaacaaaggcgcattcgggtcgttctggtaggtcgccttcagatccacatcttccatattaatggaagacttaccgcgcaacaccatttcaggcatagcgttcggatccgagcctaaagacatgttgtcgaagaacatgatggaaggatccagattcttcaacgactgcaacacattagagttccccacgcgcttcaggtcatctttcccgatagtcctcaccgaaccggtgaaagtgttagccttacgttcaaatactccgttcaccaccacctggtccaagacggtggcatcctcttccaggatgaaattcagtgccgtcgacttaccaattttctgctcctgggttttcatgccgacaaacgacacgagcagggtagtgttcgggtcatcgggtacggcaatggtataatttccgtccacatccgacaccacgcctgtagaggttcccttaatccggatggtcgctccgggtaatggctggttgttgacatctctgacaatccctttgattgttctcatctcttgtgtttgtgcggtcgtcaggaaggttggagcgaccgggactgcctgcacatgacttgaaaaaaacagaggagccactgtgagttggcaggctatgcagagcatagggactccccgtccgtaaagttgtttctttttcatgagtttaaggtttaacgacaatttaaaacgcttgttttttctggatacggcagaccttgaaaacgaacggaatcaattgttgaaacctaaaaatcacaaatcatataaacaattaaaaattaatagataacagaaacagaaaagtatcggaaaaagtgttgtttatgacacggaaaattggaattattgtccagaaaaaacaagcgttttttttctaaaaacagattctgttacagtgctttgacttcaattttttaacgatcgccactccgacgctgatatcctggagtgctgtgcctgtagaatcatagataatgattgattcgggagaggcggggcatattttccggcctgtgacgatttcccccaattctgcatagatggactccttacccatcagcccctgggatatggcgtgttgtgattcccccacccggtatgcctgcaccttaatgtcggtgacaacgacggaagaagcgaccaagcgcggatccagttcctgcttgccgggactgtccgccccgattgcggcaatgaaacatcccggctgtatccattctttgcggatataatacttgcgtgccggagtggctgttacgataaggttgctgcaccgggcagcctcttccccggaacagcagattaccggtatgccgagttctttttgcagcctgactgaaaacgattccgcttttctcacatttcttccgcttacccggattatctcaatgggtctcaccaatgacaaggccttcgcctggatttccgcttgtgtgccataaccgaatacgcctaattgaaccctcccttcaggagcaaggtatttggcagccacggctgtcgccgccccggtccgccatttgctgatagttacagaatccatgatagctataggacttccgttccgggcatcgcatatatagataatccccagaatgctaggtaaaccgtaattttccatatttcccggaaagcctccgtttatttttactccataatattcttcatccccataacatatcccgcctgtcttcaaatgaaattccccgttcctgacatccgcatgtagtaaatccggcgcatacaccttcccttgtgcatgcaacgcatgtgcctcttcaatgacaggtaagtattctgccaaagaaagggcattctgaatatcactccgtgtcagcaccaatgttcctttttccatattttgtctgttttcgaatttaaaacattgtcaacgaaccccttccagggctttgctgtattttctgagatttgtaatgacattctctatttcatcttcatcaagtgattgcagagcattggaaatggtgaggttgatggattccgtcgcttcgtccaacacttgccggcctactgcagacaaggcaatcatcttacgccttttgtcggcatcgtcctgaaatgtttccaccaaatccgcctgcatcagctttttgacattccggctcatcgtggagtgatccacctgtaaaagctctgccagttcctgaatagacagtccttgatgggcattgatatggtatagtgtgtgacgttgtccgaaggaaagccctgcccgctgcctgaacaaccccaggtttttaatcaattcgtagtttaattgccttaaagtatcaatttgattttgcatacaatttttaattattttgtaatatacatgtatatatcatattttatatgcctacaaatatatgtataatacatgtaatatcccatattcaaattattttttaacattaaaattttaaaattcatacagacaatctcttctttccgttttccaaacgtcaccgcctgattcagcaaaagatggatgaatgccagtaatttgaaaagtttttccttacacttttcaaacatttacttattgattatctattgttcatttattgaagtgatttgaacttatgttagtttcttaaaaatgcattaagatattaaaatacagcgtacaaatagaaatgttctttatattataggtgaccaaatattgctctggctttccacagcaaaacatggttatgtcactcaaagttgccttattgaggtggcaaacgccattttgcacaaactcaagacaggctgccaatggtcgctttttccggtagaggccttgtttagcgtcaaggtactgacatacggggctgttaccatcattacaggaaatggagcaagggcggcaaatggaaatccgtatggattcagctacttgacaactaccgtactgaattggacatgtcctgcgcaacgtattgagaaagaaggaagtcatcacgaacatccgtgccaataaacgaagggacaacgccgatgatattctggtggacgacgaactgtatgccgaaaggtattacatagagcggaccgacgcctgggtggatagcttcagaacggttctaaaccggtttgacactactgtttccagccggacatcttggaattatctggctttcgctatcctgctgctaaagaaaatttcacgaaaataagaggtttaaatcatttctataaataaaacaggacttttagtggtttactgttattttttcggtgtttggatattacctttgttgcaaacgaaattgattttatggattccgatagatattctattcatttttctcctctacagggttatgcagaccggatttatagaaatgctttcgctcactatttcggtggggtggaggtgtactataccccttttatccgggtagaaaaaggggctcttcgcaagcgtgatctccgggatatagaacctgaaacgaatacggttgctgacttgattcctcagattcttcccggtagtgccgatgaatttcgtttgttgaccgatgcagtgggagggaagggatacaggcagatcgatattaatctgggttgtcctttcccgatgattgccggtaagcacaaaggggctggaatgttactttatcccgcacaggtagcggaggtactggctcccattgcagagtatccggaaattcagttttcgttgaaaatgcggttgggttgggaaaatgtgagcgaatgcatggtgttggttgaattgttgaatgccattcgccttagccacatcgctcttcatgcccgaaccggcaaacaacaatataaaggccatccggatttagaagcatttcagggtttctatgagctttgccagcatccgctttactacaatggtggtattgaatctttgtcggatatccgacaaattctgactcggtttcccctgctgaagggcgtttttatcggtcgtggattgttgtcttcgcctttgctggctaaggaatttaaaggaaatgaaacttttttgcccgaacaacgtatgtcaatatattttgccttccatgaagagcttttttcagcctattcccaggtacttcaaggagaaactcaattgctggtgaagatgaagaccttgtgggaatattttttgcctgaaactgaccggaagttattgaaacggattaaaaagtctacccgcttacagcagtataccgaaagtgtaaaagcaatatttacttcttaacaggaaaattcgatgaaaaaatttttgttcattaccataggtgtcctttctgtaatcttgggaataatcggaatattcgtgcctggattacccactaccccttttattttattgagttcctggttattttataaaagttcgaagcgattgcatgatcgtttacatcgttccccccttggaaaatatatccgccgttacgaatcccggcaagggatgagtttaaccggtaaattcatttcgattgcctgtatgtggatcatgatcagtatttctgcttttcttatccttgaagatttcaaaatacgtgttcttttgttgatattgggagctatcggtacaggaagtatattattgatcgtcccgactgctaagcggcaaaatccgggatctgaagaggcccggtaggatcgtacagtcgccgccgcccggccataagtttattttttctttctattccgatttcggaatagaaagaaaaagggaacagtattgacaccgttccctttatataatatagaattacaccggttatgcgatcacgacattaacgatttttttcggaacaataatcattttccggatttcttttccttcaagccatttgcctgcctcaggggaggctttgactgcagcttcgatttctgcctgggttgcagtcaacggcatattcagtttgaaacgtactttaccgttgaaagaaaccggatattcaaagctatcttccaccaggtatttttcttcccattgagggaaagttgctccggttacgctttcggcatgtcccaacaaatgccacaattcttcagcaatatgaggagcatagggtgctatagcaacgaccaggggttcgagaatagcccgtttattgcatttcagtgcagccaattcgttggtacaaatcataaaagccggaatagaagtattgaaagaaaaattttcgatatcgaattcgatttttttcaaggttttatgaagtacttttaattcttctttggtcggtacttcgtcactgacagagaattcttctccgttcaggaacaaacgccagaatttacgtaagaatttatatacgccgtcgatgccttgtgtatcccagggtttgtgtgcttcaagcggtcccagaaacatttcgtaaagtcgtaaagtatcggctccgaattgttcgatgatatcgtccggattgactacgttgaacatagatttcgacattttttcaacggcccagccacagatgtatttaccgtcttcgagaataaattcggcatcggcataatcaggcatccattttctgaaggcttcagtgtccaaaatgtcgttcttgacgatgttgacatctacatggatctcggttgtttcgtattgacttttcaaaccggcagatacataggtattggtccctacgatgcggtatacgaaattcgaacgcccttgtatcattccctgattgatcagtttcttgaaaggttccggttcacaaactactcctaagtcatataaaaacatattccagaaacgggaataaatcaagtgccctgttgcgtgttctgctcctcccagatacagatcgacattacgccagtacgcatctgcttcatggctgaccaatgctttatcgttgtgcgggtccatatagcggaggtaataagccgatgatcccgcaaatcccggcatggtattcaactcgatcggatatccttctttcgtggtccagtttttagcccggccgagaggaggttctccgttttccgtgggcagatatttatcgatttcaggtaattccaaaggtaattctgcctcatctatcatatagggcatactgtctttgtagtatacaggaaacggttcgccccaataccgttgacgactgaaaatggcatcccgtaggcggtaattgatcttgctcttcccgatcccccgtttctccacttcttcggcgatgaaagcgatagcttcttttacttccatgccgtcgatcagtccactgttgatcatcttcccttctttggcatcatacgaactcttgctgagatcgataggctggccgttatcgataaccgggatgaccggcagattgaacttacgtgcaaaagcgtagtcacggctgtcgtgggccggtacggccatgatagctcccgttccgtagcctgccaatacatactcactgatccataccggaatcgcttcgttggtaaacggattcatcgcataagaaccggtgaatacgccggtcacggttttgatctcgctttggcgttcgcgttcggtacgtttagctacatagtcaaggtattcagctactgctttttcctgatcgggggtggtcagttgcctgacataatcgctttccggtgccagtaccataaagctcaccccatagatcgtatcgggacgggttgtaaagatcttcaattgtatatccgagtcttttacatcgaaaatcacatcggctccctgcgaacgtccgatccagttgcgttggatatctttcagcgaatcggaccattccaggtggttcaatccgtccagcaaacgctgtgcgtaggcagaaacccgtaaagaccactgtcgcatattcttttgtacgaccgggaaaccacctctcaccgagagtccttctttgacttcatcattggctaacacagttcccagctgaggacaccagttcaccatcgtatcggccagataagcgatccggtaattcaacaatacacgctgttgttcccggatatccatggctttccaggcttcggccgtgaagatcggggtatccgagttggctgcattgatatttgcgttcccttctttttcaaaggtttctaccagtttggcgatcggttcggctttttgagtatctttattgaaccaatggttgaacatttggataaatgcccattgtgtccatttataatatttcggatcgcaagttctcacttcccggtcccagtcgaaagaaaaaccgattttatcgagttgttcccgatagcgggcaatatttttctctgttgtaatggccggatgttgtcctgtttggatggcatattgttcggctggcaaaccatatgcatcgaatcccatcggatgcaacacattgaatcctttcagacgtttatatctggaataaatgtcggatgcgatgtagccgagtgggtggccgacgtgcaaaccggctccggaaggataagggaacatatccagtacataaaatttcggtttggacggatcgacgtcgactttgtaagtctgattttctttccagtagctctgccactttttctctacctccttaaagttgtattccatgataatatagattgtttatgatttcattttgaggcacaaagatataaagtaaaaggtaaaagctaaaaggtaaaagctaaaaagtaaaggataaagttgtggcggaacataaaatgacagaagtttctaaagtcatgcagataatgctgccggtaagctgttccggcttgaaatgtttgatttcctgtaagtcttgccggtcgtggtatacaggagatctttatcccggacagtagccggatgacagacggtcaacgataataagccggaaggataatgatttgcatgaggttagaattgtggtttcaggtgataaatgacgatgacagggttatcttcttctttcagtcggaattgtaaggtttgcttttgtcgggagaccggtaaatatcgatttccgttgttgggatcatagtatttttcgtcgtcgttcaatactgctaaggcggaaacagccatcggagcataagtgtgaccgcgaaagttatcgtttagttcgacgagtataccttggtgtgtcgttttattccagatcagttcctgaggttcggagccattgtataaaatgaaaaaataagaatccgattcgtatatatttttgataaagataccggagctgaccaaaagactgcctgctttcatgggatccgaaccgttcagttgccggagaatccggtccggaataactttgtcttttaatgcatcgataatgaaacggggagataaagaatcttgccggtattggaagatcgtatcgttatagagtatggcacaactcaattcttgtttatagggtgccgtttcaaaaaaatcgaagtttacccggttaagagtattgcctaaatcgagtgagagcgggacatatccgatatctttgagttcatcggtattgtaattataagtggaataaaatacgttacatcgatacatcaggtcgtatttgaaaagtaatttccccggttcggcaaaatcgatcgagtttatactacggatgatatcggtatcccgatgtagttggggtaccagatcgacactccggatgaatcggtttgtgggcgtataaaataagagcttatccgaatcgaaaataatcactgtgtctgcctgaggcggaaaacaataagattgaatagaacgatattcccgtgggcctctgccccgggtaccgatggtattcagaaatttcccctgacggttgaaaacatagagggaatcgttttccgaatttaccaggaaaatatatttatcggtgattttcagctgttttactctgccgattaaaatccgatccgaggtttctaaagggatgtaggtacaactgtcgatgagttgggttggatcgaaagaccggactttctgcaagtcgcttttagaaatacgggtaacatctatatttcgggggacggttgggtgcccgcaattgaataggaaacaagcgaatagacagaaaaaaagtagccgcatcggaaagggaattagggttctttagcaaatgtataaaaaaataattactttcgtacggtaatgggcttaaaacaaggatatgtcgtcgggtttagtgctatttattttgcttgcttatttcgggatactgattttgatcagttattttacttcccggaaatcggataatgagactttttttacggctaatcggacttccccctggtatttggtggcttttgggatgatcgggacctccctttcaggagtaacgtttatctccataccgggcgaagtcgggaatagcaattggacttatttgcccgtcgtaatgggaaattgcatcggatatgtggtgattgccttggttttattacctttattttacaagttgaatttggtgtccatttattcctggctgggtatccgtttcggtgaaaaagcccgtttgaccggatcgtttttctttattttatctcagttggtcggcgcttcgtttcgtttgttcttagtggttggagtattgcaattggctttattcgacagtctgggaattccatttgctttgacggtatttattaccttaggattagtgtggatatacacttttcggggtggtataaaaacgattgtttggacggataccttacaaacggtttttatgctgatttcggtggttttgactattgccgtcatttgtcaggagctggatctgaattttagtacgatggccggttctattcgggagagttcttatgcccgtatctttgattgggactggcgttcttcccacaatagcctgaaacagtttctggccggaatagcgattacggttgctattaatggattggaccaaaatatgatgcaaaagagcttgacctgtcgttcactgagagactgccggatcaatatgtattctttttcttttctgtttttacttacgaatgttttatttctcgcgttgggagctttattatatatatatgcggagatgaaaatcgtagaacttcccggaaaatcggacgatgtttttgcttttttatcgatgaactatttcggagtaaccaccggtttatttttcttgctgggcataacggcagctgcttactcttctgtagattcttccctgacctctttaaccacttccttcagtatcgattttttgaagatcgatccaaaggatcctttgcaaaaacgccggagaataggagtacatctgactttttcgctattgatgtgtatcgtagtaattctttttcgggaattgaataataccagtgtcgtcaatgcggtattgaaagctgtcggttatacgtatgggccgattttagggttgtttacttttgggctgatgaccgaatatcaggtaaaaggaaaatttctgccttggatatgtttgctgtcacccctgatttcttatgtcctcgatcatttttcagaacaatggttttggggctattgtttcggttttgaaattttattggtgaatggttttttgtgctttctgggtttatggattttccgtaaacgaatagtagaagcaatataacctcatagatttgttaaaattattttataatgttatctttaacgccgataaagcgtaatagtgatagaaattaattacagcacgatgaaaattactgttattttactagccctttctttgttgtgtcttttttcctgtaaggataaaaaggtaaaagaagaattgacgacacagaaagtagaagttgttgaagtggcaaaaccggagccggtggctcctcctaaagaagaaccgaaacctgttgtgaaacaggtgaattattatctggtggccggatgttttaaaattccggagaatgctgaacgtttacaggctaaattaatccaggaaggttacgactcccggattgttcctttttataatatgagcatggtcacttatgatggctatgaaactcgtaaagaggcacaagtggctctgaaccggattgtgagagaacccggaaaagaactgacctgggtatatcctgtcagataaaccgggcttacaactctatacctgtaaaaacccgaagtgcatagccgattaggaaactgatcgctgctatgcctatactgattattgccatttcagtaaagcgatgccggaagctttctgttttgacaatggaataataataattgaaaatagctataatcactaatgctccgaacagacagacgcccagaccccaatatacattggacaggaggacgaaaggcaaaatcaggacaacgacagtgataacataagcgattccggtgtatacggcggcttttagtgcatttttgtgaacatcgttttcagttcgggtagagagatattccgaggcagccatggaaagagctgctgcaatgccggtaatagcgcctgtcagggctaccagtttggcatgttgaagggcaaaagtatagccggccagggctccggtaaattctaccagcgcatcgttcagtcctaaaacgacagaactcatataattcagcccttcttcatcgataagctcgattaatctcgattcatgaatttcttcatcccgggcaattttttgtaaatcttccaaatgagtttgacggtaggcttcctgagcatatttttcactattttccatcagtttgatactgaaagtaagcccgaataaacgggcaatccaaacatagaaacgaactttgccttttttaggccctacttccttttgggtatatgttttcaggagctggtaatgtcctgattcttctgctgctagctcggttaatatccggcggttattttcatttttttgtaaaagtgatagttgatggtagatatggtgttcggtgatttcattagtttgaaatgctaataactgtttggtttcctgggaagttaaagcgggcatcatttatgggtgtggttaagtaaaaaacgtttcgttatgttacggtattccatgagccaggttacaaaaaaaagcgaagaccatgcttcgctttttatatccgatcaggtaaagactacataataaagtgatcactgatagaacggtgttcaacgacattccggattgtttctgcaaacatgtcggcaacagaaatcactttgattttactgcattcctggtgtaaaggaatagaatccgtaaatataacttcgtctaaagctgatttttcgatattctcataggcttttcccgaaagtacggcgtgagtagctacggctcttaccgataaagcacctttctctttcaggatactggaagccttacagatagttccggcagtatcgatcatatcgtctacgatcactacattcttaccttctacatctccgatcactttcatgtcggccacttcattcggtctttctctggttttgtgacagatcactaaccctgaatcgaagaattttgcccatgaattagcacgtttagatccgccgatatccggtgaagcaatagccagattctcgagtttcagagaacggatatagggagcaagtaccgtggaaccatacaaatggtctaccggaatatcgaagaatccctgaatctgatctgcgtgtaagtccatcgtcatgatccggtcgaccccagcagcacataacaaattggctactaacttagcaccgatagctacccgcggacggtcttttctgtcctgacgtgcaaaaccgaaatacggaatgacagctactactttataggcagaagcacgtttagccgcatcgatcatcattaataactccatgaggttatcactaggcgggaaagtggattgtacgataaaaacatgatcaccacgaactgtttcatcgtaagaagtcgcaaattctccgtcactgaaatgtaataaagtcttttgtccgagatctaaattcaacgatttagcaattttctcagcaatatacttgctgttttccccggaaaaaatcttaacttcggaaagatctgacataatttagccgtttcaatatttatgttttaagacgctgtaaaatcgaatttcagatattattacccaactcacttgtgagctatttcgcaacaaaagtaagtaattaattgaatattagaaattgaaaattgaaaataatttagtctgtaaagggaaatgccttttttgccttttaccttttactttttagcttttcttcttatctttataccgtttgtgaagaatttctaattatttaatttcaattttcaacctaactatggaaaaattaaaccaatacatcgaggagaataaggagcggtttctgaatgagctgttcgagttgatacgtattccttctatctcatctgaggtagaacacaagcccgatatgtatcgttgtgcagaaaaatggaaatcccttttactggcggccggtgccgataaagccgaagtttatgagaccgaaggaaatccggttacttatggcgaaaaaatcatcgatccgtctctgccgactgtattggtatacggacatatggacgttatgcctgtcgatccggtggaattgtggcatacgcagccttttgaacccgtgatcaaagacggaaagatctgggctcgtggtgcagacgatgataaaggccaatcgtttatgcatgctaaagctttcgaatatatggtgaaaaccggtaatctcaagtgtaatgtgaaatttatgctggaaggtgaagaagaaatcggttctccgagcttgccgaaattctgccgggatcacaaggagatgctgaaagccgatgttattctggtttccgataccagtatgatagctcccgacgttccttctattactaccggtttgagaggtttggcctattgggaggtggaaatggtcggcccgaatgctgatttacattccggtattttcggaggtgctgtggcaaatccgatcaatgtattgtgtaagatgatcggagatatgatcgatgacaaaggacatatcactattcccggattttatgacgacgtattggaagtcagtgcagatgagcgggccaaaatggccaaagctccgtttaatctggaagcttaccaaaaatctttaggtataaaagccgtacatggcgaagaaggattctctaccaacgagcgaaccggtattcgtcccacattcgatgtatgtggtatttggggaggttataccggagaaggggcaaaaacagtactgccttctgtggcccatgcaaaaatcagttgccgtttggttcccaatcaaaaacacgataaaattgctaaattgttccaggaatatttcgaatccattgctccggaatatgtgaaagtgaaagtaagctatctgcatggcggaccgtcttatgtttgtccgatagatttacctgcatataaagctgcagaaaaagcatatgaagaagtttatggaaagcaaccgataccggtgcgctcgggaggtagtattccaattatcgctacttttgaagaagtgctgggaatcaaatctattttgatgggcttcggactgggagccgatgctatccattcacctaatgagaattatccgttagagcagttctttaacggcattcgtactattccgttattctacaagcattttgtagaagatgtgcattaatcttcttcatactacttaaattggcggacctatgtttttctgactggattttactatcagaatcgtaggtccgctaatttttaccggggattagccgattcgcaaaaaattggccggatagcatttctgatttatccttatagcgtggtatagacgaaaaagcgggttcgtttaccattggcaggaatggtcagtttttgcagatcctgggttccgggatgattgcctgagaactttaattcgatattgttttcactggcttgtagaggaacacgggcataagaaatcgagtagggaagggtttgccagttgcgggtatctgccttctctgtaattgcattggtcaggctgacggccagaccgagccattcattttgtttggaggctgcatatttcaagccttgtttaatgcctacccgcaacagcgaattggataattccctcaacatgcggtcgtgcagcgttttgaaggcgatttgattgatgtcttcggccatttgtaaagtatagtttttcccgtcatagctgataactccttgggtgaaaggacgcgggcgttcgacatatttcgggaatacgacccggactacatcgatgttcgccagggaattgcggtcgttttcactatatccgtttccccagaagaaaggaaaggtcaaaccgagttcttcgttgtgaaatacgataaccccgtctcctttatcgattttggtaaaagtaattccccattctgctttgaccggcccgaaaccgttcagccaaaaaaatactaattgtccgttggccgggaacggagccggggtatatttctgttggaattctttttcatacccggctaactcttgggtgagtcccgattgataggctgtacgcagcaagtctttttttaattgttcgggagcagctaacccgaaattttttaaatagtcggtttgataggtgttataagcattccggtaggcgatgaaagcattattgtaatctcctgcagcatcgtatatcaagcccatcagtaattgggcaaatgcatcccgttgataacggtttttatgatccgggtatttgtcatttaattgctgtagacgaatattgattttacgtacttctaccaaagcatcttccatattattcaactgaaggtagttcagagccttgtaaaagttaatcatgatcacttcgaaatcttccgggcgataaggacggatttccggattcgagatcaatacggcagcttctgtcagcagattacgttgttggtcttcggtcagctgttcggcgatttcgaaagcttgattactcttttcgtaatggcctaacataaattcgacataaccttgattcaggtaatacagtattttgtttttatcccgggcttgttttttatccttttgcaggagtttttcagcttgctcgaactcgcctttacttacagcatcctgaaatgcggctgtgcgttgataccaggtggcacaacttgaaacgatccaacaaaggaataggacgatacaaaaccggaatttcattatttagagtttttgatttgcgacttacgatgtataacgttacagctaactgtacgtaagtgatcgatcgaaaaccgcaaatctaaaattaatatctgggtggcctttctcttacagggctctgtcgctaacttgttttttgattttcttatctcccatccaaaccacttcgttcgtttccaggttggtcagttccagatctacctgataatagacaacctgttcttttttgtagctgtcgacgatgctattgatggttccttgcaacatgaaatcggcacccaattccagtccccattttttagctgtctccggcgaagtataaccttggttttgttcgtcccgttcggtacgtaattcctgccgtttttccccggcttgtacaagccggacacttccgtttttaatgattgctttctctatgtctttgatgaaagtctccgaattgatgtgctcatggctcttgttggtaactgttccgacaacaaccacgggacgtttgttgttgtgctggctctcataaaccggcaaccagcgagctccaagaagatcgccgatcatctcggctgaaaccagttgtgagtccgtatcgttccagcgaccgcttaaatcgatgacttcgttcgtattgacacgggatactttacgtgtggcacaactgctgaaggcaattgccagtgcgaatactatcgttacagtgaaaatctttctcataatatatttgttttagtttttgatttatcaatcaattcttatgccagaatgagagaataaaatttgtatatctattctgctaatgttttagcggctctggcgagcataattccactttgggaatcgatcccttccatatattcctggaggggaagggaactaatcatcacttgcttacccttgctggaagcgtgcaatagataagtcttaccttcttttttccaggcaaaacccaaatgagaggtgtccaacccttttatatgcgttgtgatcaggatgatatctccattttttattttattacaagcttcattaatcttatcttttggaatataataatacgtcctttgatttattgctgtttcaatggttttgatctttttaagtaagcttgagtctttttggagttgtggatatttctgactgtgttccgacataaagcagatttgcttggaataagggatcccgccggcaaattgtgtaatatcggtcagcaaatgagcttgttgcatttcatataaccaatctgaagaatagtgtaaacgggaagtatagtcgacgatctctgcattccggtatctgagccggataatattttgcacgaaagcctctgtcgattgttgattatattgttccaaaaatgccaaagcaaggacattttccacgaacgtcacacaatctaattcgtgtagattgataaccggcagttcctcccgggtgacgttcaaagtattgctttgataaggagtccctaaaaaaaaacgggcgatagaagggattctttcatttacaggaagattgcccaagcgatgttcttctgcatatt

SEQ ID NO: 5839 - DNA, 1631 bp, Unknown
  gut microbiota DNA sequence
tttcataaaactttttgatataaaaatcagagctaatcccatcagcagaattcagccctaattagaaaccacaaattttaccattactaatttttatcagacaacaataaaagagtatgatgattcatttgctttaatctttaaaataaattcgtttcacgcggtgagacacgctggtcaatatttcataggggatcgtacctaatttatcggaaagctcggtcaccaaaatatgttttccgaatatttccacctcatccccgacctgtgcgtccgtatcggtgatatccaccatacaggcatccatgcagatattcccgacaatgggaactctttgtcctccgatccatacttcaccgactccgcagctcaggtggcggtcgagcccatccgcatagccgacaggaataacggcaatacgggtatcccggcccaatacacccttccgtccgtatcctaccgtctgatctcccttcacctgacgaactgccgcaatataggtcttaaagctactgacaggccataacggtgcccccacggcactgatcccatgtaatccgatacccaaacggaccatatcgaaagcatactgtccgaaccgttctattccggcggagttgagaatatgccggataatcggataatcgaaacgggcctggacttctttcgtcatttcaataaaacggttgatctggaacaacgtatactcatcgtgtcgggcttcgtcactcccggccaaatgtgaaaacatggaacggattatgactttccgtttcgtttcgaaaaacttcagcaaagcgggcagatcttccggatccaagccggaacgattcatcccggtattcaatttcaaatgtacaggatatttttctatgccatgtttggtcaggacccggtcgaaagcctccagtaattcgagagaataaatctccggttccagattaaattcgatcatatgatcgaaagcctccggttcaggattcatgacaccgataggtatggttattccggcagctcttaactctactccttcatctgcaaaagccaccatcaggtaatttaccccctgatattgtaacaaactcgctacttccccggctccgctcccataagaaaaagctttgaccataacagcgatcatcgtcttccggggcaacaaagaacggaaataattcaggttatgaaccattgcatcgaaatcaacttcgagcacggtagcgtgggactgtttctgtaaaaaaccggcgatgtattcgaaacggaacttacgggcacctttaatcagaatcacctgatctttaaactgctccctgttctcttggcgcaggaaactatccgtatccttgtagaaacgacagcgggggaccaaaaaataaggtttataccggcttaacttttccccgatacctataaataaagaaaccttcgcctttcgcaacaacaacgctacctcccggtacaactctctctcaccggttcccgtatccacgaaatcagacaaaatcacgactttctcacgcccggcatcctgcatagccagggtattcaatgccaactgaaacgaagcggcatccgaattatagtagtcattgatcaatacacaacgatttataccgtcttttatttccatc

SEQ ID NO: 5840 - DNA, 195 bp, Unknown
  gut microbiota DNA sequence
acagagcgccgtgcaggcgggcaccacgccggtctatatcggcacggcacccgtcaacctcgtgcgcggcttcggcgaggccggcatcatcaacgcgccgatcaagatcaccagtctggtcgacgctcagaagaagatcggctactcgtccgactggggcacctttaccctgtgcgaggccgtgtacgcgcattt

SEQ ID NO: 5841 - DNA, 9008 bp, Unknown
  gut microbiota DNA sequence
aacgtttgcataacaccagcaaacgatttcaccactcatgtagaaaaacggctctttttcataggcattgtatttattattaaatgtaaacccattagcgatctattcttgtaaaagaaacacttattaaaaagtgacaaaaaaaatgttgattaaatcagtcgaaagtttataaagtccataaagtttataaagttcctggaccctgaggccgcttggttaattaacaattatcaaatgacatttgacaatatatctccaaacctatggtttcttttttatttgtctgataatcaatgattatattttttattctaattctcatttttcttttcttatttttttctaatggaaacgaaactttcaggtaattgtcaattgtcgattatcgtctgtcaattattcttttggtagaaatccgccaaaagaatcgaacgtttatctttgattacctacttgatcattatcatctatttaataaatagtatagagaacgacggttttgtttttaaatttcttttacaaatgtggcggatatttcggaacatctatagcacaaacatccgaaaaaatgaaaatattgtacttttcgacagattttcagttactattttaacaaaaatataacaaatctactgtacaatttttccataagtgtcttaaatacaactataaaacaaaaagtagaattattctgttactaattcgtctccggtaatgggaattatcgacccggtcgcttctgttgatcaccaaacacgaacaccagagactcacgttatcactttatggaaaacgcactgtgacctaaaaaacataaactcctacgaaacagatgttttctgcctccttacattaggaatcaatttagaaatcagtattttgtagaaacaatccgatcaagtaacccgggtatccgtactccggtcaggcttacctgtcctttcttctaaatgatgtccggtagggcagacataaggggataaaaaaagtcccacaaatcgttgaatttgtgggacttggccgttcattgtccggttttgtccggttagttcagcggagagggagggattcgaacccccggacctgtgacagtcaacggttttcaagaccgccgcgatcgaccactctgccacctctccaatgcggatgcgaagatagaatgaattttgaaaaaaaacaaaataataagagtttttttgtaattggtcattggggtgatcgttgtgatttagttgttttgttttaatagattgatatacaaaattttatctgaaccgatagatttatcggttccggggatttttatagaaatgttttagcaacaggtaaccggcgagaccggcgaatacggaaccgctgatgatacctaatttggcttggttgagcagggtaggaccgatgtcggggagcccggcataggagaggttggcgataaacagggagacggtgaagccgattccgcccaacatggatacaccgagaaggctacgggcatccatgtgttccggcatgttcagtaatttgcttttcacggccagccatgtaaatgagaagatgccgagcagtttgcccaggacgagggcgatgaatacgctgagtgtcactccttcgatatcggccagggtgaaatgttcgaaagagatgctggcgttggcgaaggcaaagagaggcatcaccatgtagttgaccaggggatgcaggttatcgtccatcgattgcaagggactgatcactttgtcggaggccgattcgacatgacggaggatagcgcgttccgagttgctcagcatgtatttattattggccatgtcggcggtttcgggaagcttttgcaagctggcccggatttctccgacatatttgtagatgtttagcttgggacgtgccgggacggtgaaggctacgatgacaccggcgatggtcggatgaatccccgaattcaggaataagtaccacacgacgatgccgaagaagatataaaacagcttgctgttgattccggctttaccgcctatccacagaatgaaaataatccctaatgcccaaagcaagtattccaggatcagattactgctgtaaaaggctccgatgacaatgatgccaccgatatcgtctactacggcgaaagtggtcaggaagattttcaggctcagggggatgcgtttccctagtaaggataatactcccaatgagaaagcgatatccgtggccatcgggatggcggctccccggctggcagggctttcggggcaaatcagggaaaagatgaggatggggacgagcattcctccgcaagctgcgacaaccggaagtaaagctttgcggggtgaagagagttcgccgaccaggatctcccgtttgatttccagaccgacggagaagaagaagattgccatcagcgcatcgttgatcagggacatgaaggtcatattccttccgtggacgtgaaagaggttgatgtctccgaattgcaaaatgacctctttggcaaaaaaggcatcgtaggtttcgcgtaagggtgtattagctatgatcattgcggctgcggcaacgaaaagcaagacggccccaccgtttatctttgctttgataaagtgacgtaggggcgatttgaatatattataatccataagttttcatttttttgaaccagagggcaaactgttcgattcctttcccgagtgaggtggtggccctgtaattataatcggtatggagtttggtggtgtctgcccaggtctgatacacatctccgggttgcatgccgacgaattctttccgggcggttttacccagatgttgttccaggagtccgataaaatccatgagctgaaccggagaaccgtgaccgatgttatagatgacggccggtactcccgggacatcttcccgcactaagcccgggtggtcgagtatcgtgacgatcccggcgataatatcgtcgatatatgtgaaatcccgggataaacgtccctcgttgaatatccggatcggtttatcttccaggatagatcggccgaaaagcatcggtgccatgtccgggcgtccccagggaccataaacggtgaaaaagcgtagtccgacagtctggaggccgtagagccgggagtaggtataggccatcagttcgttactctttttggtggcggcgtagatactgaccggatgatcggcccgcgcatcttcgcggaacggtacttcggtcgaattgccatataccgatgacgaagaagcgaaaatcagacggggaatatgatggtggcggcagccttccaatatatgcagaaaacccgacacattgctgtcgatgtaggtctccggatgttcgaggctataacgtactccggcttgtgcagccaggttgattaccgtatcgaaggtccgggaagcgaaaagtgcgtcgagggcaggtttgtcacagaggtccatttgcctgaacgtataattggggtaaagggtagagcggtattcctgttcttgacgggaaagatcgattccgcatgcttttaaacgggcttttttcagggatacgtcgtaataactgtttatcgagtcgatgccataagtggctatgccttgccgggcaagagcttttgcgaggtggtaaccgataaatccggcacttccggtaattaaaacttgcattaggttcgttgctttaattaaaaagtaaattgctgattacttaacaatcgatgtttatatttttgatacaaagttaaaaagtatttataacaaaaataggtatatcggatgaaataaaaaaattaagtcgccatgaattgacgacttaaattactaaccctaaacagaaacaaactatgaaattgattcttacacaaaggtaatactaattgtgaacgcttcaaattaaatattgttaattagacacaataagtatgtgccttttgtgtatggggttaatcactttattatgagttgtttattcgtcttcacaaaagagccctttttctagccggatgggaataatccggttggctaatccggcatcgtaggggagttttactttgatataattgtctgtgaatccgcagatatactgtccgattttgttgtcttcgaacaatacaggacgggtttccccttcgaaccggtgatagaaagcggttaattttttttgtgatacggaaatcagccggtttacccgccggtgtttttcttcctgaggaacggtcagggggatatccagcgctttggttccctggcgttcggaataagggaatacgtgaagccgtgaaatgtcgagcgtctcgatgaaccggagggcgtcttcgaaacaggcttcggtttcaccccgcatgccggctatgacatcgacgccgataaaagcatccggtagcaggtggcggatggtgcggatcttaccggcgaataattcccggtcataacgccggtgcatgagcttcaacacttcgtcgttacccgattgcaaggggatatggaaatggggcatgaagcgcttggaggttgctacaaattcaatgatttcgtcggtcagcaggttgggctcgatagaagaaatcctgaacctggcaatctcttcctggcggtcgagttgttgcaatagttgtaagaaattcatatccgtgccccggccgaaatcgccggtattgacaccggtgagtatcacttcctggatccctttgccggccacctcgcggagagcgtcgaggatccgcggcagactggcactccggcttcttccgcgggcaaaaggaatggtgcaataagtacagaaatagtcgcaaccgtcctggattttcaggaaacaacgggtacggtcgccgaaagagtaggccaggtcgaaattgctgattttgaaaatatcacacgagtgaggttcttgcttttcctgttcttcgaggtgttgcaggtagtgggcgacattgaatttttctccggcccctaataccaggctcactccgtcgatagccatgatttctttcgctctgagctgggcataacatccgacaactacgatataggcgcccgggttgtggtgaataattttacggatcaactgccggccttttttttcggccatatcggtcacgctacaggtattgatcacaaagatatcggcgccttctttatcggctacggtttcagtgccttctttttcaaggctgtgcctgatggtagacgtttctgaaaagttcagtttacaacccaaggtgatataagcgactttcttccctgcaatattcatatttgtaccgactgctattaaatttctataatcgcttgcaaaagtaatgatttggcttgtaatttgctatctttgtacagtactgttgagtttttattttttacttttaacctttaccttttatgcgttattatattatagcaggggaagcatcgggcgatttgcatgcgtcgaatttaatccgggggttacgggctgaagatccggaagccgacatccggggttggggcggggacctgatgcgtgaggcaggagcggagatcgtccggcattacaaagatacggctatcatgggatttctgaccgtattgaagaatctcggtaagatcaaggccaatatccgcttgtgttgtgaggatatccggagttggaagccggacgtggtgatcctggtggattatgccggtttcaacctgcgtattgcccggtttgccaaagggatcggtttgaaagtattttattacatttcgccgaagttgtgggcctggaataccgggcgcgtgaaaaagatcaagcggtatgtcgaccggatgtatacgatttttccttttgaaacggatttttacgggcgctatcattatacggtggaatacggaggtaatccgctggtggatgcgatcgatgcccggccttaccgggaggagacttttgccgggtttataaaagcgaacgatttaccggataaaccgatcatcgctttactggccggcagccggagccaggagctgcgttatgtgctgccggcaatgcttcggatggtggatcatttccccgattatcagtttgtgatcgccggggctccttcgatgtcggatgccgattatgctccttacctgaagggacgggaggtccgtattttgtatgggcagacttatcgtttgttgagtcaggcgaaagcggctctggttacctcgggtacggcgaccctggaaacggctttactgcgtattccccaagtggtttgttacaatggcgaaggaggtaggttgagttattatttgttcaagaccttcgttaaagtagactatatttcgttagtcaacctgattttcggtggggaagtcgtcaaagagctgatgatgcaccggctgaccgaaagaaatatcctcaacgagctctcccgtatcctgtacagcgaacgtgaccgggagaaaatgctccggaattacgatgaggtgatccgccgtttagggcaatccggagcttcggcccggtttgctaaaatgatggtacgggatgctaagaatttaatcggttaaagccgggttttaatataactttgtagttattatgtgcttttgatattttagtaaaccagttttacattatcgatccagaatttggcgtccggggcaccgatgtaggctccgccatggccggaggagaaacggaggataatgtgggtgggagtagtgtcgggagaggcccagccgatctcctggatggggacgatcttcccctggctattggcggcatattgtgtcgattcaccttttaccaggtccatataaggctggtaaaaatcctttccggtaatatctccgtaatggatttctatccgatggccgttttgccattcttttacttcctggtcataacgttcgtaggctgtgccgacgcgtttggcaaacagattccctttttcgtcttcccagcggtattgcagcaataggctggcttcggcattattctgttccgggatatcgacgatacggctgaaacctgtcgctttgatctgtttcccgcccggctctactttataatcgaattccagggctttcggtcgtttcgtgaaaggaatattgttattgagtttgctttgcggatttttagtgtcccgcacgggttccatcacttcaccgacaaatatcgttccggtggctaataccgatatattgatcaatccaagcactttgacgcgttccatacgggtttcgagccgggcacaataaccggaatcccttttctccgggaatacggttacactggctttcaccactccgctgactttagccatgacggtcgacgtagcccacggagatatactgtttttataaggggtgttgtttttcagcgtatcgcccggtgtgatctcatacagatattttgtatttcctccgataacaagggattcgtcgactacccgtaccatccactgattcatatctccgtaaggaaataattcggtggtatcgttttgtgcacgcaactgtccggcaaaggatagcataataaacaggctgtatatcggtttcatagtaacagattttaattgaaatagatgtattgcccctttgctaacaaaaaagatgccaatattaatgtgaaaatatgtaaatgctaaaataattatcgggtgaatcgggggattcgtcgtgaaaaagggggaatgtatatatttaaattgtagggggggagaacagaaaatacatttgtaacgtgaaaatgaacttaaaagatacattatgaatgcatattggaaagggatagtcctgggactggtcgtgttgtccgccccggtgatggctcaggaaaaaccggctgtgtgggatttgaaatcctgcattaattatgcccgggcacataatattcagattcggcaaagtcggatcgcatgggaagaaagtttagaaaatacgaagcaggctaaagcggaccggctgccttctctttcttttacaacggctcacaattatgtgaaccgtccccgtcccgaagccggtgataaaaattcgtattccggaagttataacctgaattcttccgtatctctgttcgaaggaggaaaaatccggaagaacgtacaacagatggacctgcaaaatgaggtgcaggggttgacgatcaaggaatctgaaaataacatcgaactggcgattacccaagcatttgtccaggtattgtatgctgacgaagcggtgaaaattaacgaagggacggtagaagtttccaaagcccagcgggatcgtggcaaagctttattggaggctggagcattatcgaaagccgatctcgctcagctggaagctcagtatgccaccgataaatatcagttggttgtagcccggacaacgctcgcaaacgctcagctggaattgaaacaattgctcgaattaggggtgaacgaccagatggaactggctattccgcaattgacagatgaaagcgtgttggtcgttttaccgtctaaagagagtgtttacctgacttcgctgggaatcatgccggaagtgaaatacaaccaattgaatatccgggtagcgaatctggagaaggagaaagcgtgggcgggatatttacctgacgttaccttgtctgccggtttaggaaccagtcatgtttcgggtatcggcacggggttcgggacacagacgaaacacaattggagtgaaaatatcggtttgacgctgaatataccgatttttaataaacgttcgaccaagacggcggtcaatctggctaaactgaatatcgagaatgcccaactcaattatgagaacgtacagaaagaattactgaaatcggtagagacggtttatcaggatgcggtatcggcgcagaaccgtttccgttcggcccgggagaatctgaccgctacagaattgtctttcgagcttactcaggaacagtttttcctgaaagcaaaaaatacggtagaattgatgacggagaaaaacaacttgctggctgcccggctcgagttgatacaagccaaatatatagcaatcctgaatcagcaattgttgaatttctatcagggtatagagatcagtat

SEQ ID NO: 5842 - DNA, 13809 bp, Unknown
  gut microbiota DNA sequence
agaggtatgtgagaaccaggtgattgtatgacaatataaaaaagaatatatgaaaaaagggaaattaataacgatcgggggagctatcgtagttctggccttgtgcggatatttctttatgggtacttcttcaaaagggaaaatcagttttcagactgaaaaagtgacccgtaattcgatgacggatgtcgtagtggcgacagggacggtagagccggtgaccaaggtggatgtcggtacgcaggtttcgggtatcatcgaccgtatctatgtcgactacaatagtgttgtgaaaaaagggcagctgattgccgagatggataaggtgaccttacaggcagaactggaatcgcaggaagctcagctggcgaatgccaaagcagaatacgagtatcagcaaaaaaattatgcccgcagtaaagtgctgttcgaaaagcaactgatcagcgacagcgattatgaagaggcgacgtataattatgaaaaggctaaaagtgcctatgaaaagtcgaaagccgatattgtaaaggtgagaagaaatttggggtatgccgtgattaccagtccgatagacggtgtcgttatcagtagggaagtggaagaaggacagacggtggctgccggattcgaaactccgactttgtttaccattgctaaagatttgacggagatgcaggtgattgcagacgtggatgaggccgatatcggcgaaatacgcgaaggacagcgggttacctttaccgtagatgcctaccggaacgatgcgttcgaaggggttgtgactcaggtacggctggaggctaccgtggaatcgaatgtggtgacctacgaagtggtgatcagtgcacctaatccggatctgaaactgaaaccgggattgacggctaccgtgtcgatttatacactggagaagaataacgtattgactattcctcccaaagcattgaaatttatgcccgatcaggctttggccgaagctaatggaatcgtactgaaaccgatccatgtggataattctgccttacagaaaacagtgtgggtgaagaatggacaaacgttggaagaaaaagaagtacagacggctactgcgacgacttcactcctggagatcaccggtgggctcgctgagggagacgagattgtcgtggcgatggaacaatccggtaaaaaagcgatgggaactccgcaacccggagaaacagaatccagtccctttatgccgaaaccaccgggacaagataagaagagtaagaagtaaaatgtaaaaggctataggctggaagctataggctaaaagatggggaggaggagataagggggagttgcgggaaattggtggagaaggtaaatcgatgatttagaaagtagaggaacttagtaactcattaactcagcaacttagtaacttagtaactcaataactcagcaactcagtaactcaataactcagcaactcagcaactcaataactcacacacaatgaatgctataattgaattaaaagatatcaagcgtgattttctggtaggaaatgagacggtacatgctttgcggggggtatcctttgctattcagccgggagaattcgtgacgatcatggggaccagcggatcggggaaatctactttactgaatgtgctggggtgtctggatacgccgacagccggggagtattggctggacgggtattcggtccggcagacgggaaagaatgagcgggcggaactgaggaatcataagatcggttttgtattccagtcttataacctgcttccgaagactacttcgatcgagaatgtcgagcttccgttgatgtataatccggcggtttcggctaaggaacgggaaagacgggcgatagaagcgctcgactcggtagggttacatgaccggttgtatcataagtcgaatcagatgtccggaggacagcagcaacgggtggctatagcccgggcattggtgaacgatccggtattgattttggccgatgaggctacgggaaacctggatacccgtacttctttcgagattctgacgttgtttcaggaattgtatgcccgggggaggactattgtttttgtcacccataatcccgaattatcggcgtatagcagccggactatcgtgttgaaggatgggcgggtgattcaggatacccggaatgaaaagattgcttcggctaaagagacgctggcggctttaccgaagaatgaggattaattaaatcgaaatacaatgaattttgcgaatttattcaggatcgctttgcgggccctggggaataataagatgcggggatttctgacgatgttggggatcattatcggtgtcgcttcggtgattaccatgctggctatcggtcagggatctaagcggagtatccgtgctcagatcgcggagatgggttctaatatgatcatgattcatccgggtgcggatatgcggggaggggtacggcaagatccggctgccatgcaaagtctgaaactggacgattatcaggcgattgtcgatgaaacccgttatgtttcggcttgttcgccatcggtgagtagcagtggacaagcgatctacggatccaataattatccgaccagtatctatgggataaatccggattatcttgaaattcgtaaatataccctggcggaaggggatatgtttacggaggaggatattctcggatcggcgaaagtctgtgtcgtcgggaaaacgatcgtggataatctgtttaccaatggggaaaatccggtggggcaaattatccgcttcggaaaaatacctttccgtattatcggagtcctgacatcgaaaggttataatacaatggggatggaccaggatgatcttatcttagcaccttatacaaccgtccagaaacgtatcctggccatcacccatttacaaagtatattctgttcggcgctttctgaagatcagaccgaactggcagaagaggagattgcgagtatcctgcgcaggaatcacaggctgaaagaatcggatgacgatgattttaacatccgttcccaacaagaactgagctcgatgatgaattccacaacggacatgatgacgatgttgttggcgtgtattgcggggatctctttactggtcggcggtatcgggattatgaacatcatgtatgtgtcggtaaccgaacgtacccgggaaatcggactgagaatgtctatcggagcgaaggggcgggatattctggcccagttcctgatcgaggcgattctgatcagtgtgaccggtggattgatcggtgtggtgttcggtatcggagcctcgtgggtggtcaagttggttgcgggatggccggtatatgtgcagctgtattctgttgtactgtcgtttgtggtctgtacggtgacgggaatcttcttcggttggtatccggcacagaaagcttctaatctcgatccgatcgaagcgatccggtatgagtagtttatttaccggttgatccggtaaataaacaaataaatctttatctttgtaatatgagtgacaagaataaaattttaaagtttctgattcaggtgatcggttggggattggtgttcggttttccccttttctttacgtggaaagagggtaattcgatgacctgggttaaatttctggggtatgtcggtgttcccatcgcttttattactgtattttatgccaattattttatttttatcgatcgcttgttgttccggaaaaggttattggtatttattattgtcaatttattcctttttgtgttgctgagcttatgtttacatggatggcaggagtattattttattcattttgtcaatgagggaccgaggcattcgagaccttttcctccccggagtgtttttattatccgggatggagtgatgatggctttggtggcggctctgagtgtcgctatccggatgaccgaaaactggtatatcctcgagcaagaaaaaaaagaattggaaaatgcccgttccgaagcggaattgcagaatctgaaaagccagttgaaccctcatttcctgttcaataccctcaataatatctattccctgatcgctatcgatcctgaccgggctcagtttgccgtccatgatctgagccggctgttgcggcatgtgttgtatgaagacaatcagaaattcgtatcactcgatcatgaattgaatttcatgaagagttatatcgagttgatgagtctgaggttgtcgggaaatgtagagttgaaggtcgatttgccggacgatgggaaaggtgtgctggtcgctccgttgttgtttatcactttgatcgaaaacgcttttaaacacggagtgagccccacggagccttcttttattcatatccgtttcagttggttggaaaattcgggaatctgctgttacattgaaaacagttattttcccaagaaagaaaccgaccggagcggatcggggatcggactggaaaatttaaaaaaacgactggatttattgtatcccggaaaatatgatttgcggacagaacgggagggaaacaaatttgtcgctcaattaaagatcggaagttgaaacggatggaactgaattgtttgatagtcgatgatgagcctttggctttggatttgatggagagttacgtcaagcggacaccttttttgaaattggttgcccgttgctcgaatgctttggaggtgttggaggtgttacgcgaagaggcggtggatctgatcttcctcgatatccagatgcctgaactgaatgggttggaattgtcccgggtgttggataaacagatcaaagtgatttttacaaccgccttcgaacagtatgctttggaaggtttccgggtggatgcgctggactatttattgaagccggtcagctatcctgaatttttaaaggccgctaacaaggcgttgaattggtttgagaaaacccgtgaaacgcagggggacagtctggaagaggattgtatttttgtaaaatcggattataaactggtcaaggtcgaattggctaaaatttgttatatcgagggtttgaaggattatgtaaaaatatacctcgaaggggtgacttcgcctatcgtttcgcttatcagtatgaaatcgcttgaagagatgttgccggcttctttttgccgggtacaccgttcttttatcgtcaatctgaatcggatcactgtcatcgagcgaaaccggatcgttttcggaaagacttatattccgatagcagattcctcgaaagataaatttatggaattcctcaataagcggacgatcaagtgaacggaattagggtttaaatgctaattttgtggccaaattacgtggtttatgtcacacttacctacattaattacggatctggctcttatactggcttctgccggattgatgaccctgatattcaagcgtctgaaacaaccgtcggtattggggtatatcgtggccggtattcttgccggaccgcatatcacgttaaccccgacggttatcgacagcggaaatattcagacctgggcagatatcggggtggtattcctgttgtttgctttgggattggaattcagttttaaaaagttaatgaaggtaggaggtcctgctatcatcgctgccctgactatcattgtgggtatggtggttttgggttttatcgtcggggtagcgatggggtggaaacagatggacagtatctttctgggaggtatgctggccatgtcgtcgacttcgattatctataaggctttcgaggatttgggattacggacacaacgttttacagggctggtgttcggaattttagtcatcgaggacctggtcgctatcgtcttgatggtgatgctttctacgatggctgtcagtaagaatttcgaagggatggaaatggtgtatagtatcgggaaactcttgttctttttgctgttgtggttcctgaccgggatttatattattcctacttttttcaggcgtacccgtttgctgatgggcgacgagaccttgctgatcgtctctctcggtttgtgtttcctgatggtagtgttcgctacagccgtcggtttctcttctgctttgggggctttcgtgatggggtctattctggccgagacgatcgaagcggaaaagattgaacgtctggtgaaaccggtgaaagatttgtttgccgcgatattctttgtttcagtggggatgatggtcgatccggggatgatcgcccaatatatctggccgattgtgattattacgcttaccgttttggtcggacagtcggtattcggtaccctgggagtggtattggccgggcaaccgctgaagacggctttgcagtcgggattttgtctgacccagatcggggagttcgcttttattattgccggtctgggtatgacgatgcaggtgaccagtaattttttgtacccgatcgtgatcgctgtagccgtcataacgacttttctgactccttatatgatccgggctgccgagccggcttatccctatgtcgaaaagcatttgccacggaaatggaagcgttttatcgagcattatacttccggtacccgggtggtcaatcatgaaagtaactggaagcgtttactgacctcgctgatccggataatggtaatttattcggtgatcatcatcgctattctgattctctcgtttcaatttctggtgcccttgatccggggatcgctgcccggtttttggggagggttgttgtgtgccgttctgattttgttattgatcgccccttttttgcgggctatcgtagccaagaaaaaccattcggccgaatttcaaaccctgtggaacgatggatattttagccgggcttatttggtgtcgctggtcatattccgtttcgtgatagcgatattgtatgtcatggtggtgatcgtgtcgctttttaaagcttctatcgctttgttactgggagtggcttgcgtgttggtggccgggatgttttattcccgttacctgaaaaagcagtctatccagatcgaacggcattttttgcggaatttccgggtaagagaggtgtatgcccggcatgccggaacacggctgcctccgaaatttgccggacatctgctgtcacgggatttacatatggccgattttataattccgtccgaatcgttgtgggccggatatacgttggccgatctggctttgggaagtcgcttcggggtgatggtcgtcgctgttttcaggggacagagttgtatcaatattccgggtggtaaagaacgcttgtttccacaagaccgggtacaggtgatcggtagtgacgagcagctggaacgttttgggagtaaactgcagtccatgaccttgccaccgatggattcagacctgacacagagcgaagtatgcctgaaacagtttgtggtcaccgaagattctccttttaacggaaagagtatccgggattccggtatccgggacaaatacaaatgtgtcgtagtcggtgtggaacggggagcggcctcgttaagaaatccggatgccgatacggtgttcgaagccggcgatctggtttgggtagtgggggaggaaatgaatgtatacgaactgatccattaatccgctttccggtcggtccgccataagaaaaagagggcgatcagtgtggccatcaggtcggcgaaggggatggccagccagatgcctgtcagtccccaccagtgtgaaaacagtcccagggccgggatcagaaataaaaattgacgggaaatattcatggtgatggctttaggtgcctgccggatcgactggaaatagctggtgacgatcagttgaaaccctaacaggggcatggcgagaaaagtataccgcagcccctcttcgctgagttgtagcagcgtcggatcggaagtaaaggctttgaccaaccagggagcgaatgcttcgccgattataaagccgcaacaggcgatcagacttcccgtacggatggctttccgcaggatatggagcgtcatctgccgatggcccgctgcataaaaataaccgatgacagactgcatgccctggcatattcccatgagcaacatagagacctggatggaataactactgatgatcccataggctccgatagcgtaatctcctccgttgttttccagatagcggttcataataatattcaccatacctgtggtgatgttcatgataaaagcggccataccgattccgacgatggaaactaagatcggaaaccggggagagaaacatttactttggagtttcaggatattggacggacttctgaaatgacggatcaccaatactgagctgatacacatagatagggctgttgcaatggctgctccttcaatgcccaggccgaaaccgaaaatgaagatcgggtccaggataatattggcaatcactcccgcgaagacgatggtcatcgatttgcgggaaaaaccggaggcacggatggcatggcaataggtgaaattcagattcgtcagcaagctggccgggatcagaatggacatgtatttacgggcataggggatagtttgcccgcttcctccgaagatatccaggataaagtccagatgatacagggagtaaacgatcagaatcgtagataacaggatattcaatacagtggcatttcccaggatacggcaggccagggaacggttgcctaaagaaatcgaagtggaaatgcgggcagcagctccgactccggtcagggtgccgacggtactcaacaaagaaacacaaggaagcgtcagggccagtccgcagatagccaaagcgccggctccctgcccgatgaatatccggtcgactatgttgtacaaggccatgaccaccatgttgaacatagccgggtaaacatagctcctgaagaacttgcggatgctttgtttttcttcggtataattgggaaacagatctgccaagatagatttcgtatgattaagtccacaaaagtagtgtaaattccataaaatgtcatacatttatctacaaactgattattctctctgcaagtccttgagcctttggaaaaaatgtcaggttttcatcggttccgtttggagaaatggtaactaatgttatttttgcaaaagaaaaatcaacattttattctatgacttacgattacgcacatctcatttgtttttctccgactcattcttctcatatgattggtgagaccgttttgcaaggtctgggaaccgggcacgtttcggaaaccgatctgacttatgaaaaaccggaggaaaacctcacgattcattccggaatcacggtgattgtcgttccggtatatgggggacgtatcgcagaaacagctttggagcggatggaaggcatttacggacaggattcacctgccgttgcggtggtcgtttatggtaaccgggattacgacgatgctttgctggaattgagggattggtgtgtggctcacgggtttgtgcctgttgccggcgctgcttttatcggtgaacattcttatagcagacccgaccggccgatagccggaggaaggccggataatccggatttacagaaagcgcgggctttcggtgagcaagtagggcggttattgaaccgttttcagactttggatgaagtggcccctatcgtggtaaaaggaaatttcccctataaagtaaaaggtcccaaaacccctcagactcctgagacggtagctgaattatgcacgcaatgcggattttgtatcgggatttgtccggtgcaggctattcgtttggaagaagagatcgtcagcgatgccgggcgttgtataaagtgttgtgcgtgtgtaaagcaatgtcctaatgaggcgcgtttgttcgagactccttataccgatctgttgtttaagaatttcagtacccgacgggaaccggaaatatttctatgacatgaaacgttttttattctggctggtggtaagttgttgtatcgtcggattcacagcttcggacaatccggatttttttacccgggtcgttcacaactttatggttttacgacaggccagaatgcaggaaaaggtttggttgcataccgaccgtccatcttatcatgccggagatacgatccggttccgggcttttctggtcgatgcggctacccaccggccttctccttatagccgtttcgtgtatgtcgatctggtcaaccgccgggattcggtgcttaaaaaggtgaagctggccttgatcgattctgtttttgccggctatttaaaggtaccggaggatattcgtcagggggaatattttttgcggagttattcttactggatgcagaatctgggggaagactatatttatgaaaagagaatccatttaatcaatccgtcggattcgaaggtgttgaccggagtcacttaccaggaagagcaaggagaaaaatatgcggttgtccggctgtcgaattcccggaaggaaccttaccggaagctggctgtcgattatcagttgatcggtaagggcaaagagggcaaagtacaccgccggcgaacggatgaatccggaaaggtcaggattaatataggggagttggcagatccttcggatgtccggattcgtttttcgaacggtattccttatgaattcagccggactattcatttgcctgccgatacgctcgattatgctgtgtcgttttttcctgaaggcggggagtttattccggggacaaggcaaaccgtcgcttttaaagcgatcggtaaagatgggttatctgtcgatgtggaaggctatctgtatgacgaacgggatagtatcgtggatattgtccggagtattcatcatggtatgggatggttgaacagtccgttggaaagtgggaaaacgtattacgtgaaggtgaagtctgctcagggactggaaaaaaaattttttctgcccgaagagaaccggtccggtatagctttgagtatccggcaaaatggccgtgaactgtcttatcgggtgatcggaggagaacaggcggtattgccggatagtctgtatctgatagcccatacccgggggcaattactagtgtgtactcccctggagggaaagttgcatggaaaactgtcggccgttaatttcccggagggaatattgcatttgtgtcttatggattatcgttgccggatctatagccaaaggttatgttttatccgtcatccggaaaaaacggatcttcgtatcggaacggatcgggacggatatatgagccgggaagcggtcgatgttgaacttattttaagcagtgattcgctgagggaggggcgtttttcgctgtctgtgacggacgatgctgccgtgttgcgcgattccctgcaggacaatattgtttctgaactgctgctgaattccgatctgaaagggtatatcgaagatccgggcttttatttccgggaggtaaaccgggctacggaccgttgtctggatcttttgctgctgacacagggatggactcgtttcgatgtcggtgctgtcgctgccggagagtttgaacaactcgattattatatggaacgcggacagactatttcggggagagtaaaaaacttctggggaaaagaggcaaaagatgcacaattgactttgctgtcgacaaatatgcagttcgatgtattgcaggcggatagcacagggcattttttggtggaaagaatttctttccccgagaataccggtttcattgtacaggccagaaatagtaaagggagaaaaggggtagaagtgattatcgattcggaagtatatctggcgcctgagattcaaattccgtatgaacgtcggcaagcgaacggagaagatgagttttataagcaattcggccgtgatttttattacgaccatggcgtgaaagtatatgtgctcgacgaagctttggtcaggaggactcctccgaaaaaaaattattctttctatgatgcttcggcccggtatatgctggattctgcccggttggctgctatgaaacagaaagatatgcgtacggcccttatggaaattcccggtgttatggtgatcggggaggaaatcacttaccggggcaaaaaactacatttggtattgaatgattttccggaagaattcgaccggattatgatgatgaatccggaacagtttttaagtatcagcctgttggatgaaagaatgtcttatttttattttgggcaggaagccccggatggagcgttgatatttacagaaaatttcgattaccggccggaacggttaaaacagagaggcttatctgtattcagaccgctagggtatcagaaaccggtagatttttatattccccgttacgatgtcgactcggtccgtctggccatggccgattcgacggatatacgtcccaccgtttactggaatcccaatattaaactgaaaacttccgaacctactcatgtccgcttttttatggatgatgcctgtgaccactgtacttttgtcctggaaggagtattgaatgatggtacggtgtgcagaaaggagaaaaagatcagtttgcggcgttaattcaattattcttaaaaaaaagaaaaaaagttctgctttctttcaccctttttttcttaaaatctgtttctctttacgaaaacaaaaacgttcgtttcttttggctggaatccgctacaagaaaatggacaaatgaaaattgaaaacggacaatgattggaagcccctgcttccattaaaaaacgaataaggaaagtggaatgaaaaataaaaacaagaacatactcactgattatcagaataatataataaatattccaagtactgtattaccttgccacttaaccaagcgttccgcaagggctaacgaatttataaactttatgaactttacaaactttcaactaatttaatcgaacgagtattgttgttgctggtcgcctcgcagttcttggggatttctcgcatggatgaacaggataatcgtgtcggctttcggtttttgcccctttttaggcgttttgcagatgaatttgtaatcgaaccacacatcggcctcgctttccttgatccgtgcctgtgcaggccttaaaaccttttggtcgatctgtgcgttcgagtaggaggccgggatctccaggtctttacagaattgctcgatcgagtaataatactcccgtctgtcccgttggctgcaaatgatcttgtagagccgcttggtgtaattgccccggagggttaaggcgatgttcttcccgtaccttgtaccgccgacacccgtaccgtagtagagcaggaaagggatcgcccaggggttgagcgtcagggctacccggtttgtgcctttgatgttgtgtaccgtcgttatcaccaccccgaacgtttccactgtctggtggatattgggatgcacccagcgaaaggaaaagtttttccgcatcatggcgatagcctctttcagaactttgctcttgttgttcttccccccggcttcgtcgcatttgatctcgacgacaggctggttaaagaggtccttaggcagttgtttttccctggtcatgtgttgctggatctggtcgcttatcagcgtcaggaggttttcttgccactcggtcacggagtactggccgaatgttacgttattcggctggattaacattacttcttcctccgtaggaggaatatagaggatgatgtcgttggtcgccataggcttttttttgagttcgggacaaagttaaagaaatgaaagataccaccaaaaaatacttggtattttttggtgtaacctttagtaaaatgggtatttattggagggggtaattttagtaaaatgagtattttcccccttcggattttagtaaaatgagtattttatgt

SEQ ID NO: 5843 - DNA, 1326 bp, Unknown
  gut microbiota DNA sequence
gtgaagacttcggagcagcaagagctggaatggaaccgaattttaaaccggacggtgcgaaaaaaacggcactctcggaaaatgtcgtggatgcgttatgccgctttgtttgtcttacctttgttggtaggcgggatcgtgtatttttcatgggatactacatgggaaacagggccggtagtaacttctccccgaattgttcccggtgtgtccatggccgagttggtattgccggatggaacgaaagtatggttggatcgagaagcgaatcgggctttggaagagggagtgaaaaatagcggagatacgctgaattacacggaagttgttgccagtggaatacaggattccagcgagatatatcatacattgcgtgttcctcgcgggggagaatatactttggtgttggctgacggaacaacggtttacctgaatgccgagtcggaattaaggttcccgaaacaattcaaaggaaagagccggaaagtgtatttggatggcgagggatattttgacgtgcggcgtaacgagaaacagccttttattgttgaggtgaaacaagtggaggtacgagtgttgggaacttcgttcgggattcgggcttatgcgaaagaggagaacgtgctgacgactttggtagagggacgagtgaacgtggaggcgggaggaaaacaagtggagttatctcccgggcaacaggctgattttagcaggggaaatgaccggttaaccgtgaccaaggtggatgtagaacagtatgtcagttggaaggatggccgcttggtatttgataacaagcctttggagtttatactggaggaattggggcgctggtattcgtttgacgtgttctacacgaacaaggaattgaaagggattccttattcgttgaacatcaagaaacatgaggatatcgctcatgtgctgaagtttatcgaacgaaccgggaaagtaaaatttgaaattaataagaatacgattatagtgaaataaaaaacaaagagcagtgctgcaaacactgccccttgtcaaactctttcaatcctgctgcaaacaggaattgaattattgtcgaatcttaattacaaagttatgaaaaaaaatctttatgcctgcatagacaggcatagaaaagtaatgaagcttattttaatgatgaaggcgacgtttattttatcggttttattcgcactgcaagtacatgccggggtttattctcaacaggtacggatgagtatggagttggagagggcatcgattaaacaaattattaacgagatcaaattacacacggaatatagtttcgtgtatagtgatgccgatttg

SEQ ID NO: 5844 - DNA, 6391 bp, Unknown
  gut microbiota DNA sequence
aacaaatattgaaggaaaggctgaaaggtttaatggccttctgccgggcaaaattcctgcaaccgcactatacgccgaaaagtacaagtttgagattattccgcaatatcgccatggcccgtttgaaatgagtcttcactgtagtttctgcaatatccatctgtgttgcaatttctttgatctttttcttctcgacaatatgaagtaatacgacttccttttgtttttcaggtaatgtatccagaatagttttcagacgttcatgaatatcttcatcgatttccggatcttcgataccggagaacaacatcgcttcgatgattttatcctgatgcttaccttgaatttccaaatcccgcaaataattcaggcaattattccggataataccgagcatataataaaatacaggttgtttttcatcatatctttccaggtgatcccacaaagacagaaaagcatcctgtaccaagtcttccgcttgtttccagtcgtaaagataacgcatggcataatgctgcaaaggcagaaacgaagttttatacaattcatgaaaagcatccagatctcttttttttatccgaagccctaaattacttttttctatgtattgctctattcttgccatgatattttcggcaaagataatttttttctattatacggtgtcctccatttttagatttcaagttaattatataaaaaagaaagcgtggtctatggaaaaaaattcgattcgttgggaaatattattgaaaggcgcccgcggaacattgtctcctgaagaagaaatcatttttcaaaagtggttggcccgggatatacgacataaagcctattacgagaaaatgtgccgggtttggtcgtcggacaatacaacttacgatttgcataccgatgtggctgaaatgatagtccgttttgacgattatgtccggaataagcggaaagtaaggcgccggaagatactgaggaatgtataccgttcggtagcctgcctgttgattctgctgactgtaggtggagggatcatgttgttgaagagagacaaacgggaaatggaaactgcaaaccggattgccggatctatcttgccgggccaggggaaagccattattcttctaccgaacggcgaaaaagtagatatcgcttcgttaagcgattctttatcctaccggacagcaggctttacggtcgaaaaagattccggaataatcagatatatgaaacaacagcaagcccggacagattatcacacgatcgttataccgataggaggagaatatcaggtgaagctgagcgacgggacgatggtatggttaaattcagattcgcggttgaaaattccgacggcctttgtgggaaacgaaagaagagtttttttatcgggagaagcttatttcgatgtagtgaaaaatgaccgtaaaccttttatcgtcgaaacagatttagggaatataaaagtttatggaacagagtttaatgtaaagcgttattccgccgacagacaattgaaagcaactctggtggaaggctccatcggattcagtaacgatcatgtagcagaactgaaacttcagcccggctatcagttaagccttaccgaagggaaaagtgaacctactgtggaaaaagtaaaggtatataatgaaatagcctggaaagatcaacgcttttgttttgaaaacagaaccctggaatcgatagcccgggatatggaaagatggtataatgtaaaaatcgttttcgaagatccggtattgcaacagctgcaattttcgggttctttgagccggtacggagagattgagactttactgcatttttttgaagaaagtgcagatattacatttgagatcgatcaccatacaattactgtaaaaagaaaataaaaaaatagagaatgcttctgcagtcggcaaactttagagcacattctctacacattcattcatattaacgaactaataacaaatgtatgaaaaaaaaagcacctgacaggtatttcttacctgaattcttaagaaaaatgttagcggcagtgtacttgctgttcattgtttcgttgtcttatgcggcggcagataatgacaccaaactgatcacatttgccgtgaaatctgaaaatttaaatgatgttctgattaaatttaaagatcagaccggtgtcgatattttatttaacaaacaacttatcgggaaccggaagtgtaatgattttgaagtcgtaaatcaacctgttgaggtgatactgagcaaaatccttgaaggtacagggtttgttttttcgaaagtggacggagtgtatgtcatcaaaaaaagtacagaaaaaatcgttcaaccggtagagcccctggcgatttccggcgtagtgaccgacacggatggagcacccttacccggagtgaccgttttggtaaaagggacttctttgggaagtgcaaccgatacagaagggaaatttaaattatcacttccttcacaagaaaatgtagtcctggtattttcgttcgtcggcatgcaaaccaaagaggtcccttataaaggcgaatccgaaataaaagtgaccctgcaaaccgacgtaactgaaatggaacaggttgtcgttaccggtatttttacccgtaaaacagagagttataccggtgctgcaacgaccataaagaaagaagaactacagaaaatggggaaccaaaatgttttacaatccctgaaaagtttagacccggcttttcatattatagaaaacaatgatttcggttcggatccgaacaaagccccccaaattcagttgcgtggccaacaatccatgcccgatataaaagggacttataatggtaaccccaatcagccgcttttcattttggacggtttcgaaacagatattacaacagtttacgatttggatatgaaccgggtagaaacgattgtattactgaaagatgccgcagccaaagcaatatacggagccaaagcggccaatggcgtagtggtcatcgaaacccgtcagccgaaagccgggaagatgaggatatcatacaaaggagatctgagcctgacgattcccgacctgacaggttataatctttgtgatgcacgtgaaaaatatgaagtagataaggcacacggccgttattcagatccctggttttgggaacaatatctgaaccagatcaaatcggaaatagaacgcggcgtggacacagattggctggcccaacctttacataccggtatcggacaccggcattctctgtatttggatggaggagacgaacatttacgctatggcgtagacttgctttataatgaaatcaagggggtgatgaaaggatcagaccggcaaacgttcacgggaggaattaccctggcttaccgttataaagacttattgttcagaaatcagttgagtaccactcttaaccgggccaatgattctccctatggttctttcgacgaatatgcaaaactgaatccctattggacaccttatgatgaaaacggggatttgaagcaaattgccggttctaccggaggaggaggcctggttggggtaacctgcgggaatccgctatggaatgcttctatcggtactaaaaatttcagtaaatataccagtattaccaataatttttatatcgaatggcaggctttgaccgcattgaagtttatcggacgtttggggttatcgaaaaccctcaatgcaagggaagacttttatccggcctcacataccagattcctgggatattcggaagataaattttttgaaaaaggcacatacagtaaactggagggagaaagcagcaatgtcaatatggatataacagccaattattccttattatcagataagcatcaactttttctgaacctgaactacaagatggagcaaagccgttctgaaaaagttactttcaccatggtcggttttccgaatgacaagaacggttttatcacttcgggtctcggattcaacaagagcgattatcctcctgtcggcaatgagtccatcagtcgtgaaataggtgttttgtccgctttaaactattcgtacgacgatcgttacctggccgatttgtcctggcgtgccagtgcgtcttcccgtttcggacaagataaacggtggggacagttctggtcggcaggtatcggatggaattttcataaagaacattttatggagcaggcagaatggctgaaacaatttaaactacgtgcctcaaccggttataccggagcccagaacttcaatccatatcaggctttagccatgttcagttacaatcagacccaagcctacgacaactggatcggttctcatttaatggccctgcccaacgatgacctgaaatggcagaaaacccaggattacaatatcggattcgacctgaatctctggggacgtcttatgattgtatacgattattatgtgcagcaaaccaaagatcagttactggccttgactgttcctccttctatgggatttaccagctatatggaaaatatcggaagtacggaaaataaaggaatggaactgaagttaaatgcccatttgttgtatgatgtggaaaacgaccgttatttaagtacttctttctctattgccaaaaatacgaataagttgaaaaaaatatcgaatgcgttgagaagctacaacgacgaggtcgataacgaaatattggatggaaataccaacagaccccagacccgttttatcgaaggttcgtctatgaatgctatctgggctgtccgctccctgggtatcgatccggctacaggagatgagattttcctgacaaaggatggagaaacaacgacagaatggaaagccgaggatcaggtggtttgtggcgacgccatgcccgaatgttcgggtactttcggaataaatatggattaccggggaattttcctgaacatgtctttttattatcaattcggcggtcagacttataaccagactctggtcgaccgggtcgagaatgccaatgtcggactgaatgtcgacaaacgaatttacaatgccgtttggaaaaaaccgggtgaccgggtcgatttttcttataatccttacaggctgactaaacccagttcccgttttgtacaggatttgaacgaattgcgtttgtcatctttaaacgtgggatatgatttccggcattgtgcattcctgaaaaagagccggttgcaacaattaaaggccagtttttatatggatgatgtgttccgggcttctacagtgaaaacagaacgcgggttgacttatccgttcgcccgtactttctcgttctctttacaagcaaccttttaatcgatgaatacaatgatacgaatacaaaaaacaaaaaatatactcggcattttgttcttttccctgttgagtgtttcctgtcaggaatggctggatgtcagtccgagtacggaagtaaaatatgacgatctgttcagttataagaacggttttaaagatcaattgaccggagtatataccgctttatgttcggaagaactttatggtgcccatctcggtttcggaatgttggacgctttgggacaacaatattactggaatcaggaagccggaacttattattacctgcatcgttttgtttatgacaatccgaaaagcgaagaagtgatcaacagcatctggaacaacatgtataatgcgatcgccaacgtcaatattctgttacagggcatcgaagaccaccggggaattcttgcagccgatgaagaaaaaatctacgaaggggaagcttatgcattacgtgcttttctgcatttcgatctgctccgtctgtttggcaaaagttatgtgagcggggccggtgaaaaagcgattccctatgtcagcaaaatttcgaaagaaataactccgttatctacggtttctgaagtccttgattccgtaattacggatttggaaaaagcagcctttctattagaaaacgatcctgtcagaaccggagaagcgacgacatcttttttgggaacccggagttttcatttcaactattacgcagtccgggctctgatggcacgtgtttatttgtataaaaacgataaggtcaatgccctgaaaaatgctacggaagtaatcctttcccacaaatatccgtgggtagagaaaggccaggtagcgacaacgacccgtgataaccgtgacggaatctttctgacggaatgtatcctcatgctgaacaatacgagattagaaacgataacagaaacatacctgaaaaaaagcgaaaacaatacggtgggtaatttacttgtcacccaggcagaagtgagggacgaaatttttgaaaatactttgtacggtggcagcgactggcggtatatctattatttcgaacctatcgactcttattatgtcaatact

SEQ ID NO: 5845 - DNA, 17160 bp, Unknown
  gut microbiota DNA sequence
agtattccggattgttttgcttcatatctaagaggaaaatgtagctgataaatttacactatcataattaccgggaaacagaaactcacaataattcccgataataaaaaataatagggtaaaaatacatattatccgaatgcctccagaagacttcagacaacaaatacactttagaagcattgttcggctcgaacaattcactccaatgtgtcctaaaagaaattctattatgaaaaaagagggtgacttcaccctctttttcctattatcccatatatcccttcatgattccccgcttactgttgcggacaaacatgataatttcatccctttctctggaagcaggcatttcagcttctattctttcgatagcatcggagttgttaagacccgattgataaagaatgcggtaaatatcctggatttcattaattttctcgtttgaaaactcccgacggcgcaaaccgatagaatttactccgacatatgaaagcggtaaacggccggcttttacataaggaggtacatcttttccaatcaaagagcctccctggatcatcacatgtttgccgatatgcacaaactgatggacagcggtcattcctcccagaatcgcaaaatcgtctacgaccacttcacccgccaactgacaggcattggtgatgatacaattattaccgatcttacagtcatgagcgatatgggcataagccataatcaaacaattatccccgatttcagtaactcccttagcagcagtgccccgattaacagtcacacattcgcggatagtcgtattatctccgatttttacaatggtcttttcacctctgaatttcaaatcctggggtacagcagcgatcactgctcccggaaaaattttacaattcttaccgatatgggcaccttccagaatagttacattcgatccgatccgcgtaccttcttctatcaccacatttttatcaatcgtcacaaagggttctatcaccacattatcagcaacctgagcttccggatgaacatatgctaacggttgtttcattcgtttattatttaatgaatactatattatctgaataaaaaatttcagcctgcaaatataattataagtttttggtttttgcgacctgagccataaattctccttcacaaaccagtttttttccaacataagcatatcccttcatctgcacgatacctctttttataggtgctgtagtgattaatttgaagaccagtgtgtcaccgggcactactttattccggaatttcaccccgtcgatcttcataaaataagtcgaatagttttcgggatcaggcactccactcagcaccaatataccaccacattgcgacatcgcttccacaatcaacacgcccggcatcaccggctcatcaggaaaatgtccgacaaaatgaggctcgttcatggtcacattcttgcaaccgatcaccatgttttcagttactttataaatcttatcgaccaataaaaacggtgggcggtgaggcagtaaagtacggatcttattgatgtccatcagcggagtggcatctaaatccagatctataggataagcatcgtctttctcttcagccagaatttctttatagatcatcttggccatagaagtatttgctttatgtccgggtctctcagcaatcacccggcctttgataaaacggccacataaagccagatcaccgataacgtccaataatttatgacgggcaggctcattatcgaaataaagttccagattattgagaacaccttctttaatctgaatattcccgtaaccgaacaatttagccaaacgatcgatttcgggctgatccatcttacggtcgacgataacgatcgcattactcaaatctcctcctttaatcagattattggccagcaacatttccacttcccgcagaaatacaaaagtacggcaaggggcgatctctttcgcaaaatcagtagaagcttccgaataagaagcgaactgcatcgccagataaggagaatcgtaagctaccatggtattgatagaatacgtatcatccggcaataatgtaatgcgggtatccgaagcttcgcaataaaattccatttttttctttactgaaaaataacggcgttctgcttgttgctcttcaatcccaactttttgaatctcttccacataataacgggcactcccatccaaaatcggaaattcttctcccgacagttcgatcacacagttatctataccgcaaccgtataaagcagccatagcatgctctaaagtatatactttggctccgtctttttgcagacaactggcgcgatctaccaattcaatatatttcgccagtgccggaatctcggttttctcttcgagatcgactctgacaattttatatccggtattttccgctgccggcttaaaggtagcacatacttctttacccgtatgcaaacctttgccttttaatgaaaattctccttttaatgtgttttgtttcactgacattattgttttgactttaatgtttgtatttctttttccaaatcccggagctgcccgtataattcaggtaattttctgaacagcacataacatttccgatatttcgaaacatcgaaagcaggtgctcccataaatacggatccttcggggacatcgttcgtaaccccggattgagcggcaagcatcgtcttgtcttcaatcctgagatgtccggcaataccgacctgtccgccgaacatacaatgcgcacccaccttagttgttccggcaatgccacactgagccgccatcaccgtattttctcccaccaccacattgtgagcgatctgaaccagattatccagttttacgcctttttttatacgggtagaccccatagttgcccggtcaatacaagcattggcaccaatctccacattatcttcaataacgacattaccaatctgtggcactttattataattatccccattgggagcaaaaccaaaaccatctgcgccgatcaccgttccggcatggatcgtacatccactaccgatcacacagccataatagatttttgccccggcatagatcgtcgtatgatcaccgatcacaacaccctcaccgatataaacctgaggatagatttttacatcattaccgattttcgcccctttaccgatataagcaaaagctcccacataaggagcttcaccgataaccgccccttcaccgacataagaaggttgttcgatacctgtcggccgggaacgcatactatcgtacatctgcaacaaagaagcgatcgcttcataagccgaaggcacccggattaaggtacagggtacctgctgtacaggagaaaagtcatgattcaccaaaacgacagaagcagctgtcgtataaatatagtgttcatatttgggatttgccagaaaggccaatgtattgggctttccttcttcaattttagatacattattaaccatcacttccccatccccttcaactacaccttttaataatgcagcaatatctttcgccttgaattccatatttcaaaaatttcggcaaacttacaaattttatttgtaactcataaaaatattacgaatatgtttcaattttaagaaaaatgaaacatattccccattgaatcaacctcataattaacaaccacttatctcctcttcaaactataaagatcagctatccggaggatataacaaaaacgaagcgacaccgatctatttaaaactacgattgaaatagttacaggagtttcaacgattacaaaggtttcagcagtcaagtttaaccgttgtaactaaaaacggtagtttaaaccagatttataaacttttgccctatttatcccgcgattattttgtattttaataattaagtcgtatatttgcagaggtttaaagccaaagagaggggacggatgtcccctctcttttgtatcaatcgcaaaacaaagagatgaaaacggaagaaatcaaacacctcatagaaccggttctgacagaacaccatttatttctggtcgaattgaagatttctaaagacaatgttatcgaagtctttgtcgatgctctggaaggagtcaacatacagacttgtatcgccgtcagccgggagatcgaatcttcactcaaccgggatgaagaggatttcgaattgaccgtatccagtgccggactaggttatcctttcaaagtggagcaacaatatcaaaaaaatctgggtaaaagtgtcgaaataaagctgaacgaccataccaaactaaatggtatattacttcgtttcaccccggaagaaattgtcatcgaacaggaagagaaaaaaatcatcgaaggaagcaaacggaaacaattggtaaaaacagagcggacaattgtccgaaacgacatcaaagaaatcaaagatatcgtgaaattttgaaccggaaaaacagataaaataaataatcaataaaaataaaagctaaaaagtcgaaatggaaaatattaatctgatagattcattcgctgaatttaaagaattcaaaaacatagaccgggccacattgatgagagtattggaagatattttcagaaatatgctgttgaaaagatatggtacggatgaaaattttgacatcatcatcaacatcgacaaaggtgacctcgaaatctggcggaatcgtactgttgtagaagatgacaaactggaaaatcccaatagcgagattactttaaccgaagcgaaaaaaatcgatgaagattatgaactcggagaagaagttacggatgaagtaaaattcaaagacttcggccgccgttctgtattagctttacggcagaatctctccgcccgtattctggaattggagaaagacaatgtttacaataaatataaggataaagtcggacaaatcattttgggtgaagtctatcaggtatggaaaaaagaaatgctggtcctggatgacgaaggcaatgaattgattttacccaaacaggaacaaatcccgacagactttttcaaaaaaggagattccatcaaagccgtggtcattcgggtagaaatgcggaattccaatccttacattatcttatcgagaacttctccggtattcctggaaagattatttgaaaacgaagtacctgaaattttcgacggtctgatcacgatcaagaacgtagtccgggtaccgggagagagagccaaagttgccgtagaatcctacgacgaccgtatcgatccggtgggtgcttgtgtgggtatgaaaggttcgagaatacatggtattgtcagagagttgagaaatgaaaatatcgatgtgatcaattataccaataatttacaactctacatcactcgtgctttaaatccggctaagatcaaaaatatcgaaatcgacgaagcccataaaaaagcaaatgtctacctcgatccggaagaagtatcactggctatcggtaaaggtggattgaacatcaaattggccagtcagctgaccggttacgatatcgacgtatatcgcgaactcgatcaagcccaggaagaagatgtcaatctggatgaattcgccgatgaaatcgaaggttgggtgatcgacgaactgaaacgtgtcggctgtgacactgccaagagtgtattagaactcagcgagtcagaactggaaagccggacagaccttgaaattgagaccatacgtgaggttctcaatattttaaaagcagaatttgaataattctgtattaacgcttgtaaatttgtaatctcaatatggcagtaagattaagtaaaatagcccgagaatttaacgtaggtttatctactattgtagagttcctgcacagtaaggggatcaaaatatcctcagatccgaatgcaaagttaacggatgaagattatgctttggttgcaaaagaattttcatctgacagccaggtaaaaaaagagtcctctctggttgatctgaaaaataccagaaagaaaaaagagactgtcacaatagacaacgctggcaacatctcttcaggaaacgaagatacagaagaagaggaagaggaattcatttcgattaaagatgaagtgagattcgaaaataaaattaagattgtcgatcatatcgatctgaatccggagaaaaaaacacaaccggaaccggtagaagcaaaggttgaacaaccgaaaagagaaactcaggaagaaataaccgaaaaagtggaagaaccgaaagtaacccgggttgaagtagaagaaactcaggaagaagaaagaaaagtaacaccagaagtggagcccgaaatttccgtacaaatggaagagtcttccgaatccactcctttcaaagtagcacaacctgcgctgaaagatgtaaaagtagtgggtacaatcgacctggacgccatcaaccaacgtaccagacctccgaaaaaaagtaaacaggaacgggaacgggatcgccgtgaacagaaaaaagccaacaagcctttcgtatcggccgctaaaaccgaacagccggtagcaagcccatcgacagatatcgttaataagggagaagaggatgcagatatccgtaaaaaacggaaaagaattcatcgtcaggatgaaaaaattcaggtggaagcagctaccattccggccaaaaatgccaaaattgaagaaaataagcggaaactgaaaaagctgaagaaaaagaaaaacgaaaagactgaaatctccgatgaagatatcgacaagcaaatcaaagatacttttgcccgcttaggaagcaaaggaaaatcacagactgcaaaacaccgtcgggataagcgggatgctgcacagcaaaagttacaggccgaactggaacaagaagaaaaggaaaagagcattctgaaactaacggaattcgtgacggtagccgaattggcaaccatgatgaatattagtgtgacagaggttatctctgcttgtatgtcgctcggactttttgtatctatcaaccaacgcttggatgcagaaacgatcaatattgttgccgatgaattcggctattcggttgaatttgtaagcattgaaattcaggaagccatcgacgaagaggaagaagattccgaagagaacctgttgccacgtccgccgattgtcactgttatggggcacgtcgaccatggtaaaacctctttattggatagtattcgtaaaaccaatgtcatcgcaggtgaagccggtggtatcacacagcatatcggagcttacaacgtaaaattgagtgacggccggacgatcactttcctggatactccggggcacgaagcatttacagcgatgcgtgcccgtggtgctcaagtgaccgatatcgctatcatcatcgtcgctgccgacgataacgtcatgcctcaaaccatcgaggcgatcaaccacgccagtgctgcgggagtacctattgtgtttgccatcaacaaaatagataaaccgggagcgaatccggacaaaatccgggaagaactggccaatatgaattatctggtggaagaatggggaggaaaataccaatgtcaggaaatcgcagctaagaaaggcttaaatatcgaagagttgctggagaaggtattgttagaagccgaacttctggatatgaaagccaatcctcataagaaagctaccggttctatcatcgaatcgtctttggacaaaggacgtggatatgtagctacagtgctcgtacaatccggaacgcttaaagtaggtgatattgtgcttgccggccagtatttcggacacgtcaaagccatgttcaacgaacggggagaaaaaatggagaaggcaggtccttccgaaccggctttaatattaggtttgaacggtgctccacaggcaggtgacaaattcaatgtaatggggaacgagaaagaagcgcggcaacttgccaataaacgggaacagctccagcgtgaacaaggtctgcgtactcagaaacacatcactctggacgaaatcggacgccgtatcgctatcggtaatttccaggaattgaatgtgattgttaaaggcgacgtcgacggttctatcgaagcgttgtccgattcactgatcaagctgtctacagatgagatccaggtgaacatcattcacaaagctgtcggacagattacagaaggagatgtactactggctgcagcctcgaatgcaatcatcgtcgggttccaggtacgtccgtctatgggcgcccgtaaactggctgaaaaagaacagatagatatccggctttattctgtcatctaccaggcgatcgaagaattgaaatcagctatggaaggtatgctttctccggaaatcaaagaagaaatcattgcaacggtcgaagttttggaaaccttcaaaatctccaaagtgggtaccatcgccggttgtatcgtccgtgacggcaagatcacccgtacagcgaaaatccgggttatccgcgaaggtatcgttatttacaccggtgttttgggttctttgaaacgttttaaggacgatgtaaaggaagtaaccaaaggattcgaatgtggtctgaatatcgagaactacaacgacatccgggtcggagacatgatcgaaggataccaggaagtggaagtgaaaaaaacactttaaatatatcggacgagcgacaaacgatttccatattgcttgccgctctctattttgttaatcattaattaaggaacatttaacacctgtctaacactgcttatcagggattatttctttactttgtgatagataaaaaacaaaacaattaatttttgaaaaaatgaagaagatattggttataatggtactgttcgcagcatttacaacaggactgacagctcaggttttaaaacccgtaaaatggcaaatcacccagaaaaaagtgagtgacggagtatatgatatcatctgcaaagctactgtagacggcggatggcatttatacgacacgaaacttcccgaaggcggacctctgccaaccaccttcaatatggatgaagatgaaaccagcggtatcgaactggtaggtgaattcaaagcgacagagaaagctctgaccgaacatagcgaagcgttcgatatggatctgaaatattttatcaatgccgctacttttgttcaacgggtcaaggtaaccagcgcaaaagctaaattagtgggttatgtagaatatatgtcttgctccggcggacaatgtactcctcctgcagaagcagatttcagttttgatttaacaaaataagtacaggattccgattcctgctataaaaagagacaaagatccaaccgatatttttgtctctttttttcattttatccgcttatatagtatgaaacatttcctgttggtttttctgatttcaggatatatcccggctttagcccaaccctggttataccgggataatagtccggaattggatagcctgagcttttttttcttcggagacgtcatgcaacacgaacctcagatcagcggggcctggaatgcagagacagctgattacgactatctgccctgttttcagtacatcactccttattggcaaaaagccgattatgtcatcgccaatctggaaacgactttatccgacagggggtatagtggttatcctcaattttgtgctccctggcaacttgcccgtgatttaaaagcatgtggagtcgacatcctgaccaccaataacaatcattcctgcgacaaaggacatcgcggtatagctaaaaccatatactatctggattccctgcaattcccccataccggtacctttaccgatacaacggcttggcttacccgttctcccctttatattcgccagggaaaattcaagattgccctgatcagttatacttatgggactaacggtattccggtaacccacggccaggtcgtttccatgatcgatacctttcatatggcccgccaaatcgaaaaggcccttttagacacggttaccaatatcattgcagtcatgcactggggtgaagagtattttacagctccgaatgcaactcaaaaaaaactttcttcctggttgcacgaacggggagccgacatcgtcatcggttcacacccacacgtcatccaaccgataagctatattcaacacgaacaggatacactgggtgttactgtcttctctttaggaaattttgtatccaatcaaagtaaacgatatacaaacggaggcttgggagttcacctcactctttaccgccaaaacgggaaaacccgttaccggatgcaaaccctcagtaactatgtctatcgtccgctggaagatgggaaaagacgttattatgtcatccccgaaccggaagcccaccgaatcctcgccagccaggattctttgctctatacccgattttttcaggataccgattcgattatcggtcatatagcaccgaaattccaattagaataggtgctcaccgaaatcgactccgcaaatatttttaccggaaggacttattttatgtaataaaatttgtaatttcgtagagttaaaaaataataacttttaaattatgaaaattgcagtaattgcacatgatggaaaaaaagccgaaatggtagctttcctgaacagacacatggactttctgaaatccgtaggtacagaaatcgtagctaccggaactacagggaaacatgcacaggatgcaggtttggaagttgaacgcttactatcagggccgttgggaggtgatgctcagattgccgcattggtagctgaacaccaaattgcgatggtaattttctttcgggatccgctgggtaaacacccacacgaaccggatgtacaaatgttaatgcgggtatgtgacgttcacaacgtacctatcgcgaccaatccagccagcgctgaaatgatgatccggggattcctcgatatgcatcagaagtaaagcccggaccccggactttactaatggaaacgtctttatcaatcggcagataaagccgttattcagagaaatctatgaaaacctttgcacaaaccattctcatctattatatttgtgcaaaatataagattcggatgatcaggaaatttacagcaataacgcttctttctatggccagcatagtgatgcttgcttttgttgtatttccacatcatcatcacaacgaatatatctgtttcgcaaccgctcactgccaggatgaaggagaaaacgaagagcacagtcatgacacaggcagtagcaatcatcggtgtgtaaaaaatctttttcaaacccagatcaaccggggccaaaatgtagaacatcagagcgaagaaggagcctatcatcattttagcctctcgttgtttcttgtttccaatattcttgaattcttatcttctgaagcagagcaacaatgtgattccgatagttattatcaggaaaaacttcatacagcctgttatatatcagccttggccggccgagcctctccttttacagtatagttttctaaatatcagggagatacccttctgataaaccggacagaattttatcgtaccgataaagcttagttcataaaatttataaagtcgatacccctgcgggcgttttatttacggccgcagaacgatcgttagaaatgaggtttggtataatcctccgaagaatacgatccactttataaacttcagacagtgaaaacacaactttatcagctttaccaataagaattaaccgaattaaatatccataaataaaacgatatgagactatttattatagccctaactattttatcgatgtgtttttacggatgtaaaaatactcaaaaatcctctcatgaacacgagacagccgaggagcatgcagctcataaccacgaccatgaacacgaaaatcacgaccatgaacacgaaggtcacaaccatgaagaagaggaacatgagaacggcgaaggacatagtgatgagattatcttcacaaaagcacaggcagccaaaacagattttgaagtgaaagaaatacagcccggaaccttccaccagattatcaaaacgacaggtcaggtgcttccggctcccggagatgaatcgatcatcgtagccaccaacaacggggttatttcctatgctaacaataaccaggcggaaggaagtatggtaaaacaaggacaacctcttttttacattacttcgaagcacatgggcgaaggagattattatacccgtatccatgccaattacgaaaaagccaaagccgaatacgaacgagctgaaaaattagtaaaagatcagattgtttctcaaaaagaatttgaaaatgcccgcttaaattatcagaacgccaaaaccgcttatgaagctatttcgggtaaacaatcggccaaaggtgtcgggatcaccactccattaaccggttatctcaaaaacatctctgtcaaagacggcgaatatgttacagcaggtcaggctatagccactgtatcgcaaaataaaaaactggttttacgtgcagacgtatctgaaaaatactataactcgctgaattccatcaataatgccaactttaaaactccttacgataatcgcgtatatgctttacctgatttatccgggaaattactatccgtcggtaaggctgccggaacaaattcattttttatcccggtaaccttcgaattcgacaaccgtggtgatatcattccgggttcattcgtcgaaatatacctgctctcttatcccatggagaatgtactgagccttccggtatcggccttaacgaacgaaatgggtaatttttatgtataccgccaactcgatgaagaaggttaccaaaagcaagaagtcacactcggagccaacaatggcaaggaagttcaggtattatcaggcttaactccgggagaccggatcgttacccgtggagcttatcaggtgaaaatggcttcagcctctgctgctattccgggtcatacccacgaacattaaaatggagtaactatgctaaataaaatcatacaatattcattacacaaccgtttgttggtaatgatcgcagcagtagccctgctgatttggggaagcattacagcccacaacatggaagtggatgtttttccagacctgaatgctccgaccgtagtggtgatgaccgaagctcaagggatggcaccggaagaagtagaacggctggtgaccttcccggtggaaaccgctgtcaacggagccaccgacgtcagacgtgtacgttcgtcttctaccacaggtttctcggtcgtatgggttgaattcgaatggggtacgaatatttatacagcccggcagattgtatcggaaaagctggcaaccctgggagaagcacttcctgataatgtcggtactcccaccctgggcccccaatcttcgatcctgggtgaaatgatgattatcggtctgactgccgacagtacttctttacaggatttacgtacaatagccgattggaccatccgaccgcgcttactctcgaccggaggagttgcccaagtggccgttatcggaggcgacatcaaagagtatcagatattgctcgatccggcccgtatgaagtattacaatatcggattggacgaggtcctgccggtagtagaaaatatgaaccaaaatgccaccggaggtatcctttacgaatacggaaatgaatatatcatacagggagttatggcaaccacccgggtcgaggaaataggtaaagccgtcattaaaaccgtcgacgattttcctatcacattggctgatattgcaaacgttcagatcggagctaaaacacctaaattaggagttgcttcagaaaaaggtaaaccggcagtgctggttaccgtcaccaaacaacccggcaccaacaccctcgaactaaccgacaaactggatgcctctatccaggaacttcgtaaaactttaccggaagacgtcgaggtttcgacagacattttcaggcaatcccgttttatcaacagttcgatccacaacatccaggaagctttactggaaggagctgtttttgtgattgtggtgttgttctttttcctgatgaatttccggaccacgatcatttccctcgtcgctcttcctttgtctatgttgatggcaatcctggtgatgcatgctttggggttgacaatcaatactatgagtttaggaggtttggctattgctatcggctcgttggtcgacgatgcgattgtggatgtggaaaatgtatataaacgcttacgcgaaaaccgattcaaacccgccacagaacgacgcccgaccatcgaaattgttttcgaaggttcgaaagaagtccggatgcctatcctgaactctacgttgatcatcgtggcttgttttcttcctttatttttcctttcgggcatggaaggcagaatgctgataccgctgggtattgctttcgttgtcgccctgtttgcttcgaccgtcatcgctttgacactgactccggtattatgtagttatatgctgactaccgaaaaagcattgaaaaaaagcgaaaaggagccatttatctcccgcagcttaaaaaaggtataccgaaaatcgttaaactgggcactgcattacaaaaaaatagtgatcggtacagctgccaccctactggttttatcgctgatcatcctattcagtttaggacgtagcttcttgcctcctttcaacgaaggttcgctgaccatcaatatcagtaccatgccgggtatctcacttgaagagtcggaccgtatgggtggattagccgaaaagattctcctggggattccggaaattcaaactgtggcacgtaagacaggacgtgccgagctagatgaacatgcactgggagtaaatacctccgaaatcgaagcacctttcgaattacaagaccgggacagagatgaatttctggctgatgtacgaaaacaattgggtgaactgaaaggggccaatatcgaaatcggtcaaccgatctcccaccgtatcgacgccatgctttccggaacgaaagccaacattgcgatcaaactattcggtaatgacctgaataaactgtatagcttgggaagtgaaatcaagaattctatacaaggaatcgacggtattgcggacctgactctggaacaacagatcgaacgtcctcagttacagatttttcctaaacgggacatgttggccaggtatggtattactctaccggaattttccgaatttatcaatgtcgctctggccgggaaagtagtttcacaagtgaatgaaggtggaaaaatcttcgacctgaccattaaagtagccgaccatgaccgggatagcatggaagaaatcggtgaactcatgctggatgccgatggacgtaaagtgcccctgcattatgtagcggaagtacttcccctatccgggcccaacaccatcagccgggagaatgtacaacgtaagatcgtcgtttctgccaatgttgccggcagggatttgaaaggcgtagtcaacgatatccaaaaaacagtagacgaacaaatctctctaccggaaggttatcacatcgagtatggcggacagttcgaaagtgaagcagctgcttcccgaactttattcctgacttccctgatctccatcctactgatattcttgattttgtatcatgaattccggagtttacctttatccggtatcatcatgttgaatctgcccttagccatcatcggaggagtgatcagtatctggtttacctcaggggtaatcagtatcccttctatcatcggattcatttccctattcggtatcgctacccgtaacggaatactactggtatcccactacaatcatttacgggaagaaggtctgaatctgagggaaagtattattcaaggttctttggaccggctcaatccgattctgatgacagccttaacctctgcactggctttaattccgctggctgtgggtggggatcttccgggaaatgaaatccaaagccctatggcacaggtgatattaggaggattattaagctccactctgctaaacggatttgtagtccctatcgtatattttctgttgaaccggaaaaaagaagcatcaatagtaacccctcaggagatacaagccgatttataaatttacaattcatcattatgaaaaaatacatatacatcctttgcctgtctctgatcgtcactctccctgtattttcccaatcgggaatcaaggaagtgcttaaaaatatcgaggtaaacaatcccaccttacaagcaggcatgcaactaaaccaagcacaaaagctggaagcacggacggggatttttttacccaacccgacagtcgaattaaatcaattgtgggccgaccgtagtgtaggcggaaatgccaacgaattagccgtcgtacagagtttcgacttccctacggtctatgccaataaaaacaaattggccaaattgaaatctgcaacttccgatctccaatatgcagccacccgtcaggagatcttactgacagcacaacagacctgccaggagatcatatacttacgcaaacaaaaacagttattggaccaacggctgaaaaatgcggaaaaactagcagaattgtatcgtcaacgttttgcgaatggtgatgccaaccgattagaatacaacaaaattcaattagaaaagattaatgccaataatgccagccgactcaataactcggctttgcgggctcaattggagaaattacaggcactgaacggtggccaccccctcgatttcgaagtaacggactacccacagactcaggttctaccggactattccagtctggaatcggagtatctggccgctgatcccacattaaaaagtctacgcagcgaatccgaatccgcccgacgggagatcaaagtaaaccgggccctgactttacctaaattcgatctgggttaccgtcgtaacgggggtagtgaatcaaagatgaacggtttcaaaatcggcctttcgattccgctttgggaaaatagaaacacggttaaacaagcaaaagcacaagccgaatatacggttaccaatatcttagccaatcaacagaccctgaaagctaccctccgggaactatacctgcaagccgaagctttggcaaactcccggaatgaatatgcagaggctctttccagccaacggaccgacgaattactcaataaggctctcgaaaccgggcagatatccatgatc

SEQ ID NO: 5846 - DNA, 7437 bp, Unknown
  gut microbiota DNA sequence
ctgagttaatagagttgctgagttaatagagttgctgagttaatagagttgctgagttaatagagttgttgagttaatagagttgttgagttaatagagttaaaggggaacaaaagttacagaggatatttacaactaaatagttgtagatcatgacattagaagctcaataacttatcagttcaacaacttatcagttcaacaacttatcagttcaacaacttatcaactcaacaacttatcaactcaataacttatcaactcaataactcaatcaactcaattaactcagcaactcagtaactcagtaactcagcaactctattaccccagcaactctattcctgttccacgatttgtccggtgtaggagattgggctgcgtttgaggctgttgatgaagaggtaacaagtgccgtcgtgtctgatatctatgctgagtttataagtatcgttttttccgacgacgctgaattgatagaaaatactctggcgtcttccttttccgcgtgtttgtcgggtcaaatcctgcatcgtattactgaaaacgattcctctgtttccggtttgggggatagaatagccgcttccgaaatacggtagatatccggcagcgatgctgtcgcggataattacgaatgcactgtcttgagcgatccgaatattttggtcactgtagggagtggttggttgtagataaaaagtgtgatgagtcgttgcaatcgtatattgcattttgaaccgattgctgtcgactttttcttttataatgccgaaattggtgattcgttggttgttttgggctgtcggggagagaaagataccccagaagagcaaaccggtgaaaaagaattttaccataccataaagatttatttctcagttgtacggtaattccgatatcgggttgcactgtccggggaacgatttttacgactttcctgtttcgtctttaaccggactgacggtcccggaataggaaatttgtgcccgattgttgctgttcaggtttaccgagcaattcccacctcctgaaatttccatggaaatctggtatgtatcgtttttggcggtgatagaaaaacggtaaatcaggatttttcttttctttttgtgttcgattttcagggattggtccttcatcaccccgtcgaattcaatgcctccgccttcaccgtagggaagggaataagcccggccgaaaaagggaagggtacctttagcgaccgagtcggtaataacgaacttacctctgggattgaaacggctgagatcttggccatcctggggatatacccggttgagttcgaattggaaatgattgctttcaatcaattgccgggtctgctgaaattcttgttccagttgcgctgctttttctgccttggtgggtttctgtgcggaaacagagagggacagaatagagaataataacgaaataaaaataagttttttcatggtcttattatttagttgtttgataattagaaaacaaaaactataccaaacgaatcatgtatttccatcttccggccgatctcctgtcccttaccgggtaggttaaggttgtccggcagtgacgatatacatctcttcagggttccaatatttgtcggccaattccagtatcgcttcgggggtgcattgtctgattttttcaatgatcccgatataaaagctattgtccaaaccgtaattcagtttatgttttaaggaatcgctttgagcgaataccccgtctaattcacggagtaaatcgccgtataaataatttttcaccagattcagttcttcggcaggcactgtttctgtccggagtttgtgtatttctttaaagatctcctcgatcgttgcttctgtatattcgttattgacttcggtggtgatactccaataacttctttggggcagagagacattgaaagagccgatcccgtaagtatatcctttttcttcccggatattcgacatcaggcgtgagccgaaataaccacccaaaattgtgttcaaaagcatataaccggcataatcgtcgtctgtcagccgtacactggatttaccgatgcggatgctggattggacacagttttctttggatacatgataacggcctggttgagctgcatgaaacggtagtttttttgaaatattcccgggggacggaatgggaagatttccgaataaacgggttaccgtatttaacagtccttcgtttacatgaccacaaataaaaatccggaattgtccggcttgataataccggtgataaaaatcgcggatgagggaaacggtgattcgttgataatcactttcctcgatccggttggcatagggatgatcttccccgaagatcagggcggaaaatttttgtttggccagatagctggttttttccaggttgaccaagtattcctggcgtttattcgtcaggtatatctcgagttctttgtccggaatattactttctgtaatgatttctgccagcatggtcaatgtttctgtggcatatttattcagggaaagcaggcttacttcggttttattcaggccacaactgaaatccacataggccccgtaatagtcgaactggtcggcgattgcttctgctgaatggtgcaatgtgccttcgttcagcatattgactgtagtcgaggcaaccaggggttgggattgataatagattccggcctcgaagacaacgtcgattttaaaaacttcctgtaatggatcgttcaggtaaaagatttctgttccgttggccaatatcaggcattggtagggcaggagactcggagtggatagcggagttattcttggggctatatttcggttgggcatcataggcttggttttagattatctttttctgtcgtgaaaacagttattttttcagataccaaagggtagaacaattttcttttcggaatagttccctggcagtagttttgattttgtcgaccgtaatatcgttataacgtttaccttctgtattgatcaggtcgacgtctcctagaaactcgaaaaaggctagattgctggctttactttgatagctgatttcactataagagatgcgggcttctgttttatggatgattttttccacctcccgaacggtaatttcatcctttataaaatgctcgatttcctggtttattgccgcttctgcctgacggatgtcgataccttcggatagtttaccactgaaaatgaataatcccggatcccggtcgcccgagacataggcgtctataccggaaaataaacgttggtttttgatcaggttgacgtagagacgtgaagattgcccgttggataaaatgtcggagatgatatcacaggcataaaaatcgtcgctatcccgtccacccatgtgaaataccttataaatagcgtctgccggcacattgttatccgggacgatcgaacggcgttcctctgtttgccggggttcggcagggatgtgactaaccggtccgtgggctggtggaatgtcgccgaaccatttttttaccaactctaaagccttgtcttctgcgatattaccgcagatgctgacgattgcgttgtcgggtgcatagaattgccggaaaaaagccccgacatcttccagagttgccctttctatatgttccggcgatactccgatcgtagcccatcgataagggtgcactttgtaagccaggggacgcagcttcagccataggtctccgtaaggattattcagatagcgttgtttaaattcttcgataacgacgtgtttttgtatatccagggaagatggcgaaaggttcaaacctgccatacggtcggattccagccaaagagctgtctcgatattcgaggcaggtatggtgatgtaatagttggtcaggtcattggtcgtgtaggcattgctttctcctccggccagctgcacatgtttgtcatagtcttcgatatgagtggaaccgccgaacatcaggtgttcgaataaatgggcgaaaccggttttgtccgcttgttcattgcgtgaaccgaccttataaagtacgtttaccgagacgaaaggggtacttttgtcggtatggcaaataactgtcaggccattatcgagaatatgacgggaaaattggatcatagtatatcattatttttattttgccggaagtcagaaggagactgaattgctgcatcggtttatactttggttataatcccggagcaagtcctgcatgatctcggcaacactttcttcgcccttgagcatcgaagcgatttgtcctatttcgagttcgccttctgccagattgccttcgaagatcccttgtttagctcttcctttgcccagcagctctttcagggtatcggagtctgctccttggtcttccagtgttttgacttgttcgtaaaattcatttttaatcaatcgggttggggctatttttttcagggccagcatcgtccctccttcaggagttttccacacctgctgtttgaaattcggatgagcggacgattcggtagctacggcgaaccggcttccgatctgtaccccttcggctcccaatatcatggcggccagcattgctttaccggaagcgataccccctgcagcgatcagcggaaggcggcaatgagcagcgacgttcgggatcagagtcagcgtactggtttcttcccgtccgttatgtcctcctgcttcgaagccttcggcaactatggcatcacatccggcttcttcacatttttgagcgaatgaggcgctgctgacgacgtgaacgaccgtcataccgtgagatttcaaaaaagaagtccattttttagggctaccggcagaagtgaacacgatctttacctgttcgtccgctagtattcccatgagtttatcgatttccggataaagtaacggcacatttaccccccatgggcggtcagtggcctctttcatcttgcggatatgctccgttaacgtatcgcaatgcatcgagccggcgcctaataaaccgagacctccgttattacttacggccgaagccagccgccagccactgcaccataccattcctccctggatgatgggatattcgataccgaataattgagtgattctattcatcatttacttgttttgcaactattcaacaaatttacaaaaaataacgggaattacatcgtaattcccgttatctgatttatcatttcttatttctaatctttcttgatattgggtaattccaaaccatatccttttttcttgtcctctgcttttaaccacagacccaggaacagtgcgaatacgccgaggctggcgaaaatcagcatcggaacggtgtagttatattgcaacggatcttcgataccggggtttactgctgccaatactttcccgatgatcatcgggaaagcgaataaaccgatattctgaatccagaatatcacggcataagcagaacccaatagacggttgtctaccaatttgggaacactgggccataacgcagccggtaccagagagaaagaaattcctaacagcacgatagaggtgaaagcgacgatcggcccggcaatactgccttttaaagccggtaaggccagggcaaaagccagatgacagataatcatcagaaaagctccgtagattaacatcgaagcacctttccctttacgatccaggaagttacctaatagcggtgtaatggctgccgctcctaagggaaatacagaaaagatcatacctgctttttcggctgtaaaatccagattacattgcaacatattgatggcatatttctggaatgggaaaatcgcggaataatataacacgcacagtaaggcgacgatccagaatactttactggaaaaaatcaatcccaggtccttgatttggaagggttcttccggttcttctccactttctcccatttgtttttccagttttttgtccatgacaaaatagacacagaaagcaataaaaccgatgagcaataggatgacacagaataaaacagagcgggacacatcttttacacctcccatattggcgattgccggagagatcagtacggctgctgcaacaccgatacgggcgatagccatttccagtcccatcgccaaagccatttctttacctttaaaccatttgacgatacctttcgatacggttatacctgccatttctaccccacaaccgaagatcataaagcctaaagcagccattttagccgaagaaggcatgccttcatagaaagggaagaaattccagaaatttttgagatattcatcggtagcccctccggtgaaaccgtcggatacggcccagtatttgaggtaagcaccgattaccatcaaggcgccggatagtaaggcggtgttacgtactccgattttatccaggataataccggcaaagatcaggaagaaaacaaatacattcaaaaaggtttcacttccctgataggtcccgtaggctgccgggtcccagccttttgtttcttgcagcatggcctgtagaggtgataagatgtctacgaacatgtaggcaaagaacatcgccgaggctaataataccaaggctgtccagcgcatagcaggagagtctttcaaaagtttgtaaattttttcagtcatagttttttatttagattaaaatataatccccacgatgccgccaaagttataagaaataaataaaaaagagccgtttttaacgactctttttggcttgcaaacgatataaatttgatattttccggtaaatagcgctgccgggttaatataatttacattgttttgttaaattcttaataattattttttttcggttcgaaataagcctgaggatgttcgcatgccgggcatttcatcggagctttcttgcctttcaatacgtatccgcaattacggcattgccattcgatctcttcatcccgttcgaaaactttaccggtttctacccgttccagtagtttgcggtagcgagcttcgtgttcggcttcgacctttgcaatctgacggaaagtattggcgatttgcgggaaaccttcttcctgtgctatttgagcaaattccgggtacagatctgcccattcttcattctctccatcggcggctgctttcagattttcagctgtcgtactgattataccggccggataactggcggtaatttctaccattcccccttcgaggtatttgaagaatttcttcgcgtgctctttttcctgctcggcagtttccatgaaaacaccggcgatttgttcataaccttcttttttagctacactggcaaaaaaagtataacggctccgggcctgtgactctccggcaaatgattttaacagattttgttcggttttcgttcctttaatactcatagtcttattgattaaaatgatttagtatcgcacttttatactgcaattttaacgcatataaaaataataaacaaatactttat

SEQ ID NO: 5847 - DNA, 812 bp, Unknown
  gut microbiota DNA sequence
tattatcccaatttccaacagaaacttctgtccaattttgatcatccttacttacctctactcgatacttattgatacgtccatttgaagcaccaccacgtcctttgtagcgtaatgcatctaggctagtaatttcatttaactcaaatttaatccaaaatgtatcacgactcgcttgcggattccatgatgtatgccagatagtaccttcattgccatctaaaacatatcttgccggaccttcattgccttgtccctgctgttcacttccagctgtcactgacattttttcagtatcataatcccgtcctgcataaactggatctgtatttccaacaccttttccgtctaagttgatgacaaattcatttctggttgtatgatcttctgattcaatgattagcttcgctttattttcatacggcggtacataagttaccgctgcattatcagctgccacatagtctattgtatcaataacaatagcttctgtatcaaaacttcctgcagcaagttcttcctcacttaactcaagaccatttaccgttaatttagaaagatttgcagtagaattggtcgtatatgaaccattccactcaataatctctacttctgtaataccagtacatgtttctgtttttcctgcctcttgaggagttgtatttgttacttgcagttttacaaaagttgctacagttggatcaaatgtatatgtatatgcttttacacgttctggactttcattttccgcaattgtttcttccactgaaagttctttccaacttccttcatctcctgtttcagatacaaag

SEQ ID NO: 5848 - DNA, 24784 bp, Unknown
  gut microbiota DNA sequence
gactgcccggaatttatagagataataggccccggccggatctttcaggatggcgaacgaattaccgttagagctcccgacatccagggtattttccccataaaccagagtccgtcccgtcgttccctggttccaggggaacggatctcctgcctgatcttccagcaaatcggaaacagcgatactgttcttcactgtcagaaaacgtcgattctccacatcaaaccataaaaaaccacccgaatagctattcaatgtatagaacagataaggaaaagctttatagtaggtattctgatccgaagtcagacaattcaccggattattataataatcccctcccatcaataacgtactggcattgaaaatatatccgttattacatacgactgtgcgatagtagctagacccgccgttcttaccagccttatctttcacccgcggaataatatctaccggtacgaattccgtgtcgaacgtccgatccataaacaataatttaccgaacacatcactttccgaaccggcaaaagttttacgatccatggaataagcctgggacccggtcaatacccataatttgatatagttactgtttccggccgctcccgtatgaataatatccaccggatttttcaggaccggcagcccgctgtttttcaataattctttgtataaaaccgtatctttcaccattgacaacatctgcacatctgcctctccctgagtgttctcaccgatcagcaaaatgcctttcgaataagcggttccaactttcaatgtagaagtagccaccgtcacgacaccggtctgccggtcggtcaccctgaaatataaggtataatcacgcggagctaattcaacccgatagttcaatatccgttccgtaccgatcaactctgtcgaattatagggcacgttagccctccattcataagcaaaacgggtggtatccccgatatttccttccgttaccgtcaccgtaggatcgatttccagcacactttcccggtaaaccgtttcataaaccgactctaacccctctatgttcacctcacaaatgtcgtgataatcgtacgagcctttgtcatcatagcatgccgtcaaccctaatgcgaatacaataatatatactaatcttttcataattatttctgtttaatcgtaataaccttcttccggtacccagggtacacctactttcgataaccagggacaaccgctgaaccacatcaaacgcccatcctcttccaaaaccggttttttgtcattgtagcattggatcagataggtggacatagatttatatatcagcatttgcaatgcactcggcatagtttcattactcataaaatcattatacgtcaaattaaaacgctcacaaatcaattccagttttttccggctgaaagcgccccaatttccggattcataccctccattatagggagaaacggcagtaccgacccaaactttaggctctaccataaaatcagcaatacgcaaggtatgtaatgaagcatcgaaatgctcatacaccggcccggtccggtgtgaaccgatcaaggcatcccattccgggaaagccagagaaaaatattcgttagccaccaatctcaagcccaatctctgttctttttcctgcaagatatcggtacgtatcaggcggacttccacctcagcggctgactcaccggccttgatcacaccttcacgggtcaagggcagataatccacattttccgtcagatcggtactatcgggattgacttccaccagaaaaatccggtcatacgttttcaccggcccggtagccatcaccttcaccgacagcgttgcggtatctcccggcaaactgataaaattgacattcgtataaggttggtaaggccaagttttttcactgccccaggaatctccccattgtacggcaaaataaactccttccaatccttcataatccatcaggtccttttcacaacccgacaacatcaaaggtaaaatccatatataatataaaattcttttcataatcattcatttgaaatatctgtactactgattcgttgatcggtttcgctttccggaagcggaacgacatacttggtcagttctacgttcttcgttcctgtagcctgatttccatcggggatatttaccatttcctggcgtttatagaaaaagaacagttgcccctcacccaacatttcttttttatattcattcgccagaatattgatccggttgtcttccgtcagggcaaggctgttacagtttctggcattacggaaagtgttcaggtaaacggaagcttcgcccagcttacaacattcaaccgcaatcagatacatttcgctcatccggatcagaggaatcatatattgccggctggccgtcacattatcctgcttttcgaatttacgatgatagagtaccgaagttccgtttttattataagtagaccaaaccgaataacgataatcattctcattatcgtataaatcatctctccgggcagtaccggctaaggtgagaatactggtcgactcgagtgtcggagcaaacaaatcctcatgtaatttttcccgggaagaatgataggtgccgaacaatacttcggaataaaatacccggtcgggattcgatgaagtagcttcactattcgttacaaaagggaaaaattccgccccttcagcctgtccttcggcaattacttctttggccgtaatagcagccttttctttatcccctccccaaagctgaacccgggccatcaggccctttgctgcaaaataattcatccggaaacgccggtaattcaaatctgtatcggaaaattcctcttccacaaaataaggatccgtatctttcagcaaaccgacagcatttttcagatcgtcgagaatcaatccgatgacttccgatccggacagtaaaggagtaaccgtctgatccgaattcgtctgataaggaatactttctttatccaattcagaagtcaggggaccgaacagacgcaacatatcaaaatgaagcatagcccttaaagccaaagcctcccctttgatcgaccccttccagacaggcgaaagtccggctttattttcatcacatttttcgataatcgtattgcaacaggcaatcaccgcatagcatttctgccacatgttatcgaacagggccttctcatcgtttccggtataaaccaaacctccataattatagaaagcatgcgacgaagaagcaacactgtaatactgtcccatcacatccaaagcaccggcagtcaggtttcggccatacaattcattcgtattcaattcaatatacaccccgttcaatgccttcacaaatccctcccggtcattgaaaagcatctcctccgacaaacgatccgaaggcgtcacattcagccatgactcacaggaatagaaggatagcagaagtaaagccagaccgtatttgatgatgaaattcaactttttcattttcattcgttttaatttaaaatcttaatcccaaagacatggataccgaacgggcaaagggataatcgataccccgttcatttttcacggttgaaatccggaaaatatcgttcatataagctcttaccgtcaatgatgaagcgccgaccgatttcagccattttccctggctctcgtaccccaccgatatagactctcctgaaaagacgttgttgtcggcgacaaaccgggaagacatcggcgtatcggctgtcgttgaaatcgcccggaatttagcattatcgcccggttctttccaacgatcgtacaaagcccgcttatcctgattatagtggacatcactgaacgaaatattttctaccttattgtacaaggtctccataaagatctgcccacccaaccggtaacggaaattggcagaagccgaaaaacctttatagtaaaaagacatgccgacaaccccttccagtttcggatcactatttcctacgaccacctcatcctcgacattataagcaaaactctgggtaccgtctttatgcaaaaagatctcacgtcccgtagccgcatctattccggcagagcggacagcccataaatccgaaggacttccgccatcgtaataccgcaacatattcttggtcttattttcatcattgaaccgggacagacaggaactgacattccggtattccgaagtcagatgccgcaaggtcgcgtttacctgccaaagcaagtgttcttttttcaacaaagcataattcagcacaaccgtatatcctttcgtcacctgtccgccgacattagccggaacggaggtacctcccgtagacgaaggaactccggtataaaccaacaacggatcggttttctttgaaaaataatcgaaattcacccgcaaacggttattaaacaccactaaatccaaaccgatattccggtccagcgttttttgccactccaggtccggatttccgaaattattgatgatagcgctgactccccaaggattggtgtgatgattattataggtataaattttcatcgcaatataagcatcgaagttctggtttccgggatttccgatcgaagccctcagtttcagcatatccagccaaccggccccttccagaaaatgttcgttgtggatattccatccaagtcccaccgaccaggtattggtaaaaagtttgttcaccccgaaaatggaagccccgtctgcccgccagttggcatccagcaaataacggttgtcataagcataaccgagattcacataatagctggccgtccttttcttaacatcctgatatacttttttatctggattatattcctgagcaaaagaagggttggaaaattcatcgtcgataaatccccgcatagtatatccgttcagattcgaagtcgactgggtaaaacgcattccggccaccgcatttaccatatgccgttctgccagtaattttccgtaggtaacactcaaatcaccgtcataaccgaaaacgtgtttttccgattccgtataggcccctttctcattatcttccttacccacaaattccgaattgaaaggcgaagaaaatttctctgcctgctcgttggatttattcacccctatcctcgcccggatcctcaattcgtctattacccgccaatcggcttcaaagttgttggttatccctaaagtatgggtacgatcgaaatttgtattagacaaatcgtaaaacggtccgtatacattttcgtttattattctaaaggtatttatatcaaaataagaaaaagactccagcacttttacaggttctccgttttcgtccgttttccggtaatacggattggtttgggcgaatcttttaaaagaaacgctctcccgttctgccctggtataatccacattcaaagaattggtaaaagctacacggcctttccggtaaatgagccggacatttccattcaatacatcccggtccgatcccttcatcactccctgggtttttccgtaactcaccccgacaccataacgcatcactccgtcgccaccttccagaaacaaattgtgtttgtgtgtcgtagcaaaacgcaggggctcgttcatccagtaggtatccacccctctccgcacttcctgcaaacgcatattatattttctttcctgctcgacacttcccaaatacccgtccggtccccagctttgataaagtccggaaagcaattcgaactgcaatttttcctcggcattcatcaaattataatccgacagatcggcaaaagtaaaattcaggttaccggtataattcaatctcagctgcccggcttcgggagctttcgtttctacgaccacgactccattggctgctttcgatccatatatagcggtagcggctgcgtctttcagcacagtaatactctgtacccggtccatactcaaatcactgatcgtcgccagagtcggctcgaaaccgtcgaggataaataacggttggttgggatcggtattatattcttcggtcaaaccgattacactggttttcccccggatttcgatattgggcaaatggttggggtccgaaccgaagtcattgttttcgataatggcaaacgaaggatcgagtgtcttcagactttcgagtacattcgagttaccgatcatcttcagctctttattggtaaatgtagccgacgaaccggtaaagctttctttctttcgggtaaaaataccggtcaccacgacttcgtccatctcggccacttctgtaaccaaggtgatattcaattctttttctcctttccatctcaccgctttcttttccataccgataaacgaatataccaatgtcaattccttcatctcaggcacagataagacatattttccgtcagtatcggtcaccgtacccagcgaagtaccctgaatctgtaccgttactcccggtagcaaactgcctttttcatccgtcaccttaccgacaattttcacttcctgagtttgtttctgcggtacacttttctgttcccggataatcaccagatcatcttcgatcaggaaaacaaagggacttcctttcaaacaatcttccaaaacttcttcgaggcccacccctttcaaatccaccgaaaccggttggaattgtttcactgcatcactgtcatatacaaacttatattcgctcacttgcctcaaatattgaaacacatccgccaaagaggcttttttcatcgaaatgtcgaattttttttgttgtgaatagactgcagcctgtaaattcagcgaacacacgagtagaatcaacaccgtcttcatcataatcaacatacggggtaatttcgtgagtacgaaactaccgttccttaaattttttttcatacatttgtaaataaagttaataatacgctctactccccacgaaggagtatcgatatgttaatgtaaagcagtacatgtgcccgcatgtattgcttttttaatatatcctactgttcgataaccaccgtttttccgcttacccgaaaccgtgcccgcccggtcttttcaagcttcgataaaatggttgcgatattttcataccgctgaatatccaaagaaaaatgggcttccttcaaatccggtttggcgaaaaagaattccacatcataccaccgggccagtttggtcataatttcctcgagcgatgcctcggtaaaatggaatagtccgttagtccagccgatataatcttccgccaccacctgtttcagagtaaaccggcctgcttccaccgccaattgctgatccggctgtaatacctgagttttatccccgacagctacttctactttacccctgaccagcgtagtcgttacccgggaatcctccggataagcttccatattgaaaagggttcctaatacttttaccgccaaatcagccgttctcacgacaaaaggctgttcctccttccgggctacatcgaaacaaatttctccctccattttcacctcccgcagctcccccgtaaaacggacgggataagtcaggcgagactccgaattcaaccacacccgcgttccgtcggccaaaactaattcgtattctcctccacgcggtacaacaatcgtattccattccgctttttcttcccgatcctccttcccggcatcgtatttcaccatttttccggtcgttacaatcgtagttcctcccgcaacagcaatcgtttggctcgaagagtcgcctatactcacctgttctccgtttcctaaaatcagtgtcgccctaaaacctttcgtcccccctgatgttccggcaaccaccggttcggcaacaggctctctcatccataaaaatgttatacccaaacaaataaccacacaagcagctgctactgttacccaccaattgaatacccgctttttccggaacagtttttgttcaaatccttcccattcttgctttagctccaaataatccggataatcaatatcccgaagcaatctttcccggatttccatatactcccttgcatgcttttcagaagagtttttccacacctccaaatcctccgcctcacgtccagaaagtactccgatcaattcgcatgcaatcaaccgggcaatttcatatcgtttttctaattcttgcattgcttcaatcaattatccaatattcaattttttttctcattttttatatataacgatccaatttaaaaaacgggtgagtagaaaatccaaaaactggattgaaagccaggctgcttctaatttataaaaagttgtccgaattatgattttgttatttaatttgttatatttgcaaaagaattacaaatttggagaataaaatggtacttgaaattcgtttgagcaacttcttctcaattaaagatgaggtggtactggatatgcaggcagcaagcatacagaccaaaaaagcaaaggaacttgaagaaaatacatttgtatgcggtaatgagcgcttgcttaaaactgttgccatttatggtgcaaatgcctcaggaaagagcagtgttatcaaggctattcgcgcttgtgtgggaatgatattctcatctcacaattacaacgagaatacgatatttgcctttactccattcaaattcgggagcattggcaaaccaagtacattcttcattcgcttccttcttgagggtatcgaatatgaatattcttttgaactcaataaagttgagatactgaaagaggctctgtactactatcccaatggtcgtcgttcactgatattttctcgtgatgagacaaagggacccgacaaaaaggatatctatgaattccgttcggtgattcgccgccctatggatgttgctgccaatacatccaggaaaacgcttttcgtgtcgcgtgccagtcagatggatcgtgatgttgcaaaagatgttttccggtatttcaatgagcgttttattctgaattatttcggatataattcgttctctgtcgagcgcttgttgaatgagaacaaagagcagttccttaatgtgctgcgaattgccgacagcgacattgtcaaaatcgacagccggcacgagaataaagtcctgtctactgcagtgattgaccctgcagacaatcaaatattgtcagtagaagatattcagaaaccacagctggtcattacgacctatcacagaaataacccggatgttcctttcaacttttttgcagaagagtctgatggaacacagcgtttattcagtatgatgctgacgattctggatatcgtcaagaataataaaatcttgttgatagatgaaattgagacgcagttgcatataaaactggtagagtatattattggtttgttcaataaaagcgaatcggcgcagctgatatatactacgcacaatacatacctgcttaataccaacaagttacgtaaggatcagatatattttgtcaacaaacgggatgacgggtcctcggatttgtattcgctgtttgattacaaagatttccgcgacgggctggatgcagagaaggcatatctgcaaggtcgttttgatgccatcccgtatattgacgaacagacggatagttttataaaatagaaactgatatgggacgacaaataagaaagtccaaaggcaaaacaatgaagccaaacttctttgttttctgtgaaggggagtctgaggttgcctatatcagtcacctccgttcacaataccgtgcgcctattcagattatcccaagaaagagcgattcgaacatatccgttcggtatatagagaattgcaaacgggaatatgttgcaacccaaaatgataaaatatttctaatgtttgacctagatgtaaacggaatgctggaacacctgcaaagtattccagatgtagtattgctggtgtcgaatccgtgtattgagttgtggtatttgctacactttgaggagtgtcatgccgaactaactcaaaacgcttgcataaaaaaactgaaaagacatcttgaacactacacaaagggaactttggcattaaatgagaaacagcaactgtccgaaaagacatcaaaagcaacagcaagagccaaggtgttgaagacatataataatccatcaactaccatctataaaatgatagaattgctggaaagttcgtaatttgaagattatgaagaatagagaaataacatcagctattaccagagaatttacgagagatacagactaaacaataatgagagtttgtgttttacattggaaaataaaggcttgtaaatctcaaaaaaacaatcaaaaatgtatatttgcaaaaacgtttatttgttttatccgtttcaatttttagacgaacgtttttcacaggatgttgaccaatagccaaggatttaaaagatttttcgagctctatttcgaacccgtataccgttttgtccggaaatatacggaagaagatgctattgcccgggacattacacaggatacatttatccggctttatgagcgcagaagggatttcgacgtgcctgaaaaagcaaaatcttttatctatatcacagcccggaatctctgtctggatcatcttaaacaccagaaaaataaaacaacaataccaacagacacaatcggtatcagaggccaaagacccggattttttacatgaaatcacctatcaggaaactttgcggattctccatcaagctatcgatactcttccccctcaaacccgaaaaatcattttattgggtctgaacggaaaaaacaacaacgaaatcgccgaagccctgaacattcggtcaacacggtaaaatccctgaaaaaaagtgcctacaccagtttgagggggcaattgaaagatcccatgctcttcctgcttttcttattaatcgatagttaatcagcaatcacaacgtatatataataattgatactgatttttagaatcaacacctaaagcatatatctgattttctccatctccgcaaagaccatatatctcataatctttgggaaagtcatagcgatatcggggacgtccttcccaggtccaaaataataaatagcgttgcccgttattttgatagagagtaatgatgtatttttctgaatctattgacaatcccgggaaaaaataaaaaaccaactgcctctccagattgagttggtcttgaaaggtaagcaaagtgtgaggaatcgaaattctttttacgggttttatcgtaaagcgatctacatctatcaaatcgaacaattgataatattttctgaaaactgcaaatctgtttctgttcttttgcttgataataaacgcgtcattccaatagtcgggagagagtaaagtcatttccttttctgtaggaggataacaggaagttgaaggataaaaagcctgatgagactgttcatatacaccatatcgtgttttttttgtcgtagtctgaccgaaaaaataagttgctgtttcatctgtcggataaacactaacaaaataatagtcgtctaaccagttaaaagaatccttgtttctgatacgaaaagaataagtcgcgacctctttgatcgtatcgcgaattagtatatccatcctgcatttcctggccaattgaatacttgttaccatactatcattcagtttgtataataaatgggcaccatcgacattcttatattgggaaagtatctttccgggaatatgataggtatgaagaactgtcccacgcattgcatgacacctgtcccatacaacataatctttaagcataaccattgaaaccgtattactcaagatatcgatatctgtcgtatatacaggcaataattccaaagtacctttatcgctgaactgacttaaaaacggattagaaaaagaacaaccagtcaatactaacaccggaatcataatgtatctaaatatcattttccgctcgatcgatttcatttttatacagggtagctattttatttgaaataatagggttacctattactacaatttttccgttaggatcgattaaaaatgtgttcaacaatttattatctggcaatttattcatttttatataatgattttcaggatcatatataatgggctgtgtaaaatgaatggatctttcattcatgatttcaaaagatgaatatatctcagcataaataaaacacagaaaccttaccttatctggtgggaattgtgataaaagttgtttccattttataagatcttcaacgcaagcataacaatccccataaatataagttgtgattctataaattgaatcactcgtatatttagcaggattttgaagataaatcgaatcactacattgcttaattaaaatatgctgaggtaatttaagttgtctatttaaatattgattaacaaattgagtatattcttttgtcgaagtttggcatgaaatacaggatataaacaacaaaatacaaatgtttagcttcattactttaaagtttaaaatgaatcaaattgtaattttctccaattaaagcgataccataaaaatttaatgaatcatctccagtaaaatttaataaatgacagggaagtttataactattcaaagggtttccatcccaatcaaaggtcagaataaactccgaatgatcttgtttgtataaagcacacacatacttcgataaaccgacaagtttagaggtgaagacacgattgggtgtgcctttttcactcggtctatataccccggacaccattttccatttaaaatgtgtaaaaatatttcttttcactaatatcagtgagtcattttttatttctaaaatatcgattatgtggtgtttatctttaaaagccatatacttcttcattccagggtgacgaacaatatgactgtaatatattctagattttccgttcaaggtcagattgtcattcacccctttaggataagatataaagggccttaacattttactgttacgattatataaagcatagtttttttctaaattaccagttcctgtaacaaaataaatcgagtcgtttccatagtggacatctagcataaaatgattggtcggataggaaggtaaaaaaatgatggtatcattacttaattgcaaaaacatcaatttggcaagagtcctgtcaaatatgaaaagaatactatcattaattttttctaaaccgtatccttcagtaaattcattatttcctcttccccttttaccaaaattattttttttataatgaattaaatctatggatgaaaaaatagtatctcccgtaaattgtgaataaataattttatctttcattttgaccatgctaggtataaaatccacaaccaaatcggtagaatccagcacggtaatttcaatatcatgagaaggtatgaaattttttaaaaagttgttttttgtattctgagatctattgcatgagaaaagcaggaataaatgacagagtaagataaaatatggactcttcatcatactaggtattttaatcaaaatatcaaataaagttctgaacacatagtaataaatactctatatccagaacatactatatttctctataaactaataacaatttaatcctacatctattgcatgtttttcaacccaacctcttccttgataaccagggcaaaaatggctttgtccatcattaatatatcctgttttatttccaggattattgggatcggcaggtacgctataatcataatatagacagccatgttcttcttccggacatttaacacaaatgcatgaatattcacctgcagcagaagcagaacttgcttccaataaagtcttcaaattgactttattttcatgatcagctgttaaacgagattcaaccatatttattatggttaggataaataaaattcctaataaatattttttcataatattgtaatttataattctctcaatattctcactcatttatacaatataatcttcacctagtgataattataacaatatatttacttacatgatagcctctctttctttttacgttattttctcctgaattcccatcagtttgttttcaatttttacaccatcaggtgatattcagcaataaagatcagtttaattattgggaaaatgaaacatttgacacaaagttttgtcctatatttgtcccatgaattgttaaatctggccagaaaaactcaatatcatgcaaagaaaattcgaataaagaatgcagttagcgggtcctttattttttttcaatccggttaaaacggtaagagaaggaaagcatataataatcctgcgtactggtcgaactattcatccgggtatacaaatcggtcacggaatagtgcacctgactgcggtcacggaagatatcgttggcccggaataccaattcggcctgtttctttttaccgaatttcttacccaattcaaggttcagacgattattcgaccggctggtcactgtccctgttttgttccaataataagtataaaaatagtctcctcccacaaaaaaacctttccagaaaagccacctgcaattggccattaccgtctcttcgagattctgagctttaccggtggatgaattccgggaatgggaatagcttgtagcatgccggcaataaaagtcgaaattctccgataagtcggtattgacgccgatactgatttgtccccgatgcatctgagtgacattctgctgatcatcgtaaatcgagggttgatgcgaataactgtaatctcccccgaaatccaaatggatttttttcaccggcatcgaataattggtatgtacattcatactccacatcccattcaaattcaccggcatggtcaacgaacctcccttcgacaccaaatatccatcgatcaaggtgtctttaccgataaattttacattggaagagatctgattgatcgtctgctgtacatcgaaattagcccagaaaaaccgggaattcatcggttccgaactggtatacctcatcgaaagatgatgcgaataagactttttcaatccaggatttcccttagatacttgtaagggattgctgacattcaatacatcctgcaattgcacggccgacggagaagaagtatttccattgtagttgacactgacattccgtttctcactcatccggtaggatagctctgcccggggtgaaatatcgagatagttggatccgaccaaagaatcgggttttccgataaacctgttccggttttccatctgcatcagacgcaacgaaccacccccgttcagcgtaactttctctttatgataattataatttaccccgaaattctgactgacttgtttattgatcgatttattcgttaaggccgtatctatcccgatcagctcttcgaatacggcatcccggtaagccaggctatgccggtccgactgatctttactcgtcaggaaatgataattgaagctaatacgcgcaaacttcgtcaaaggctcggaataagacaatccggtacccattgaatagtttatccgttcattatcgtttttctgaaaacgcaaactatctccccgctcggttattttctcgtgtatatgctgataatcaccggaattcgattcattataccctccactgaattgaaatgtcaaggtacgtcctgtctttttaaaagcatgcatccacgagaaattacctcctgcccgtttactatcgtttttattgatggctttcgtttctgttcgatttaaggtatccccgttttccatactgctattccaggacaaactctcctgatttccccgggaaatagtaaaatcgggattgaaccggatccggttcttgtcattgatcttgtaatccagactaaaattaactccatgactttgattatccgagttcgaatgactctcattatcgtacacgcggctttcataattcccggtaggcaaatattcctgacgggaaagggaagcagaattatttacgctcgcgttccaacggtaatttccgctcacctgcagtttcttattgatctgtgacgaataattaccccaaagtccatggttcttatttttgttcccttcatcccggtaacgggcatccggcaagtcgttcaaggccatccggccggcatttccgctaaaagtaatctttcgtttccggtcgaataaattcaacgatacagaagcagaataggatttatctttcaccttttccagcccataagccagttcgccgcgtccgaacaccttcatctggttgggattccgggtttcgatattcaatgtacgtgatttactcccatcgtcataacccgagaatttagcctcctcacttttatcatcgtacatttttatacgggcaacgagtttagccggaagattcttcaaagccgcagcaggatcattgatcgcatattccatcccatcgatggtgatttttttcacttcctgcccctgggccataattttcccgtctacaatctcgaaacccggcaatttcttcaacagtttttccagatcggcatcttcagccaagtggacagccgccgcattgaactgtaaggtatctcctttctgcacagtgagcggaggccgtgccgataccaccacttcgtcgagaataagtgctttcagggaaatgtccccgacagcagtatgtccttccaacacaactttttgttccaacggccggaaaccgacaaaagagactttcagccactgttcgccagccggtaatttcccgacatcgaattttcccagcgaatctgtaacagctaccaaaattcgctttatccctaaaaaaatatgagcgccagggagaggcttcccatcctctccgctgaccactctgcccgataaacggcaagagaccgaatccgacaatacctgagcctttaaactgcctcccaagcacagcagacaaagcaaccatactatcttcatcgtcctctgccttttatcgtttttctgaaacagagggagggaccgcccgttcggccacacctcgtttataattcggacggctgctcatcacaaagtgtaaatccgctccatccttaatatcattataggttatatacgacttatcgtacttcttcccattcagatatacttctttcacaaacacatttctggccgaccaattcccggtagtcatccgaagatgcttaccgttgctcatcttcatatcgaccgcagcaagcccgggagaccccaggttatacacattactggacggagccgtcggatagaatcccatggtattgaatatataccaggccgacatctgtccgcaatcgtcatttccactgagtgcatccggcttattcccataaaaggtatccatgatataacgcaccttctcctggcatttccagggttgtttcaggtaattatagaaatacaggatctgatggcaaggctcattaccatgccagtaagcccctacccgtccctgaatatcgtgtgctccggggatattatcggccatctgggtaacgaacatcgaatcgaggcgttcccggagcaaatcttctccggcttcattgatatacccctgcacatcatgaggaacataccaggtgtactgtaaggtgaaaccttcggtaatatccccccagccattgacagatcccggaccttgataagcgatcggagcgaaaggagtgcgccagttgcctttactatcccggccacgcatatatttcgtcccgggatcgatcaggtttttataagataaagcccgcttcatgaaaaattcataatcttcggtttttccaagcttttgagccacctgagcaatacaataatcgtcataggcatattcgaggctcttggataccgattctttctccttatcgaaagggacccaacctaactcggtatattccggcagacaatcatagttgggattagtcgccgtagtcttcatcgcctcgtaagcccgttcataatcgaatcccttcacatctttcatgatggcatcggcaatcaccgatacagcatgatatccgatcatacaccaggtttcgttgccataaaacgaccagaccggcaacatatgttcgacactcttgtcataatgggccagcatcgagttgacgatatcggcattaatttcccgttgcaccagattgaataagggatgtaatgcccggtaagtatcccacaaagaaaagacggtataattggtaaaaccctctgcctgaccgatatttttatccaactctctaaacttcccgtctgcatcctgaaagataaagggatgcaggaaagcatgatagaccgacgtataaaaagtctccctctgttcgggcgtagcctcgatcttaaatttcgacaactgcccttcccacagtttttcgccttcagctttcaggcttgcaaaagtttttccttccaattcctgcatattcagtttcgccccatcactgctcactgccgagacagcggtcttcaccgtaaccatttctccctggcgggtcgggaaacgcatccagaaacgcaggtcttttccccaggcttcgagactactccggaaacggttagtattgtatttcaccggaatagtatcctgcataattccaaaatcccggaaaggtttagaaaatacagccgtaaaataaacatgccgttccggtccccacccttttaccaatttataaccgacaagggtcgaatcgttctccacccgaagattgctccagggacaactctgccacaaggtatggttcatgtccagcaggataaaagaactgtccgactcgggataggtaaactgcaggattccgcttctaatccctgaagtcatttctgcttttaccccataatccagcaggtctacgccataatagccgggactggcccattcctgttcatggctatagcgggaacgataaccggtatccggattttcatgcgtccccggtgtgaaatgaatctttccggtcccgggcatgaacaaaaaatcgcccaaatcggggataccggttccgcttaggtgagtcaggctaaaacccaacagcgttttatgatcgtatttatatccggctgccgcatcgtaataatcggcatccgtatccgggctgatctgaatacctccgaaaggaatttgtgccccgggataggtatttccataccccgaagtacccaccagcggccgtacataagaaatcaaaggctgttgctgtgcactcaccgtcgcaaaagccaacaatccgccgacggtaaccataaattgcaatacttttttcatataaaacattttatccgtttctatttcgtcatcgaatagggcttttgttcttcggtgaacactcttttcttattcggcgtactgctcatttcaaaaaagagctctccaccgttacaaatatcctgatgagtcagataagctttatcgtattcccgtccattcagtttcaccgatttgacataacggtttttagcactgactttcggagctttgatcaccagatctttcccattttccaaatgtacggtcatttccttcagataaggagctcccagtacatactggtcggatccgggacatacgggatagaatcccatagccgtaaaaatataccaggcggacatctgcccgcaatcatcgttaccacacaacccgtcgatattattgcgatacatccgatccataatttcccgcaggcggtattgggttttccaaggttgagaagtccacatatacagataaggaatatgctggctgggttcgttaccatgcacataattacccatcaaaccttctttggtaatatcctcggtattttcgtagtattttgccggcaattccatggtaaacaaagaatccaaccgctcgataaagcgtttgtctcctcccataaaagccttcaggccattcacatcctgaggtacataaaaagagtaattccaggaattaccttcgataaacccttggccatgagtatccagcacatcgaatttttccttcatctgtccggcagcattcttcggccggataaaacccaaacgctcgtccaccagatgtttataggctccggcccgcttcaggtaagtatcggccacttcccggtcgcccattttcttcgccatatgatagatcgcccaatcgtcataaccatactccagggtgaccgatgccgaactaccgctcttttccatcggcacataccccaattccatatactctttcaatccttcgaggtatggaacggtagaagtactcacgacagcttccagggccagtttttcatccatcggaatacctttcacgtaagcatcggctatgaccgaagccccatgatatccgatcatacaccagttttcattggccatatgcgaccagataggaagcaaaccatgtacactctgccgataatgagccagaaacgatgccacgatatctttactacgtgacggatagaacaaattgaacaaagggtgcagagcccgataggtgtcccaaacagaaaataccgtataattcgtgaactgatccgcctgatggatctcctgatccaatccccggtaagaaccgtcatgatccatatacaccgatggattgatcatggtgtgatacatggaagaataaatattacaaacctgatcataatccccctttacatcgatcacactcaacgcatcttcccatttctgtccggcctgcgcacacaactgcccgaaatttttacccgcagtctcgatccgcagattattcaatgcaccgctggcactcaccggtgaaagtgcaactttcacctccaaaggcgttccgtccgacaagtcgaaatcaaaataagccacgacattccgtcctccgatttcgggaaaattgcggtagatatcgaatttccgccacattccgttatacagcatcggtttcatctctttatatccgtaaccccggatcggttttgagaaagtaatcgcaaaataggtgtagttcacccgggcccaaccatttgtaatccggtaaccggtcagcaaagtatcgttttctaccctcagattggcccagagcacttttccgtcgtaattataaataccatgtttcagatcgaggaggatatgtccgtctcctttcgggaaagtatatctatgtatccctacccgttcggtggctgtcaattctgccttcaccccataatcctcgagcatcacggaataataacccggccaggctttttctgtggcatgtgaaaaacgggaacgatatccgctatcggggttttcagccgttcccgggttaaatttaatatctccggttaccggcataatcaggatatcgcctaaatccgaatgcccggttccgttaaagtgcgtatgactaaaccctacaatagaactatcccggtgctgatagccggcacaatactcgtatacccgcggttgataggttccgtttatattatgcggaatcgtatcggtatccggactgagctgtaccaaaccatgaggtacgcaggcccccgggaaagtatgtcccatgccgttcgtgccgatcaacggatccacataatcgattttcttctgaccgtttaccgataatccgcatatcaataacgccattgtaagtaagtttctattcatctatcaaaaattatttcagttttgtttattatgatgtttcaaatattccaaaacaaatttgaaggtgttttttgccggttcgtctttcgcctgagcatatagtttttctcccaaagcaatgtatctcgccctatcggccggcgaagcctcggctacaatccggtcgcaaaactgaatataaggaatttccttggtcttgaatttcggaaattcagtttcacaaaccgaaatcaactcttccacccccttcttcaaagccgttttcgccaccgttacataggcttgcaattcctcgttcgtgttcagcttcaaagctgcaatctcacgtcccaaagcggcaagctgtttttcagtccatattttttctttctgcgaaaggactttcaaaagcttttcggtataccgtttatccaattcctgttccaccttttccttaccgaccgttttattgaaacgcttgtgatttttcaacagccaggcttcattagccgaaccttccggagtcagtttcggattgctgaagacaaaccaataggcctcttccaccttctctttatcactcagcgtatttatcaactcggcagcaacggcctccatcgccggatcataataccgaatcagcattttcaggtacttcaccataaatacttgttcccggttaccgctttcatacttcgctttcaaagaaccataagctttctcttcatcgaaactctcttctatacgttcgatgatctcgtccacactatacgaaccgattactttatgaagtaaccggccttctgcatccaacaccaaaaaagtcggataagcccgtacctcaaaccgtttccccaactcaggcccctctcctttttccatatcatactttacacagataaacttcggattgaaataatctccggcttttttctgcggaaacacattttgagtcatattcttacaaggcccacaccaggaagtataacaatccataaacacgtacttctgctcactcttcgccttgtccaatgcttccctaaaactcaggtgttcaaaattcaccccatcctgtgcaaagctaaccaagcttatccataaaaatgcaataaaaaggaatatttttttcatactatttttcatctataccattatactatgtttccggtatccgacagtttatcgatccacaaacctcaaatcccaacctccaatacaccatcggtaccggaaacgacacggcagaattttaattcatgccctcaaaagccccccaccgacgcatttacaaaactgccctccaactcatatttttcactttggtcaaacctttccaaactgccgtcggatctgctttcaactctaccttatccggattattgcccacataatatttccgtaaagttcctccttcggcagtattgtaagtagcgataaacaaggcatctttcatcggttccatcgtcagatcgaatttcaacatcgtaatctgatccgttgtttccaaagggatggtttctacccgttcattccccttgtcgtaattataagcatataaaacattgttctttacataaaacaaaaccgaacgggtcgaagagaaagcatagaaatctgccgtcaaaatatccgaagcgacattagaagttatctcatacatactcttagtctccatattgttcacataaaacttgtagatatacgcattcgttccatcccccataagtgcgaatgaatttccgtcgcatacccacactttcgcttcattccaggtattttccccatatatcaatgtacgccctgtacctttttgatcccaagggaatacatccgtacttttctgttccaatgtatcagaataaggatataaataactctctgtcttataaaaacgattggtctctccggaataccaaataaactttttaaaagattgaatactataaaaaagatattcactggcaggaatgtatttagtcatatcagtcttcaaacagttcaaaggaaaagaatacataccatatgccaggatagataaagaggtgtaaaacaacttaccgttactacatacaacagctctttgactttcaacttttccatctatatcactcggctgcggaacgattgtaaccggaatcataggttcattgtaagactccagtaaaaaattatcgaatacattggactcggaaccctgtaaggtttcccggtctaaataataagaacccgattcagtaagtacccaaatctgtctgtaatcttcaccttgcttaccagtatgcaagaacgaaacaggaccatgcaaagtaggtaatccactgtttttcagaatatccttaagaatcagtgtatctatacccgccatagaaatcatctgtgcatctgcattcccatttgcatcttctcccatcagtaaaattccccgggaataaggagtcccgacagtcaccgtaaattgctttttccactgtacctctgttactctatcccggattttcaaatacaaattataagttccgggagccaaagtaaccggataactgagtacccgatccgtagaaatcgtatctttcacatggctatcagacggagaaaaaatcacccacaaatattcaaaacgatctgtatcggtaaggtctccctgactcatctctacaaaatctccgacatcaatttttagcgtatcaatattcaacaatacattgtacatggtattgatctctccaaaggtcacctcgttgatatcatgataatcgtaattaccttcatcatcataacaggaaactatacttaaaagcataattcccagcaatatatataaaatttgtttcatcatattcatttttatcacggtcaaacttactattcattcgtttcgggatatgccccgttcgcataaacacaaccactgacccacattaaccgaccatcgttttccaaaattggttttttatcgtaataagctttattcaatatctccgagaatttccttgagatcaccatttgttccaccatagttattttttggggattctgaaaatcagcataggtatagcccaattccagacatatccggttcaacttttcgggagtaaaggtgccgaattcccaatccgaccactgtgaaggcttaggcataatatccgttactaagattttatgcattgtagcgtcgaattgttcaaacacaacactcccgctggtaaaaccttccattttgtcgaattccttaaaagtcaaagaaaaatgatcgttagcgaccagtttcagtcctaaggttaccgtatcgtttttcat

SEQ ID NO: 5849 - DNA, 53278 bp, Unknown
  gut microbiota DNA sequence
agaaaaatccccgaatctctttgaaattcagggatttacatcgtttttctttcttaaaaagtggtgccgccaggaactgagtgaagatcccgcgctaagcatcgagaacaaacacgggggggtactataagctgcaaggagaataaagaaccggattatttggttaataaaccaaacatcgttaaatttgactgcgtttaaagcataaagaaaaacaatatggcctctataaaatcttcagaactgattaccaatgaggacggcagtattttccatctgcatttacttccggaggaccttgccgacgatatcattctggtcggtgacccgggacgggtggaaaccatcgcctcccattttcaacaaatcgagttgaaaaaaagtaaccgcgaattttacaccatcaccggcagttaccggggtcaccggctttccgtgatttccaccggtatcggtccggataatatcgatatcgttatcaacgaattggatgctctggcccatatcgatttgaaaaccaaagaaataaaagcgatcggccgtaccctgaatatcgtccgtatcggtacttccggttcggtacaagccgacattccggtagattcttttgtcatctcggaaaaaagcatcggctgcgacggggtattgaggttttatgcaaacaacgaatcggtttgcgaccatccgttcgaagaagcttttatccggcattgccgatggaccccctctgcagcccgcccttatgtagtcaatgccgatcccggattagtagaccgcctgtatgacgaagaacacaccatcaaaggagttaccctgacagcagtcggattttacggcccgcaaggacgtgtcctgcgtctgccgctagccatgccgggaatcaacgaccggatcaccgctttccgctacgaaggctacaaagtgaccaactatgaaatggaaagtgcagctatcacaggcctttgtaaccttttggggcatcgggccgccaccatctgcctgatcatcgccaaccggataaacggagatgcctccgccgattaccacagctatatgaataaactgatccgctataccctggaaaaattaagctaaaagctataggctataagccttttgcttttagtatttagcattttattttttactttatattatgattcaacgtattcaatctctttttttgctttgtacagcaattgtgaccgggctgttattttttatgccggttgcttccattgtagttccgaataattttacctatgcgttttatacgacaaaagtggtacaggccggaagtccgtgtgtattcatcacctggaactggatgtcattgatcctgaatgcccttattaccacattggcagtagtcactattttcattcatcacaaaaaatccaagacggtgaaaccgactctatttctgcaattgcgtctttgtattgtcaatattgtgcttcaattggggttaatcgtcctgatgtggctacaagtgcgtcaacgtagcaacgaactcaatgccgaatggtttgccgatatcagttttatctttccactgatcggtgtgatcttcacgtggctggctatccggggaattgtgaaagatatcaccttactgaaatcgttcgaccggattcggtaaacgataccgctacagcccataacagctgtagtggccattggaaaacggaaaatctaaatcgtaaactataacatttccttaatctaaatcgtatgttcaaaatttgttgtgctagtttatttcttatagcgataacttttatcaaagtttctgcttgtactaatttcttactcacccggggagccactcaggacggatcgacgatgatcacctattcggccgactctcacgtattgtatggggaactttatcattggcctgccggtacctggcctgccggaacgatgatggatatctatgaatgggataccggtaaatatatgggtaaaatcccgcaggctgcccagacttacaacgtaatcggtaatatgaacgaatatcaattggctatcggtgaaacgacatacggcggacgtaaagaactggaaagtcagccgggagctattatcgactacggaagtctgatctatatcaccctgcaacgcgctaaaaatgcccgggaagccattgtcgtgatgaccgatctggtagagcgatacggttatgccagttcaggcgaatctttctccatcagtgatcctgatgaagtatggattctcgaaatgatcggtaaaggcgaaggcgaaaaaggagcggtatgggtggcccggatggtccccgacggttatgtttgtgcacatgccaaccaggcacggatcaccaccttccccctggaaggaaaaacttccatttcatccgaccagatgaaaaaaatctatgataaagaaattacaacggtatatgcaaaagatgtgatttcttttgccaaacaaaaaggcctttatccccaggacgggaaaaatgccgatttcagtttttccgatacttatgctccggtagatttcagtggtgcccgtgcctgtgaaatccgggtatgggcgttcttcaatgctgtaaatcccgatatggctcagtactggaactatgccaaagggaaaatcgaacgtgacggtaaaggctatgcgacaaaccggatgcccctgtgggttaaaccgaaccggaaagtggatgtactggaagtcatggattttatgcgtgatcacctcgaaggcaccgaactggatatgagtaaagatccgggagccggtccctacgaatgcccttacagatggcggccgatgagtttcgaagtcgatggtaaagaatatgttcacgaacgggccacagccacccagcaaaccggttttacctttgtatcacaaagccgcagttggttgccggatgcagtaggcggtatcctttggttcggtgttgacgacgctgccagtaccgtgtatttccccatgtattcctgctccacccgtgttcctcacgcttatgcagtcggcaacggcagcatgatggaattcaccgatcaggcagctttctgggttttcaatcaggtgactaatttcgcttatacccgttataatgctattcatccggaaatccgggaaaaacaaaaggctttggaatcccaatacaaaacgtttgtcgaaggaatagactccggagctaaagcactattcgacaaagatcgtgcagcagcaatagaattcctgaccgatttctcctgcaataccggtaaccacctggtagacacctggagagatttctacggttatcttttctgccgctatatggatggtaatatcaaaactgcggtcccgggcgaaaaaaatcctaaagtagaacaaccgcaactacccgaatggtacctccgcaccatcatcgaaaaggccggagacaaactacaggtcatcgaataaaaggaggaaagataaaaggtataaagtataaggtaaaaggtggatttttctctcttttatcttatactttttcttagggtaagtattcggattggatatttttcatcgccgcaaagaggttgccttttacgtggggagataaagcttccatctgtcggataatttcagctacggcatgacggttcgtcgctcgttcatgaggacaattctttttctgttttttaaaattccggtaggcagcataccgggtagtttcttcatcggtaagatagataaaaggacggatcagggtaaacgtacgatcgaacatagccaacttcggtggcatactggcaatcgtaccgttaaacatcatactcatcagcagactctcgatggcatcgtcccggtggtgtcccaaggccaatttattacatccgtattctttcgcaatcccgaacaaggtcttccggcgattccacgaacacacaaaacagaccggtttaccggaatcttcttttacggcaatagcaatcgtacgatgtataaactctactcccagctgttcacaaaattgccttacatactcaccgtcgacttcgtaagcgacattttccacagcaatatgagcagccacaaccgtataattttgtttcggatcacgggcccgcaatgccaatacttccaataaagccaaagaatcctttcctccggagactccgaccaatattctatcacccggttcgatcagctcataatcataaatggcttttcccgccttccggaaaaaatcccgcataaacaatttttctttcttcttgtcttccatttcgttcgcttaccaataaaaacatatcgccacaaagtaaaaagaaatttcgctccccggcaatagtcatccgtacatttacagtaagctcttccatcgtcccggattacaatccggttaagtggaattttatccgaaatactgtaacaaaatcgtaataatattgtaacactggtgtagcaaccacttattaatattgcattgtaaaaaactaatcgtcaaagacatgaataagttaatcattatcgcattagcactcagcctggcagcttgtggccattcaaagaagaagacctcggaccacaaaagtaatatagatctgacagcagcaggagccactttcccgctcccctattacaatctggcttttaaaacctataaagattctaccggggtatcggtgacctacggcggaatcggcagcggtggaggtatacgcagcctgaaagaccggatcgtagattttgcaggcagcgatgcttatctttctgaagcagaaatggcggaaatgccggccccggttgtacatatcccgacttgtatgggtgctgtcgtcatggcttacaacctacccgaagtaaaagagctgcaattgacaggtgacatgatcgccgacatcttcctaggcaaaatcacccgttggaacgatccccgtattcaacaagtaaatccgggagttacccttcccgacaaagcggtcagcccggtatatcgctccgacggtagtggtaccacctatgtcttcagtgattacctgacaaagatcagtgctccgtgggcagaaaatatcggaaccggaaaagcattgaaatggccggtaggtattgccgccaagggaaatccaggcgtagccgggacaatcagtcaaactccgggggcgatcggttatatcggttcggaatacgcttttgccttgaaaataccggtagccaaactgcaaaacaaggccggaaattttgtagcccccacaaccgaaagtatctctgctgccgcagatatcgaaatgccggccgatacccgcaccatgatcaccgactcgccggtagccgatgcctatccgatcagctgctttacctggattctcctttatcaggaacaagcttataaaaaccggcctgaacccctggcccaagctacggtggagctgctgaattggttaacgaatccggaagcccaggatataacgacaaaagtacattattctcccctgccggcttcaacagtgaaaaatgccaaacaaatcctgaaaaccatcacttataacggtcaaccaatcctaaaataatatgcgtgattatattttcaaacggctgttatttctctgctctttattggttctgctgatttgtgggggaatggtctattccctcgtaagcggggcagtaccggcctttgaaaaattcggattctttcatttcatttcttccgtagaatgggatccccggcccggtaatgagcaatatggcgccttggcattcatcacgggaaccattatgacctcatttttagccctggtattttgtattccgttttctttacctgtggctttattcaccggcgaatatttccggggtacccgggcagccacgatcatcggttcggtcatcgacctgctggccggtatcccttcgattgtgtacggtttgtggggattttataccctccgccccttcatggtcgatttacagctgtcggaacaggggttcggcatattcaccgcagcggtcgtattagccgtcatgatcatcccttatgcctcttcactgagtgccgagtttatctctatggttcccaaagaattgaaagaaggggcctacagcctgggaggtacacgtctggatgtgatccggcgggtgattttcccggtcgcaggttccggaatattcgccagttatatcctggccttaggaagagcattgggagagacgatggcagtcacgatgctgatcggtaataccaatatcctgcctacgtctttcacttctaccggcaacacgatggccagtgtcatcgccaaccagttcggagaagccgacggcctgaaactcagttccctgatcgctatcggtctattgctattcctcatcaccgctatcatcaatttcatcggtaagatgatcatgaaaaaattaagctgacatgatacaacgccctattacatcttatcattcaggctggcgcaaagccaaggacaggatatttttctggctggtttgcctgttctctgctttaacggccgtcccgttagtagtcatcatctgggaagtggtccggaaaggatacaaacagatcaacctgaatttcttcaccgagacagcccccagtaccctggatgccatgttagcgaaaatcaacggagaaatcattcccggaggaatcgccaatggaatcacaggcacattacttatggtggtactggcctccgttatcgctatcccgaccggtattatgggtggaatttacttatcggaaaaacccaaaaccttattttctcatgtgatccgttttctgaccgacctcctgcaaggcacgccgtcgatcgtcatcggtatcatcgcttatgcctgggttgtcgttcctttgagtagttattccgctttggcaggtagtgtcgctctggctattatgatgttacccttaatcatacgctcgacagaagagaccctgaaacttctcccgacaagcctcaaagaagccggtcttgcgctaggagcctcctatacgagtgttatcctgaaagtcctggttccctcagctttcggcggactgttcaccggtactttactagccgtgtcgagagtgatgggcgaaacagcccccctgatgctaaccgccctcggtagtacagcgatcaactgggatattctggatccgaccagtgcagtccccttgctcatctgggaattttataacgacccgaacctggccgatatgatctggagttgttctttatttctattactattaattctggtgatgaacatcatcgctaaaaatgtcgcccggaaatggaaaatttaatttataacagtcctactacatcatgcaaatagatcatccgatattacaatttaaaaatgtcagtatttcctatactcccgggaaaaatgccgtcaatcatgtcaatgccgatattaaaaagaatcggatcacagccattatggggccctcgggatgtggcaaaagtaccttattgcgtgccatcaaccgcatgcacgaattatatccggacatcaggatcagcggagaaattctgatggacaaccgcaacattttaaagatgaaccccatggaggtcaggcgtatggcgggcatggtatttcagcgccctaatccttttcccactatgagtattttcgataatgtgatcgccggttacaaactcaatggcatccgcctgaagaaaaaagaaaaagaagaaattgtagagacttgtctgaccaacgtcgggctgtggaatgaagtgaaagacgctctgttcaagaaaggcactttcttatcaggaggtcagcaacagcggctatgcattgcacgggccctggccttaaaaccggaagtattactgatggacgagccgacctccgccctcgatcctatcgccaccaaccggatcgaagaattgttactcgagctgaaaaaagaatttaccattatcatcgtcacccacaacatgtcgcaagctgcccgtatttcagactattcgatgtttatgtatctcggcgaactgatcgaatacgacaaaacccggattatgtttaccaatccccgggataaacggaccgaagaatatctgaccggacaattcggataaaccgatgtaaaaaacaaaaaaaataattcctattatgccaactttaaaagaaaaagtattcagccggataaccgaagattttcaggtattagcaaagattgtcatccgccagctgaatctgaccaagcaattaatggacgacaaccacaaagaggagatatatacagagatcaacaataacgaacggatcatcgacagtatagaggtcaaaatccgcaacgaagtgatcaatatgatcgtgctttacagtccgcgggccacgaatctgaggatgatcatctcttactacgatatgaccgcttatctcgaacggatcggagatctgattctgaatgtttcccatttcatgaaaaaaatagcagtcgacgactgtctgttcacaacctataaaaaggatttactaaagatgctctcactcactgaaagtatgacacaaaatgctatatttgcttttacatgtgaggatatccagttagcgaaagaaacgatcgagacggatgaccaggtcgacgaactgcatcattttatcggccagcatctcccgacacaatgtttcgataagatattatcgcaacaagaagtaacggatgccctatgcatcaacagcatggcctataacatcgagcggatcggagataatgcgaccaatattgcagaagccgctatttacctgatcgaaggaaagaatatcaaacattggccgaaaccggacgaagacctgctactggcaggaagtgaaggttaaaaaatgagaaaagaataatgaacgattttgaataacaaaatatatggaacggaataaaatattagtagtcgacgatgaagaagatttatgtgaaatccttcaattcaatctggaaagtgaaggttttgcagtagacatcgcaaattcagccgaagaagccttaaaactgctgaccgatgaacatgaactaattctactggatgtcatgatggaaggtatgtccggattcaaaatggccgaaaaagtccgcaaagaaatgcatatgaataccccgatcatcttcctgaccgctaaggataccgaaaacgatatgttgaccggattcagtatcggcggagacgattatatcgccaaacccttctcgatcaaagaagttgccgcccgggtaaaagcagtattgaaaagggccggtaatatcgtactaccggaaaaaaagaaaacgatcgaaatcggagaactcactctggacctcaacagcaagaccgtatacctcaatgagcagcagatccttttaaccaaaaaagaattcgaaatactcagtatgatggccaaagctcccaaccgggtcttttcacgggaagatattctgggcaaagcctggcaagaagacggctatgtattggagagaacggtagacgtccacatcacccggctcagaaaaaaactcggagctttcggtaaacatatcgccaaccgttcggggtacggttactgcctggaatgctgaaaaggctaaaggctttaagctaaaagccttcaactcctggtccacaattttcagctttcagcctttagcttatagcttttttttagctttttacctttaaccttttactttttacttttttatgcactttacttataaaaagaagattttcctgtattttctgattgtatttaccatatttacagtcatcatcgttgcagtgcaacagaacagggagaaaatgtataagtcagagaacttcaaagccagtctcaatgcttatgcagaaatcatcgccaactatgtcgatagtcaccgtctgatcgcaaataaacggctggattcgttaaataatttgcttcccttactcccccgaggattacgggtaagcattatcgaccgccagggaaaagtgctttacgacaacgatatcgacgaggaagaaacggtagaaaatcacttgtcccgaccggaaatagcacaagcattaacccaaagcaacggtacgaatattcgtaaatcggagactaccggtatcgattattattacgatgcccgccttttcaacaactatttcgtacgggtagctctaccttataccgatcaggtacagaatatcctgaaagctgacgaaatcttcacttatttcattctgctcttgttttttactaccctgatttctttgttatatctggcagatcgtttcgggaaagccgtatccggcctgaacgaatttatcatcacggccgaacacagccaaccggattacgacaaaatcgatttccccgataccgaactgggagaaatcggtcataagatcgtcgacaactacaagatgctgaaaaagagcaaagatcagctcaatcaggaaagggaaaaactgttacgccactttcaccattccgatgaaggtatttgtattttctcggcagatcacaaaaagatatatgccaacacccatttcatccaatatgtaaacactattttagacgaacctacctttgatgtagatcatattttccaggcacctgaattcaaagaagccgaatttttcctgcaaaagaacacaccggtcaatcctcaggccaaatcgattccgatctggcaaggaaaaattgccaaaaacgggaaacatttcgctgtgaggttacttattttctacgacaacagttacgaaattactttgaacaacgtcacctcggcagaaaaaaacaggctgctgaaacaagagatgaccaataatatcgcacacgaattaaaaactccggtcagcagtatccgcggctacatcgaaactattctcgaacaggaacacctggaacctgtcaagcagaaatttttcctggagagggcttatattcaaattcttcgcttatccgaattaattcgcgacgtggctttgatcaccaagaccgaagaagcctccgacctattcgagaaagaaacgatcaatatccgaacgaccatcgacgaagtgaccaccgacctggaagtatccttacaacacaatcacatcgtcgttcacaatcatatcggcccgaaagttgaaatcgaaggtaaccataccctactttattccattttcaggaacctgatcgacaatgcgatcaactatgccggagaaaatatcacgatcggtatcgacaattatatggaagacagtgaattttactatttttcattctacgataccggccggggaatcgaagaagaacacctggaacgtattttcgaccgtttctaccgggtgaatcaaggcagaagccggaaaacgggcggatcgggtctgggcctctccatcgtaaaaaatgccgtattgtttcacaaaggccaaatcacggctaagaaccggaaagacggtggattagagttcattttttctttgagaaaaaaattattttaactttcaggccacgcaacctttttagttagttttcatctttataacagaaaacaactaaaaataaaaacatgaaaaataaacatttcaatctaacttcggggatcgttcttatcctgatcccccttgttttttccttcaccggttgcaaggatgattatgaaacctattatgaaggttatggcctggtcagtaaatcaggcgacgaaaagtttaccgtcaagctagacgatggttatctgctctatccccgggaatattacttcaatcctgaaaaactgaacgacagtacccgtctacggatacgattcaacattctggaagaacaggatacgaatttatatgcccggattgtctatgccgacacaattctgaccaaatccattcttccgtacgacgaaacgattttggacagtgtcggaaacgctccggtaaagatcgtcaattcctggttcgctcatggattcctgaactttgagtttatgtttgctgcccatctgaatcccagtacaggcaaaacacatatggtaaatttattacaatgccccaccgaagacgaccgtctcatcttcgaattccggcacaatgatttcggagattcccgggataaactctatttcggtacagtttctttccccatacagaagctcaccgaaggctatgaaaaaccgataaaaatgatcgtcaaatataacgattcggccaatacaacgcgcagcatcgaactgacttacaagtaatcggaaaatccccaaagatcggtcattgaactttggggattttcttttatctatcaaagtctgaaaatcagattgacaatattagcctcttctaaaaattcatctgagtagaaatactgcttgtcgagaaaaagccaggaggtttaccctacgataaaagcaggcaaagaatcaaacgatcctaccacaaaataaaaataagacgatttgtaacctgacacacagaattatagtatctttcaaaaaaaaatctcatttattattcgcatttttaaagtcaaaaattttgcagttaacagaaaaaaagcatacatttgtacccgcaaaaagagagagttcttttacaattaagggcagttaccagagtggccaaatggggctgactgtaactcagctggcgtagccttcggtggttcgaatccatcactgcccacaaattttaaattacagctattagagatagttattagtttaaaatttgtttatgcctccccattacggatcgaaaaagcatagtgagtccggctagtgtgtgaggaacaatacattttgcggaaatagctcagtcgatagagcactagccttccaagctgggggtcgcgggtttgagtcccgttttccgctctctgaatgaggtagttacgaaagtagctaccttttttattttgtggtttttcgtggtttggaggcatctgtttaaaccgaggtttaaaccaactttagccatgaacgcctctatttcagtggtttgttacaaatcaaaaacactttcaaacggagaacacccattaatgttccgaatatccaaagacgacctttgtaaaaaatggaaaaggattataaaccgtaatctgttaaaaaaaatcatagagacggctgtagggagattcttgaaatacgggtatgtagcgtggagtactcctttcgtcatcgtctccacagctttcagcaaccttgtccgtgccaaagggaaatcgacagaggcactgaacggaatactgataggtaccatacagaatatcgtactcaatcgcttgtttatcctatggctcggctacaggattgccggtgcggcatgggctacggccatcggttatacggcagcaacgcatattacgttatcttgctgacgggtaaagactcccacctgaccatatccatagcctgtttcaatatgagaaaagaaacagtgggaccgtctcaggcagtcatacgtctgtcatgcttcgcaggattgggtatgggcgtgatactgaccttgatttgcggagtgttttccgaagaactgatcagttgtgtcattgattcggaaggtattcgggaatatggtacgccgctcgtccggacgttgctgctgtcgggaccagtgatgggtatcctgtttatttatatcaacaccttgcaggcgatcggggcggaagcggcacaacctgtagcagaattctttccctccttctggctgtttggctgttttggcggactgaaaagagaatggggaaagccccctcttttgtttaacttaagatctttatcggacattacttgtcattatctcatagcggtttggaaagggataagcttcaggggttccggcattaacctgaatggctgttcagcactgtaccctcaatgatctgacataaacggacataccgtccttcttagatctccggtcaatcctacctgaaacgattcgtcaaacaccatgaaaataatttcccggcagaataccggaataaatttatccgcaaccagcgaaaaaatcaagacatataagaaatcaccggggagcgcaaagctccatgccataaaaaaaatcctcaaaaacaattcccctatttttagtatgaaccggataccttcacattcatttcatctcttgtactggcggacttaatatcgacatgcatctcgatatcttttatattaacgggcaattccagaaatgaataccccggatgacagtgataagcaaacagccagcgattaccttcaaaatcagtttcgtataaagaccggtcttcatataccaagtatttagatcgattaaaataattcgattcttgccctcgaggtatatctattttcaagaaaaccgacatgacttaggtaagcttcatccgtcaactgtttggcatgtacaggacattgttttacacaagcattacacttgatacaaataccggaaacctcagaaggatgatccagccggatagcccccataggacaaacttttgcacaacgtctgcaatcgatgcacgcatcggtcgtaacaggttttgctttcaggaaattcaccacctcttcatcccttcctttgggtttataatacccaccgtaatcaggagccccttgtcccggaatctttattccggtaaattctcctggttgcaatattcttctcacgatctctgccgaaaactgttctgccttttccagatcttcccggtcgggacgcccggtagccaaccgggtcgtgaaagaatgctgaccgacaaaagccgcagcagctatcggatgaaaccctctatatcttaaaatatcatacagttcgacgagcgcattcccataggaccgattcccataaaccactacaggtaccgcccaggccccattactctgccaggtagtcaagtagttcaataacagattcggtaaacggccggcgtaaacaggcaaaccgacaatagccaactccgattcccgaatatcaggcactttcttccgccccgacggcaatgtaaagtctttcacttccgtcacgacttccggtaataacgtagtgatacattttaccaaatgggtaatcactgttttagttgtgcctgtcggactaaaatagaccgcatgtactttctctattttcataaagtatcggataaatagtctgtcaaaatctttcccacccgatcaatcccgaacaaagctgcaattttattccggtaaaaccaataaatcatgtttattaattttgaataatttgcatatatcatctaattccccaatctgcttatcgctattattcgtaccgatcaactccggcacgatattcccttcgacaggggcgcatttggatttttcacagaaacaggaagtcgggcaaaagagataatccatcttgttttcatcattgaaataatcggtttgacatgttttccgttcagaacaggttttacttcattgcctgtacaaggataaaagcccgattttaaagaaattctaaaggtttttcccaaaataaccgttcagcacaaagtattgcctccgtccctgtggactaacaaacattcacaaaatatcatttcccttataaaatgatttatatatctttgccgtcacgtaaaaattgcgtggagttgccggatcgttgtctcgtccggcaatgaaaagggaatcaggtgtaaatcctgaacagatccactgctgtaagtttcataacacttttcggacgtgctttatccactgttcctcgtttggaatgggaaggaaaccgaaaaggaaacaagtcagaagacctgccacgtgattcatttgtttaacgttcaaagggaagaagaacataaacgtcagtaaatcatgctattcaaaaaaattctctgtttttcatatttgccgtaatagcagggctattcacagcctgtgattccgcaggaacggattatccctacgggccggtaagccaaggtaatatcgaagcccttgttctcaatgaagggggaatcaatcagaatatgggcggtatctccgttttaaacaaagacggatcagtcattccggatattttccgggaagtgaatcaccgaccgctgggtgatgtggcccaatccatcaccaagatcaacggtaaatattttgtgactttggataactccaaaaaaatcgaggttatagatcccgaaacgttcggttccgtcggtacaatcctctatacccaagcgggatttccacgccagatcgtagccatttccccgacagaagctatcgtatccgatctggagagacaactggtgcgtatccggactgtggaaccttatggcgaacctctggaatatatctccataccgcgatcggtcgaatatctggtaacggtagataataaaatcttcggaatgactaccggcggaatatatgtcttcgataccgacaatatcagcaaaaaagctgtccgggtcatcccggaagtaaaaaacgacgaaaataccaaaacctgccggatgctggtcgataaataccaaagagtatgggccttgatgaacatccgggaggggaatcgagtctgcggaatagaattggtttgtatcgacccccaccaagaaaaagtcgaggtctcttatacccttcccatcagtgaaaaggcaaatccacaagcaggagacgtaatcggtacaatcacctataatcgcacggatatcgatcctacactgaactggatttatttcaacgtcaaaacctgtaaaagtaacacggcagcagggattacctctgtccaaagtgtttaccggatgaatatcggcacaggagaattcgaacactacctcgatcttcccggaatcgatatgatgtatgggttttcagtcagtccgcaaggagaggtctatctatgtgactgtctggattacagtgcacaacgcggttatatccggaattacaaaaaagacggttctatccggaattttcgagtcggtatctatcctagccaagtgtatttcccctaattagcctagcgatatgaacctatacaagagtctgatcttcattttatacctcggcatattccttgggtcgggattccgtactcctgcccaatcccgggattcgatcaccctatacggcacattagacaccgtgcaggtcatccgccaacgtatacaacacgccaacgaggcaaacgcaggagcccgggtaacccatatttccccagccattttacaagccaacaaaacccgctcgctggccgaactcctgaccgaccatacctctatttacatcaagagtctgggaacaggagcattatcgacagcttctttccgtggaaccagcgcttcccaaacacgggtaaactggaacgggatcaatatcacacctcctttatcgggtactttcgatttttcacagatcccggtcttttttacagataacatcaacctgtactatggcagcagccatgtaaaaaacggtaccggagctatcggaggtagtgtgaatttattcacagacaccgattggaaccgaggcgtaaatggccgggtactggcagagtatggatcgtacaacacatataccgtcggtggacaggcgaatataagcggtaataaatcggcctcaaagacacggttatattatcagcattccgacaacgactatacctatctgaataaagtgctgaccaatattcctttccgtgaaaaaaggcaggatgccgcttactctcaattcggaattatgcaggaaggctatttcagagtatctccctacacccgcctgacagctgtcgcctggtatcagaaaaatcaccgtaacctcccccaaccgctcggtgtagtcaaccgctcccaggaggatcaggaggaaaataatttccggggatatgccggactggatttcagccggggtatccatgaattacatgtaaaggctgcctggctgtatttctgccaaacttacgatatccggtatgacggaggtttattcgatcccaagggaaacaaaaaccgctctaacacggcacaggtcgtggccgattatacgtactccccgaccgataagcttatcctcaacacgacgttaacctattctcacgacctgatccgggtgagtagctacatagacatcgactcatcgaaatatacgctcgacggtatcgattttgatattcctcaggtggaatcccctttcagccaccaccgtaacatactctcctggcaaacttccgctttgtggacgcctatccggtggatgatgatcaacggacaatatatgttcgaacataacgacaatcggaatgtatccacctggtcggcaggaatagtattcaatctattgaaaaaagaattaaaattgaaaggaagtactgcttataattatcgtttccccagtatgaacgacctatattggcgccccggcggtaatccggatgtaaagccggaagaggggtattcttacgatgcttctatttcttaccggaagagtataaacaaacatctcttattcgatgccgaagtttccggttatctaatgaacatcgacaactggatcctttggctccccaaagacggaaaccaatgggtgtggactccgcaaaacaaacgaaacgtacgttcctacggcgtggaactttatggaaaaaccactttccactacggggaactcgtatcttctctttcgggtaattacagctggtcacaatcccggacccgcaagaaacaacacgtagacgacaacgcctatatgcggcaaattccatatgtaccgcgattcaagtggaatctgcgctggaataccgattataaagatgcttttttcgtctggcagatgacttacaccggccggcgtttcattactaccgacgaatcatatgccacggatccctattccgtacataacctcttgctcggttaccgctactccttccggaatgggacaagcctaacccctcagatgcggatagataacctgttcgatacctactatgagtcgacccaatattatcccatgcctttgcgtaattgcttgttctcgcttttattcgaattttaattgaatcatataaatcctttaaataaatagaaaccatgaaaaaaattaattttacgcttttagtttgcctcctgttagcaggaatattcgcatcatgtgacgatgacgacaaatatccggttcctcccgaagtatctatcgagagtgtaaacggagtgttcgcaatgcctcaggaagactctatcgtactgaaagcgaaagtagaaagtccgctgccaaccacactgagctggtccgtcaaaggaaatgaagtctctaaggatacagtatttactttcaaaatgaacgaattggggacctacgatgttaaattaaccgcgaccaatgccgatggagtgacttctgccacaacatccatcgaagtgtacggtaaatacaaatacggtacttttgttttaaatgaaggttaccaggccgatccttctacattgatattcatcagcccgaaaggtattctcacggacagtgcctattacaaggcaaacggcagcatgctgagccttctttcccaagacttatttatcgccaacaacaaactgtatatcatttcacaaaaaagcggagacgacggttatcttatcgttgccaatgcagaaaccctgaaaaaagaagccggctataagaccgaactggaagataaagtaagcagtccgactcatgttgccgtactgggagacgacgatatctatctgcgcgacaacgaaggaattaaggtattccacccatccagcggcgaactctttctcatcgagggagctgaaagggctaataagaataccatggctgtaacggaagggaaaatattcgctgcagcaggaaataacgtccttgtgatcgaaaaaggaaaaaacaaaatctccaaatcgatagaattcaatgatccggtcagaggagtcgtcaaatcgccggacggtaacttgtgggtatccacttcggccggggaaatctctaaggtcgatgcccaaaattatactattatcaaaaccaatactttaccgggagatgccattagcactcagtcggcctcatacacttctactccgtgtattacagcacaaggagatactttgtacatgaacggcacaggtaccaaaatctatcgtcacatttttagtaaaaaccagacggatctgatggtcgatgcggcaaacatcgtgacaacaactagtgtttacaataccatagccgtcaatccggttacaggcgaagtctatctgaatacaatcaaagggtggggtaacgaccgtctgatcaaccacatcagtgtattcgatttcagcgaaaccgaaccgaaattgagcgccaattataagaatcataccaattatccagccggaacattctttacttataattttcaataaaagaattttgtaaatgaaaaaatactattctttatttctattctggagtctgcttacaggtctatcgacctcctgtagtgacgacaacaaaaaagatccgtatcttcctactccgcctcaggtttctatcggaaatccgagtgggcaaaccacctgtttaccgggtgaaacgatcgagttaaaagcgattctgaacaatccgttacagaccactttccagtggcaactgaacaaaaaaacggtttccacagactcaatctatcgtttcacctctcaggaccccggtagttttgaaattatcctgaccgcaaccaatcaagacggcaaggattccgacaccttatttctgaaggtcaacggtaatcggttcgcgatctccgatctgaaaaattggaccggtaacggagaaaacacctcggtctttgccattcaatgggttacaggggagcatctgcaagaaccggcagaccaggaagtttttttcattgcctggggatatcgttggaataaaacggaaactcttacaggaatcgatatgctcaaagctattgccaagaacgatccccgcctttatgtcgccttatcaggaaattatatcaaaggattcggttatgacggtaataacgacggtaaaatcgaactgaaaagttctactttacatctgacacaagctgattttacaaacgggctctacgaactctccgaatacgattctgacgaattgaaaccgttagatgcagccgattattggatgggatcgaacgatgcctataccacctactggctcggttcgggcaatcaggtgccgacagctgccgactttgaatattctcagacatttgtcgacaatcgccaacttgaaaatctctcctgggatgtatggacactttctcccatcgattacacgtctatggtcaatgtatcccccatcccccgattgatcaaagctgcagaagcaaataaataaaaagttaaaacggtgccaacaggtaaaaactgatgcgcaccgttttctttttattcaaaaaccttcccggtcattttttcaataatccggtcaagtcctcgaaagaagtcagtatagtagacattccatttttttcccaactcatttcatgcggggaagtaaccgtcaatacgggtaaattttttctatcggcatttccgggcagaccggaatagccaaaacgattcagagcattgacacaccaatgccaaaggcagggatcgtccgtcctgacgacgacttcctgataatcctgtacgatggggaaatagcccccacgtccccggtcaaaacatattttccggtgatcgaacaaacagtccagtccatcgttaaagaccatatcctccgtaacgccacactgcaatccttttccgggcgcgagcaaccacagccggtcggcctggatcagtgcctggtcgatatcgtgggtagacagcagaatggtcttatgttgttcgcgggcaatggtatgcaataaagtcatgatctcgatacggcttaccacatccaggaaagctgtgggttcatcgagcaaaatcaacggacattcctgcaccaatgctttggcgatcatcactttctgccgttccccgtccgacaattcggccacgtaatttgcagctttatgggatattcccactgccgtaagagcctcttcgacgagcttatgatcttcccggttcaaacggccccagaatccggtatggggctgacgccccaagcttaccagttcatatacggtcaatccgccggcctgtgtcttatcggtcagtacgacgccgatcttgcgcgatttttcccgttcggaataatccctcagcggacgtccttcaagccataattcaccttccaaaggcaattgaaaagccgaaagagtacgcaacagagtagatttgcctgccccgttaggacctaacagacaagtcaactctcccgcccacaaatcgaaagacagatcccggtgtaccactgtagaaccgttcttaccatgagagtagccgatagccaattgacgggctgcaattacaggtaaagtttccatagtcaattgaaatattgaattttacgctgtttgaccagaatatagataatgacgggagcacccaaaacgggagtgatggcgttcaatggcaaaatccccgtttcgccgggtaatacactgatcagattacacaacagggctaccgcccctcccagcaataaggtcacaggcatcagggaattgtggttcgaagtacccagcatcaagcgggcaatatgcggcacggccaatccgataaaagcgataggcccgcaaaaggcggttgttattgccgtcagcataccggtcgcaatcaataacagattgcgggtaagccgcacattcacacccagattttcagcataccggtttcccaacaataaggcattcaaaggtttgatcaacatgaccgataaaaccaaaccggcggtaatcgaaacgataaatacaggcaattgcccggaagacactccgctgaaatttcccaatccccagatcatgtaagaatgtactccttcggccgtagagaaaaaattcaataatgaaatcaccgaggaggtgatgtatccgatcatgatcccaataataagtagcatcaaattattctttgtaaaagcagaaaagaacagcaagattcccatgacgatcatagccccggcaaaagctccggccaataccgccagaaaaccggatatactgaaaaccccggcagtaatacttcctccaccgagcaacatcaccaaggccacgcccaggctggccccggtattgatccccaatatcgaaggtcctgccagcggattactgaaaacggtttgcaacatcaaccccgagacagccaaggctgctccacacagcaaagcagttatcccttgcggaatacgcgattccagcaaaatgaaccgccagctctcccgttctacggcatgtccgcacaaaatatcccatactgcgcctgcaggaatacgtaccgagcctacccataagttcgccgcgaacaacagaaggatcgatacgatcaaaccgatactatatttccatccggatggtaaagatttcatttttccaatcttttaaaataacggcactctcctgccggtaacactcccgggtgaaaaatccggatcagatcttccaacagccgttcgggatgaaaaggggtctctgtataaaaaggtacctgtcccgaattacatccatacacctgcccggtttgaaaggcccggaaaccggcatatgaagcgtagtcggactttaattcggtcagggttttatcttgttgccggttgtatttgaataaccaaaaatcggcatcctgccctcggtcaaataccgtttcaaaagacaaaggaatcgaaccgctatgttcgtcctccgcccacatataagtagccccggcatcctgatacaaccgtccggtcgtgctttttcctccgggtacataccaggcggaaccgcttttcaattcagatatcaccgtcggccgctgatttacagacttgaccaaatcacacagctgtaaataatccgcacggacagcagtgaataacgaatcagcctgccgccgtttcccgaaaagcaaaccgaaaaaacgcatccattcagaccgccccaaaggagaggtctccatataatcggcacattcgataaccggtatccctaatttttcaatccggccataacctccactattttcaaaaggggagagcaggatagcatcaggatgaaagtcgattattttttcaatatccggattcatagtatttccggcgtcgaccattcgcccggaagcacaacgattttgtatttcaggtatttcgatatattgcagatcacatattccaccaatccgatcgattgcccccagttcggacagaagcccgcaatgtaccgaagaatataccaatgctttttccaccggcgtccggaccaaggtcccttcaggcaatccttccggcaattcagtttcccggccgaccaaaacataggtatgtaaaatccgggccgtatcccaagggttttgtacccgcaccaatatataatgttcactcgaatctatccgaatccgcccggcatattccatccggagcgcggacaaagcatctcctgcagaagccgaatgcctacttttacaacctacaccaagagccaacaacagccccagcaaccaaaaccgcatcaatctatccatatctcaatgatcaaatccatcccgggacaatactccccgggtataataatgtttcacttcacgcatttctgtcacgaggtcagccaaagccagcaaagcttcggaagcataacgcccggtaatcaccacctctgtccctgtgtcacgcagcccgatgacttccagtatttctttatcggagagcaaaccaaaatacacagctatagtcagttcgtccaggatgaccaggttccattcacccgaagccagtattgccgcacattcccggagtccttcctagacaaggcgtacgtcttcgtcttcgggccggtgatcaaggaaacatcctcttccaaactgccggaccgccaaccgcccggggaaacaggcttccagccgggtttcgttatatttcatgcttttgacaaactgcccgataaacacccgtttaccagcacataaagcacgtaccgccaaaccgaatgcagccgttgtcttacctttaccgtttccggtataaacctgaaggtatccctttgtttccattgaagcgtaaaagtacaaaaaatgcctttccttacaaaatacgaaaagccccctgccaactaaaagctgcagggagccgtccgatgtaaagtatttccctcaatttcgttccaattctccgtttttagcctgttcgaaagtcggattataagcattatgcccgacaacccaagaagtatcatccgtcaatcccccgattgctttttccaatcctttaaaagataccaggcctaactggtactcgatattgatcactccgacattttccagggctctaaaacaatccagattagtcaggacattattacaccaactatcctgatttttactgtaagtagtcagcaccaatatcccgacttttttcaaaacgggagtatagatttcctgtaacatgctcactaaagatccattcacatagctggttttgatattcaattcacccgtcacctcctccaaggccggaaaacgaagggcatcacagactccggtataggtcatgttattcactatccttaaaaccggaaattccgtcggctgtactttttgtccgaatccttcggaaagggtcaattttccgctaatctctgtcaaatcaggaaaacgaagcacacccaggctggcaccatatgcctgactcaccgacaaagtccctattttctttaatccggggaagttgtattctacccgtccggtaatagttgcaggcatattacttaccgatacattctgcacctcttcgattcctgaaaaagaaattccgggaatcccgttaatggtcagattcgtattcaaggttttactgccctttaacgtcaaagcattttttccggtaatctgcagggcatctacttcaaggccggtcagatccaaggaagtcaaggcatccaaattgtttaaaatacaattgttcaaatgcattcccttgaactgggccagcaaagaaatatcctgcaattttttcagtccaatgagcgaacattgtgatccgatggatttcaatacggggaaagcgtcaatcgaagtaacctcattcaaattactcagactcatcgaaccaccgatagaggtcagggcatcgaatccctttaattcgctgactgccaaaccggacagggtgaaattaccaccgactgttgtcagattcggaaaaccgtcgaaaaccgtcaatgcactcatcgaggagaaatcaaattttccatccacttccttcaatgctctcaatgagcttacctctgttattgccattctggttaaaacaaaatcacctttcactcgcgtcaatgcaggcaaattcaactcttgtatcttatcagatgcatcgatacagaatcctcgcagaccgacttctgtcaaagactccaaactgactttttccaaattttgaatgtaataaattttaaatccaccgagtgattttactgaaggaaaattcatttcttttacttgatgcgtccaccacaattcaaaataatcggcgacttgctccaattgggtgaagttcaaagtttcaacagcattcatctgctccaatttaatagcagtcgccgattttaattccgggaaagctaactctttcaccctataaacattactcaatgctaattgatttccaatcaaacttaatttcggaaagctcaacttttccggagcattcaagacaccgttcactttcatggataaattttctccgataaccgataaggccgaaaaatctatatctttcacatctttaatctgaatcgacaaatttcttcctaccttttccaatgcaggcaaactcaacgtttcaacggtatcagctctgaaagtcaattctgaagctacttttttcaaatttggcaattcaatctcccgtatccaccgaagtccaatggttgcattctgtattacacgtcccatcaccaatcctccaacctgttccaaattttccaaaccggcaaatgaagttccggcataagtcggatttatggtcaccgttccgacaacctcttttagtgaggccaaagctgccaaagaagtaagggagtcttccttcacagttccttcttctttaccgataaccaaatttccattgactttattgatcccctgagcagcaaaggcttccaaatcttcaaccgaagtcagacgaacatctccttcgctacccgtcaaggttctccgtactatatacttgtaaacacgctgagtattattgtaagcagttactgtaaaattttgtaactttccccaatcctcaacttcaccaggatccggagatatccgggcattttcactacacaaaatctccattatcgccccctcaagagaaagattttcagggatactcaaaatcagactatctcccttaattatcccggcataggaatctccctgctgaaccagtcggaatgaggtgatgtagttttcatttccggaaaacaggctgtcatcgtcctcgcaactcgtcagcgaaacaataatgccaagcaacacaatatatattaaattatttatcttcataggtttatcattttttacatttacaactttttcagctgattaatctcacagttgaaaaacaggcttcatctgttactcctgaatagcaggttttatccattgctggtcttctaccaattgcttgtaagtcggattgtacaaattattttccacactccatttctcttcgggacaggtcaggatggcctttttaattgcctcgtaagaagctagtttcccatgatcatgaatccggattccccccactttttccaagctggacaagaaatccagattttccagagtttgattcaaataaccggtattctcattatctccccagggagttggtccgatcgggcgcagttccaatgtccccccaacctgcttcaaagccggatacaagaccacggccggtcccctcgatccataatagtcatatccggtctgaaacatcatatcctccccgaccgtcgccagattcggaaaagtcttttcatcataatagtcgatacttatgattgccttccctccgatagacttcaattcggggaaatggtattccttgatattggaatataattcaaaattaccggttacttcttccagtgcaggaaattcgacggcctttacattggaattggcccagtaagagaaatccccgttaattttacggatattaccgatttcaatgctccctccgttcaggccaagataaccgatattcagttttcccacttcccggaaaccttctaatttcgggaaatatcccgaaaggttatccaaactgattttacctttaaaaatatcgtcaccgatcaccgtcgtattttccaatccggtaccgctgaatcgcaattcctcgatttctattccctggatatccaggcgttctatacctttcgatactacaaacaccttcaaatttttcaaaccggcaggcaacttcaaatattctgccgtacagttcaatgacagcttccctccgattttttccaaagcccctaatttttcagtatccagtcctaaaagtgtgacgtttaaatcttcgattaaattagtcgaaatttcataaagtttacaaagtgatgccccttacaggacgtttgttaattgactattgacaaataccagtttactgtaaaacaacatactttaggaaatatttacatcatattgattatcaatcattcaacattcaatttctctactcatttccctttttttcagctgttttttgatggaagtaaagcttccaatcattgtcaattgttaattgtcatcggtcaattattcctcttgtggaaatccacaaaaaaatcgaacgtttttccatcgacatccaatagaataattccaattaaaaatcagtacaaccggcattctaatcccagagaacaccaagtttctgatcttggcaggtcttctgacttgctttatctccggacgtccttcccgttcatgtaaaacagtggcgtgagtaatgtccaaagactttaaaaagcttacagcagcgggtctgttcaggattcacacctgattcccttttcaccgctccgttacgaaaataacgagcagcaccaaaatcgacggtaaaagtacaaaaaaagagagatgaaagtttattttaagtaattttttaaatcatttttaatataaggcgtaaaaatatactgggacaatctttaccagccgattatttcaaaaatacgagctttgacatttaagatgcaatcaatttgatttatcagtgccaagatattgatttactcttaaatactctttcctcttgctaccgtcaccaatagaaaaggaaagagtataattgaacaaacacccggttcatttccgatttttacttccggagtttttctgtcaatatggggacaattttatgtacatctccaacaatccccaaatctgctgcattgaagatcggagcatatttgtctttattgatagcaatgatgtattctgattcttccataccggcaaggtgctgaatagcccctgaaatccccagggcaaaatacagatccggccggaccgtctttccggtttgccccacttggcgttcgtggggcataaccccggcatcgaccattgcccgcgatgaagatacttcggcattcaatgtttccgctaaacgacccagcatgacaaaaccagccgtactgccgacaccacgcccacctgacaccagcactttagcttccgttatgtcgatccgggttttctgttctttcaccgttttcagaattttaactctgaatttcgacgggtcgaaactgactttcatattttcaatcgtcccccgccgtgccggatctttgggttttgtacgcatcactcccggccggacagtagacatttgcggacgatgttctttacaaatgatcgtagccatcaggttaccaccgaaagccggacgggtcatcagcaaatcattttcgggcgaaatgtccaggcctgtacagtcggccgtgaggccggtagtcagccgggcagataatcgggggcccagatcgcggccgatagtcgtggctccgatcaatacgatggccggatgacgttcacggataaattggctgacagcttgtgcataaggctcggtattgtactctgccaattcacgttcgtccacacacacgacaatgtcggcaccataagcaatcagctcctgagcctggtctttcatatcataaccgagcaataaggcgatcactttctcattcaaggtatcggcaagttcccgggctttacccagcagttccaatgccactttttgtatgataccttcgcgttgttctacaaacacgcagacgtctttatattgggatttatccattgtattcaaattaacaatgaacggtaaacggaagcagacctcagccaatggccggaaaaaaagtatatgttcaaggtataaaaacttaaggtttaccatagtctgtggtctgcaatccgttgctacctgttcatcagattataaatttttctttcaatttctctacgattatatcggcagcttcggcaggttccacttcaaacacctttccggctgcttttgctcctttggtaaatgatttccatacgcgggtgggcgatcctttcaagcctagtttttcttcttctacactgatatgttcaaagccccacacttcaacttctttgttataagcctccacaattccccggaccgacatataacgggctttattagccgttgccagcaccgtcaccacgcaaggcgcatctacctgtaccagctgaaaaccgtcttctgtggacttccggatcgtaaatgtcctgctcccgtcaaattccaggttttcaacataagtcacctgaggtaaatccaaatgttcggcaatctgtggtcctacctgagcggtatccccgtcgatggcttgccggccggtgattaccaggtcaaaatccaacacgcgcaaagcgccggcaatcgcattcgacgtagcgagagtatcggcaccggcaaatttccggtcgttcaaatgaatagcacggtcagctcccatagcaaaagcctcacgcaaaatatcatcggcctgaggaggccccatggttattaccgtgacttccgccccatatttatcttttaattgtaaagccatttccagtccccctttatcgtcgggattcataatgctgggcaccccatcccggatcatcgtccccgtagcggggtccaatttgatctctgttgtatccggcacctgtttgatacatactactattttcatacgtttatcattttttcatttatcgattatcttttctccactcttatttgagtaatgcagctgcaatcaccatccgttgtacttcagacgttccttcatagatttctgtaatcttggcgtcccgcatcattcgttccaccggatattcacgggtataaccgtagcctccatggaattgtactgctttggtcgtcacctccatcgctgtttcggctgcaaacaatttagcctgtgcagagtcagcagaataaggttgtttcatatcctttttccaagctgctttacgcaccagcagacgggcagcctgaatcctggtctgcaaatcggccaattggaattgagtattctgaaactgtccgatggaccgtccgaattgtttccgttcttttacatacttcaccgtttcatccatagccccctgagcaatacccaaggcctgtgaagcgattcccatacgtccgccgtcgagtgttttcattgcaatcctgaagccttcccccacttttcccaacagattttctttcgggacgatacaattttcaaaaatcaactcacaggttgcggatccccggatgcccatttttttctcttttttaccgatagagaatcccggaaaatcacgttctacgataaaggccgaaatcccccgcgtcccctgtgccttatcggtcatggccatgacaatgtaaacgtgtgcataagcagcattggtaataaaaattttggagccgttgagcacataatgctccccttccttcacagccatcgtttgctgtgccgaagcgtccgtgcctgcattcggttcggtcagtccgaaagctccgatccattcgccggaacacaagcggggcaaatatttacggcgttgttcttcattgccgaactcataaatcggagaagcgcacaaagaagtgtgtgcagaaacaataacccctgtagtagcacatacccgtgacaattcttcgacagccatcgaatagagttggttgttgccacctgccccgccatactctttggggaatgggatgcccatcattcccaaagcagccattttctttaccgtttcttccggaaaacgttcttcctcgtcgacagctgctgccaacggtttcacttctttttctgcaaattcccggatcatttgcaagaataaattttctgtttttgatgttgaaaaatccatataaatcgttatttatttttccatacggaatgtgcaatttttaacattaaccggattttgttccactgttgcttttcggtaagtttgtttccctcttcggtagaagcaaagccacactggggactcagacaaagccgttccaggggaacatactggctggcttccgcaatgcggtttttcactttctgtttatcctcaagggcagcatttttggttgtaatcaatcccaagactacagtttggttctgtatgaagcgtaagggttcaaaacctcccgaacgctcgtcgtcgaattcgagaaaaaaagcatccaccgggaggtcgaataaggtttcggcaaccggctcataccccccccacgatgcccaggcagaatgataattaccccggcaaacgtgcattgtaatggtcattccttccggtcttgagttcaaagccatctcgtttatccgggcaaaaaggagggccatttcttccgcattcacctgtggattgcagcggaatttttcatcacaaagcataccccatgtgcaatcgtcgaattggagataacgacatcctgctgcagcgaaaccactgatcacctggcgataggcctgtgctatatcttctaataatccgtctatccggccatatactttcagggtttcatccatatttccctcgcggatcaactcggccaaaagttgtgccggagaaggaatcgtttgcttgggtatcgcctggccagccagtttctggatgaaacggaaatgagcgatcatgggatgattgtatcctgtaattttcccggtcacttttacagattccggtcgggtttccagattgtgaaatacatatccctgcccaactgcctttttctctatgcctcctaatccccaaaagaagtcgaggtgccaccacgaacggcgaaattccccatctgtaataacctgtaagccgacaactttttgttcggctattaatttttcaatttcttcatcctcgatttgttggagtgcggcaggagataataagcctgattcgaagtcttttcttgcttttttcagtcgttccggtcgcaagaaactaccgacaatatccgccctaaacggaagttttacctgttccattgattttaacagaattaaggtaactcacagataagatagattgcatgtaaatgaccactgccctgtacacaccaagtacagtttaccagttcatttattctgtcacctttcacccgaaagctacgaattaaacaaaagtactcaggcaggtcttctgacttgttccgattgtacgccttcccaccggacataccggcagtggcttccgaatgtacaacctttgaatagaacttacagctacggggatagtccctgattttcacaggagttcccattttaatcctgaatcagtgatgaccgattctgaaacctgataccgacacaaatataacggaatttatcgaataaaaaaaaagttggttattgttttgaaaaattcaaaagaaaattaaaaacaccggcaggatgcgtcggacggatccttcaaataaaaacaggccagaaggaaatacgaacactctgccgcctcccacatacacccgcatttatccccggtgttttaacagtacagtaatatatatgtgcaggtgtccggctctgaatccgcgaaagcacagacgattgcttgtatggcaggtcttctgacttgctccaatccagacgccttcccgtcggaggtataaacgacagtggcagaagcattgtccggacgttgtaaagaagctcacagcagcggggcctgtccgggatttacacccggttcccttttatttcctataccggatggacataggaaagccaatacgcttcaaaaatagagaataaaatttattttacaaattttaagacaacttattttgaaaacaccggtagaaatttcagcccaccgatgcttataaacgattcctaaagcgtataaataaaaggctggaatcgatcgaaagataagaccataaagcaacaaaatcacgcagacacatttcaggttgccgacgcaaccactggaacggaaaaaccaaactatggtgcaggttttaagcttatgtcgattggcacatcggtaaataaaccactgactaacatcagatattcgggaaatttcaccccatcactccataccagtggaatatgaagtaattcttcagccgtacggccgagatcgaaaccgaaagattccagggaatgacggatcagatgaggatgacggcaaggctgaccggtgatacgggtacacgtatcgtcagggcaaaggtgacaagtccctgcgtaacaagccagactacccggatattccgtttcaagccaccgcaaccaagaatctagttgaaggcgcacttctgtcaacaggccgataacgacctctttctctgttcccgcaggaatagttggtacagaggatggatcaggcacgatctgagtgcctgttatgcagatatatttgtacttgccaatccttgcagatatatcgaaatcgtatggtggacaagcccagcaacgatcataacgattacatctgcggcaaaatacaatgaatttatcttcatcccggtatttccggatatactccccggccggcataaaaacagtatgatgtgaaatagcataatccatatcacaaaagtaattaattcctggctgaaaaccgatggttcctgcgggtacttttttatagccgaacagaggaataaaacagcgacttctgaatagttaccggtaagtaatcgttgacaaggcgttcaaaaacaaaacgttactataattggctttagcgtgaaaatgaattcaacaacatactcagattgctgataaacagccgtacggacattgccagcaggatgatgccgaaaaatttacgcaggacgtagacaccacttttccctaaaatgcgttccaccagataagcattgcggagtaccagataaaccagaagcatattgagtgaaatggccaggatcaggttggagagatgacattctgcccgcagagaaagcgtcgttgtcaatgtccctgccccggcaatcagaggaaagacaacaggcacaatagttacactcccggcaggtccatcgttacggaaaatttctacactgaaaatcatttctacagcaagcaccagcaataccaatgctccggctatggcgaaagaagaaatgtcgacattgaaaagttgcaacagggcatcccctgcaaaaaggaaagtaatcatgactgcataagagatcagagcagctttccctgcctgcacctgttttcctgttgcattgagattgatgataataggcgtagaacctgtaatatcgatcacagcaaacaacaccataaaagcggtgaatatctcctttatactcaaatgcaaatccatctatataaactttacgaactatattttggggtttgcaggccgcaggttatccttataaatcatgaaaccactccgaaatattttttaacaactgcgggcactgcaaacccggccacaatccctattttcaatccgcccagatctcttcatccgaaggcacatggatacgtgccgacagcggagcaatccgggtgatatttaataaatgtttataagtaaaattctccgaaatcgaattatttccccagcttccgcatcccaacgtattggttacaggcagaccgttctgaatagacccaccggcagtggttgcacaaggagcgttcacaatcagacgggaaacggacaattcggtgccggccttaatcacattggcctgatcgttggaatgaattccggctgtatgaccgttaccttccatgttcaggttagtcttggcgatccgtaaggcttcttcaaaattgtcatatccgaggcaacccattaccggaaacattttttctttgcagatacgatcggcatgtccggctccggttgcttcagctacaatgacacggataccttcaggcagatcgataccggcagcaccggcaatcttcttcaccgactgcccaaccaaagcccggtttatttttccttccgggaagagtacattcagcaaacgctctttctctccggcagtaacaaaataagccccatgtgcagtaaaggccttgaacacagcttcgcgatcggttaccggataagtgaaaaattgttctccggaacagataataccattatcaaaagcacgtccggtaatcaccttttcagctgctgcctccagatcgatattacgatcaaggatcacctgtacattaccggcaccaacaccgaaagagggttttccggaagagtaagcggatttcaccatcggcatccctcctgtggcaacaacgacatcgcaggcttccatcaattctttggtcttatcgatagaaggttcgtcgatcacctggatcagatcggcaggaaccccgaacggagccacaacgtccttgatcagatttacagccagagccgagcatctttttgactgtggatgcggagctataataatggcatttttggttttgagggcaaaaataatcttcgacatcggtgtcacaatcggattggtcatcggcgtgatcccggctaccacaccgatcggtttggcaatttcgatcaatccggttttttcatccatatcgatgatacccatggattttttacccctcaggttataataaacccctttcgatttattgcggtttttagctactttgtgctcatacacccccatgccggtttcgtctacagccaaccgggccaattcttcggcatgatcataaatgacacgggcagcttcgcggataacccggtcgacctgatcctggtcaaaatgatgttcgtaaatctcctgagccttgcgggctttcaccaccatttcctttatttccataactttttcagtttataattataacacaaactttaattgccggacagctttctgtctttgtttctgcctgatcagtctcaaagctcccgacaaaaaatcctccggatttttctcaacgaaatccaggatttcctaaacgattacaatgtaattctcaacttaaaaaattgatttaatacagcaccttataaatctcccggatctcctcctccgacagcgagacataattattggccaaaagacgttgctgagtctgcaacacactgctggtaaaaccctgaatttcttccggtttcattccatacacccggagtttattcttcggaatcaatttacccaaaagctcatcgagtaccggatagggattttcgttcacacccaattgtacacacaacaagtcgttcagccgggcaatatcgcctgaaggatttttggcattataaagtttgaatacttcggtgaaaaactgataattcgattcgccatgaggtacatgataactaccacccaacggataggataaagcatgtacagcccccacccctgtatttccaaaagctattccggcataattacttgccatcagcatatcccccagtctttcgaaacgatattcgggtccgttcgctgcaatcccctgaaacacatcgatgattatttcgatggcagcccggcaatacaaacgggtataaggattggatttgggcgaaacatacgactcggtggcatgtaccaacgcatcgatcgcactacaggcataaaacttaaaaggcagccctttgagcaactccggtaccagcacagcatcgtcggccacaatggcatcgtcggccaatcccattttagtatgtttggaggtaatttcagctatggatatattggtcacctcgcttccggttccacaggtggtaggcaaaatgaccaattgtttttctttgacgatcggaattttacgttcgaaagcttccgtaacgtcttccacccctttcaatacaaacaatttggaaatatcgatcaccgttccgccaccgaccgcaatcacccggtcgaaaccgactcctttcacttctttcaggatagtgttcatcattttatccgatggttctcctaaaccgaacttctcctgcataatgaaatgacaagggagattcagggatttcataaaaggatcataaaggaattcattggtaatcaccaaatcgtgctccgagagcttgaattcacgggcaaaatcggcaaaatgatcgaatttgctcaaacgggtttttaatttaaataattgcataatacatgattataaaacgatggacggccccgcgaccataaatcgccgggagttatccgccaccagttaatccttaaaacgtttctgatattcttcttccagcatagggcggaaatcgggatgtgccacagcaatcaatgcccgagcccgttgtttcagcgttttacctttcaaccgggcgatgccgtactcagtcaccacataatcgacatcattgcgtgaagtagtaacagctgcaccctgcgccaagaaaggtacaatccgggaagccttacctttagctgcagtcgaaggcatagccatgatcgatttaccaccggcagaccaggctgccccccggacatagtctacctgtcctccggttccgctgaattgtttcagtccgattgtctcggaagccacctgccccatcaggtcaacctcgatgcaggaattgatggaaaccatcttttcattttgtgcaatgacacgaggatcgttgacataatctacgggacgcatttctacgcaggcgtttttatcgacgaaatcgtacaagcggcgcgtccccatcaggaaagtggcaaccaatttccccggatgcaaggtctttttactgccattgaccactcctgattccaccaaatcgatcactccgtcggaaaacatttcggtatggatacccaggtcttttttatctcccataaacaggagcacggcatccggaatcgctccgatccccaactgtaaggtggaaccatcctcgatcaaagaagcacaattacgcccgatggctttttcgacatccgtaattttaggcagcggaatttcgggcaatgccaggttagtcggaataatataatccaaccgggagatatgaattttgttgtctccctcgacatagggcatattttcattcatctctgcgatcaccagtcgcgccttttctgctgccgctttagtataatcacaagagagtccgaaactgcaatttccttcactatcgggataagacacttggattaccgccacatccacaggatatacctcatcaaacagctgtggtatttcataaaaaaatacaggaagaaaatcggcccggtcgtcagcgacagcctggcgcgaatttcccccgacaaaattagtgatgtggcggaaatgtccttccgtcccgggtgtcaggtatgagccatcgttcagcgtaagcatgtggtaaataccgacatcatgcaagcgttctttttgtgcgatcatttccgccggcacaacctgcggacaaccggcagcatgtccgaacacaagacggtctccgtcttctatggcacggacagcttcctccactgtcgcaaacctgtttttatatatttctttccattccataatcctcgttttgatcacctttttcggtttaataatttccgggcaaaagcgagtaagccctcatctgtttcgttgatcagatacacacggccgagtttatctccaagctcacgacgcaaacctttctctaccacttgttccaccgtaatttgtgccgcaggacaggctccacaggctccggaaaacacaattccgacatcccggccccggatttccctgacactcaaatccccgccatgttccagtaaatgaggacggacccggtaaagtacgatctcccggacccgttcctcaaaactactactactttctatctttgctttcatccaccttagcaatcactttagccagttctttcttcgcagccagatttccctgacgggagatcataatacgctgtgcctgaggtgaacctgctccatgcatagattctgtccgatatccaacagctgccgtacccaaggtaatattttcgatcaggcgcaggatacgcatccggttttcggtagaagtcccggttgctccctgcaaatatttctctacataaggaccgatcttttcgctgcgtaaatcctgctcggatggcatggtcaccattaacccaccggcaatatcttctgcaagacgggcaatctcataaggcatacgggtaatattctgtttgcagacattggccaacaacagattgatctgatagttaccggcaggcatcttttcaccctctgccgaacaggcaataccacaagcataaagcgtctcgttcagatgtatcatttcgatcagcttatccttgatgtggttggctttgggcacgccattgtaatcggcggcaagggcagctgcaccgatcaatacatccccgactccgactttacaccctccgtaagactgacggtgatatccggcgaaacgctctaccatcattccggcaaattcatattcccgacacataaacacccgttcattgggaacaaacacgttatcgaaaacaaccagtgcttcgtgcccaccatactgtgcatttccgaggtccatatcggcattttcctccattttacgggtatcacaggactgacggccgtacaccataaatacgccttcggcatctgaggggacagcaaacgaaatggcataatctttatcctcttctttcatggccacagtaggcatgatcaggtgttcgtgcgaattgacagccccggtctgatgagcttttgctccccgtacgacaataccatcctcccgcacttccacgacatgcatatacatatccggatcttcctgtctggagggcgacaaactacggtcacctttcggatcggtcatcgctccgtcaaccgtaaggtcgttttcctgtacaaacttcatatattcagtgaaccgcttgtgatattctgtcccaagcttctggtccatctcataggtggtagagaaaatggcattgaaagcatccattcccacacaacgctggaaacaggctgccgtcttttgtcccatcaaacgttgcattttcactttattcaccaaatcttccgtgctttggtggagatggcaaaaacggttgatccgcttgccgatcagcggtgaataaacagtcatcagatcctgatattccggtttttcagccaattcataagttttggctacagaattcatagaaggacgaatcatcgggtggtcgacaggattttcgatcagctcacccataaaataaaccttcagattcaatctgcggaggctttcaatgtactcagctctggtcatcataattagtggcgttttattgattaacaatacaatatttaaagaattatttctctaatcaaaagacacaaaggacaactatcgtatgctatataacatacgtctttccctttacggaaacgatagcgccagcctttttaaaaaataaaaaagcatcctttacacatcctccctaaacgaggttatgccttcgtgttttccaggacacacccgtatcccttttcccaaaataattgtgaaaaacaacgcacatacccattgtccttattccccagaacaactggcaattataggtcaggcaggtcttctgacttgttccggattttgcggccttcccttctcccggaggaaaaagtgaccataagaatgcaaaaccctttttaaagaacatacagctgagggtacagtaccggattctcaccggattccctattcaactcattcctccgtgtgaggatgagtcaccatgacgacgcaaatgtacctaaataaatttatattcctactttttttctttaatttttaaataaaatgagaaaaataattgcagcaatgaaacaaacctctcctaaaaaatcataaaataacacctccttcacccgaacttccttctcctctctcaacgtccgatgaagtaaaaaatcgattaaaaacaacggaatgcataaaaataatcgacgatcatccggacaacaaagacccgcctcttataaaaacaagaagttacaaatttttactcactgataatcaacaacaaaataaaggaaaagggaaagattttattaaaatttcaacggataaaagattttttatacttttgtcccattgaagttctttacaagatgtgaatcagatcgctcaggtgcctcattacgatggggagaatagggaaccgtgtgaaaatcacggactgtcgcgcaactgtaatcaccataaaagttcggccaatcatgtccactgtcagcataagacgggaaggacggctaaaacggtgaaagtcaggatacctgcctcagcgaattgacaatgctttcgcggaataaagccagagtcagcccttatcagaccgacacccgtccgggtaaatatacccctgcgtattctttattttgtgaaagctaagtttaagccatgctcaacggtaacaatcgatgattaacgagtaattatcaatcggctacacttacgaatcttaaaagagattgccagaataataaagcaattaatagatgtaaactgacttagcatgagaaaatcgtttgaaaaattcctggcgagacaggaagccttagcccggcaatacggcgaagcatatgaagaaaaacaacacaaccgcggcaaactgacagcccgggaacgaatagaatttctttttgatgaaggcaccttcgaggaagtcgatgcttattctccatcggccaccacctctttcggtaaaacagtacgttcctatggagacggagttattaccggatttggaaatataaacggcagacaggtatttgcctattcccaggacttcaatgttcagggaggatcattgggttctgtacacgctgccaaaattataaaagtacaggatatggccctgaaaacaggttctcctgttgtaggcctgatcgattcgggaggagcgcgcatacaggaaggagtggccagtctggccggatatgccggtattttccgccgtaatgtactggcctccggggtcattccccaaatatcggtgatcatgggtccggcagcaggcggcgccgtttattccccggcactcaccgactttatctttatgactgccgcaaccagttatatgtttgttacaggccccaatgtcgttaaacaagtgttgaatgagaccatctctcccgaagaattgggaggggcttcagtacatgctgtcaaatcaggagtcgctgattttgttttcaacgatgacgagaacactttgcggggagtgaaaatgctgctttcctatcttccttccaacaatatcgagaatgctccctatctggccaccgacgatccggcggaccgtatagaagaaagtctcagagaccttgttcccgaagatcccgacaaaccttatgacgtccggaatatcatccggctgatcaccgataaaggtaaatttctggaaatagctgaaaactatgcccccaatatcattatcggcttggcccggttcggaggctatgtaaccggaatcgtcgccaaccaacctcaggtgatggccggtactttggatatgaactcttctgtcaaggctgcccgtttcatcaatttctgtgatagtttcaatattcccatccttactcttgaagacgttcccggattcctgccgggagctgatcaggaacatgccgggattatccgccatggagcaaaattattgtatgcttacacccgggctactgtacccaaaatcaccgtcgtactgcgaaaatcttacggaggagcctatatcgttatgaacagcaaagggatcggtggcgactacaactttgcctggccgacagcagaaatcgctgtcatgggacccgaaggggcaatcgccattctctaccacaaagaactggccgctgccgaagatcccgttgctttgaaaaaagaattactggcacaataccgggaggaggttgccaatccttatatcgccaacgaaaaaggatttatcgatgaagtcatcgacccgtccgtcacccgactgaaaatcatccgggtacttaaatctttagaaaagaaatcagtcagtctaccccgccggaaacatggaaatataccgctttaaaaagataaaagcgaaagaaaagggggacaaaataaaaagataatgaaatagatatgataaaatcagttttaatagctaaccgaggcgaaatagccatccgaattgcccgtacagcccggcgcatgggcatcaaaacttatgtcgtccgaacagccaaagaacccgaagctgtatatttatcagctgctgatgccgtgatcaatttcccggaaaccgatgggaatataccggaatttctggatatcgacagattggttggactagcccgggaatataagatcgactcattacatccaggttatggatacctgtctgaaaacgcggaattagccgaacgctgccgggataatggaatcgtctttatcggcccttcacccgaagtcatccgacttatgggcgataaagttgcagcaaaaggaattgccgcacagagcggagtccccatgcttggagccagccaaggagccgtacataccctcgatgaagcccggaaaattgccaaacgactaggctatccggtcattatcaaagcagtatcgggcggaggaggacgaggaatgcgtattgtccatcatcaggatgaactcgaacaactttacaaaatagcaaccgcagaagcacaggtagcctttaacgatccttcggtatttatcgaaaaatacctcgaaaacccgaagcacatcgaatttcagattgtagccgacaattatggaaatgtcgtgcatctgggcgaacgggaatgctccatacagcgtaaacatcagaagttgatggaagaagccccgtcacccgctctcgacgaacgcctccggaaaaaaatggcagcagcagcagtctccctggcaaaacaggcaggctatcaaagtctgggaacagtggaattcctgctcgaccatcagaagcatttctatttcatggagatgaacacccgtattcaggtggaacacccggttacagaagaaatcaccggaatcgatctggtggaattacaattcaatatcgctgcgggccggaaattaccgttgcgtcaatctcagattcacctcaacggctggtctatcgaatgccggatcaacgcagaggacgtacaagccggattttctcccagtatcggtgttatccgtcaacttcgtttaccacaaggcaatcacatccgcattgaaaccggtattgcccccggttcagaaattaccccttttttcgattctatggtagccaaactgatcgtcaccggagacacccgcgaacaagccatcgaacggactctttcggcactcgaacgtttccatgtgaaagggatccgtaccacaatccctttctgcaaagcagtattacacaacgaaacttaccgtaacggtgatttcgacacctccttcattgaaacccgcctccattcgacggtctggcgcgaaccgcacgaagaattgctcgcagctctattcgccgtgtatacctacacacacgaaaatactcctgaaatcggtcccgacacacaaatcgacccctgggtattgaacaaacgaatcagaaatctataagtaccaaatatgaataataaagaaatcagtaaatacatcgctctcagcgacagacaaacggaattcgaatttacagtaaagaataattatgatttcagtttgaaacggcaaaatatacgcctcgacctgatagaggaagcagacggatttttggtcttatcttataaaggactgcgttatccagtagaaattgtttcacggaaacaaaatgaatacgaaatattgctcaacggtgtcgcatatactttctctgttgaaactccgttctctctgaaacggaaaaaaatactggccagtcgtcaaagcgacttggcgacaataatcatcaaatctcccatgcctggcaaaatactggacgtccaagtagataacggtcaggaaatcaacaaaggcgacactctcttgatacttgaagccatgaagatgcaaaacatcattaccgccacccacagaggccgaatcagtcgtttatgtgtcaaaaccggccaaatcgttggtaaagacgaaattttagcagaaatcaaactctaaacgcagccatgcaggaacacagcaaaaaaatacaggaattatcgaattttctgctggattacgccaccacactgatggcagtcggcagtcatacttcacgtattgtaaaaaacgtgacccgcatcgccgagtcttttggctttggagtggatatgaccatttttcagcgcaacatcaccatgaccgtcaaacattccgaagactactccatccgacgaacttacgtccgacggattccagcaatggctttaaacttccgtacaatatcagacctgagtgccctgagctgggaagcttatgaccaccatccgggacttcacgagctgcagctccggttcaataccattgtcaacaccccacgtatgtcacgctggatggtcctgttgctggttgcctgtgccaatgctgcattttgccgtttgttcggaggagatccgatcgccatgggattggtatggattgccaccctggccggcttttttatccgtcaggaactcaccaaacttcagttgaaccatatggtcatctttattatttgttcctttatcgcttccctgactgccgcactcggagtattctgcaatttagggaccacccaagatatcgcactaggtaccagcgtcctgtttctgattcccggagtaccgctgatcaattccatcctggatatactcgaaggtcacgtccttgtcggtttatccagaacaatcaatgccacgatattaattatttgtatcgctctcggcttatccatgactttattaattttaggaaaagatatattatgaacaacgaattctggttacctgtcctcaccgacggattatttgccgctattgccgccatcggatttgccgttatctccaatccccccaaacgtgctatttcagttgtagccttactgggagctttcggccatgcctgtcgtttctacctattacattacaccccgttgaatctgaccatatcttcactctttgcagctttcggaatcgggatgctaagtatgttagccgcccgcctcgtccggtgtccggcggaagtattttcttttccggctctacttcccatgatcccaggtatgtatgcctataaaactgtacttgccctcatccgctttatgaaaagcgacgatgtatcccagtcacaacaactgattgtcgaaatcttccgcaatggcctgactactttatttgttatgtttgcactcgtcatcggtgtttcactcgccatgttcatcttctataaacaatcgttcactatgacccggctgctaccccctcatcacaaaaaacaagcctaaaaaccgattgggcaaatatcacaaacatagaaataaatatcctaaaatctttatccgtattaactacaacagacaacagtcccgggaaagatttttatagaaacaacgaatcaattagtgcgagaaagattatcttatttcccccgcaaatagctcacgaccccaccctcacagactattcctttttccggagggcacatgcagcacataagcctttaatcacataattggcaccggtttggataaaaccgggaggtaattgtaccgagggaatatgtatacttttcacacaaaaagttttatggcaacattcgcagcagaaatgcatatgctgatcttcgaccgcgcattgacaactatcgtcgcatactgcatattttaacgtaccgcttccatcgtccaccccatgaatcagatggtgggacaggaataaggtcagagttcggaaaatcgtggatttatcgacagtatcgagttgagcctccagatcggagaccgacatcgcctgtttcatctctaacaaagtgcggagcaccaacacccggatggccgtcggccggatatcccggagaactagtttatgtaagcaaaaatcttcctctatcatcattcgaattttttactgaggatacgtacggaattcaatacagccaacaaagccacaccgacatcggcaaagacagccgcccacaaagtgacgaatccacaagcaccggcaatcagaatcagtgacttcaccccgatagcaccggcaatattctgctttacaatccgtcgggtcgctcgtccgatcgaaatcgccgtagccactttggaaggttggtcggtctgaataaccacatcggcactttcaatagcagcatccgcccccaatcctcccatagcgataccgacatcactcaaagccaataccggagcatcgttcataccatctccgacaaaagcggcagaaacaccggcctctgcattcaatttttccaggtaagccgctttatcttccggcagtaaaccacctcgtgcatgccgaatccccaaggtcttagcaaagatagcgactatttcttttttatcgccggataataactgaatattatcgatatgcaactgtttcagccgcccgatagcttcgacagcatctgctttcagcgtatccgaaagcaataaatgaccggcatattttcccgcgatagcacacacaacaaccgtagcgacacgctcggaaatccctgccggaacggttattccccgatcggtcaacaagcgaatattaccgaccaaaacattttttccctctatcacaccttctaatccataaccgggatattcttgtaaatgcgtgacaccgattctcccggctccctcttgcagggcataacgggtaaccgcctgtgctacagggtgagtacttttttcctctaaggtcaacaggatacttaacaacctttgcgatgaaacggtatccgcctccatcgaaaacacttggaaatggcctgtagtcaaagtaccggttttatcgaatacgacagtattgacgtgagtaatagcatccagataattaccgcctttaaacaatatccccttccgggaagccgctccaattccaccgaaatagcccaaagggacactgatcaccaaggcacagggacaggaaatcaccaaaaataccagtccccggtatgcccaatctttgaaaaaataatcgaatccgggatggaaagctgccaccaaagcaggcaacaacataatcgataaggccaacaaaaataccacaggagtataaatacgggcaaagcgacggataaaaagttctgccggggcttttcgttcagaagcatcctgaaccaaagccagtatccgggctaaagcactttgttcgtaaggcttagtcactttcaatcttatcgcctgaccagagacgatcattcctgccaatacctcttcaccacgatttatagtccggggcagactctctccagtcaaggcagaggtatcgaaaagagcatattcttcctgtaacaatccatcgagcggaatccgttctccgggttttaccatgatcatctctccaacctcaacctcaccggggaaaaccgactgttctttcccttgccgtaaaaccaaagctttttcaggacggacatccaataaacgcctgatattccttctggcccggtcgactgcacgatgttgtactctctctcccaccgaataaaaaagcatcaccgctaccccttccggatattcaccgatacaaaaagcccctatcgttgccaacaacatcagggaaaattcattgaatatatccttctgtcgtatacttttccaaacttcaaccatcacaggaaatccgaccggaagaaaggccagtaaaaaccatagcacttcaactcccggaatcatccagaaagggagttgcagataacgcagtataactccgccaacgagaagtaaaaacgaaaggatcaaaaatccggttccttgctgatcatgagtatgcccacaatctccggcatgagtatgtgtatgcgcacaacgctgacaagtagcttccatattcttttatcatttgttcgatacaaaaataagggaagattcctgcaaccaggttgcaaaagtgatccatactgttcctggtgaaaaaacttatcagtgttaaaaataatcgttgtaatctctaaaaaggggcagcatacatacgggcaccgcttcctccattgaccggatgatccgtaaaattatcgggcatcgcatgaataacgaaagccttccctttgacagccttgaaaggtatccgggtcgaaatcacggtttgatcgactgttccctctttcccgacttgtaacatttccagatctccccgatgtccatccccatgaggacctgcatgtttatgcgtattatccggatcccagtgtccacctagtcctccacctattaccgtattccctttgtcatcggtggtattactcatcgtatttttttcatgcatatgaaaaccatattgtcccggcttcaagccggaggcaacgacatgaatcgctattcctttcccttgttctttcacttcgatcgaacctacaattttacctttcccattttccgacagctcataaatcggcttctcgatacatttttgttcaattgtctgagacatacataataccgacaaaaccaaaagaaaaaacaatactaacctcatttctcgtccatttaaaattctgtaataggattatacgcggcttcaccggataaagtttcaagtcgcccgttttaagatcgatatccattgattttgctattgcatagtttttttgtaatttagccccttgaaaactaataaaaagctatgtttccacaagacgaattcaaaaaatacgctataaagcacaaagggatcagtagtctgaaccttcatcggtttcaaacagctacgaacagttatatcactccgaatatcatagaagaacgccaactgaatattgcaaccatggacgttttttcccgtttgatgatggatcggattattttcttaggagtacccatcgacgacgatgtggcaaatatcattatggcccagttgttgtttttggaaactgccgatccggggcgtgatatccagctttatttcaacagcccgggaggttctatctatgccggtttggggatttacgacacgatgcaatatatcaattgtgatgtagcgactatttgtaccggtttggcagcttcgatggcagcggtactgatgactgccggaaccaagggaaaacgttcggctctaacccattcccggattatgatccaccaaccgatgagtggcgtacaaggccaggctgcggatatcgagatcacttccagagaagtacagaaactgaaaaaagaattgtataccatcatctccgaacattccggtcaaccctacaaaaaagtagaaaaagattccgaccgggactactggatgacagcagcagaagctaaagaatacggtatgatcgattcaatattaaccagagctaaaaaataaaattgaaaattgcaggtcgatgagctcttatcgacccaaaagtaataaaagatgcaggataaatgttcattttgcggacgtaaccggaacgaagttaatttgttgatagcggggacggacggttttatttgtgatgagtgtgcttcacaagcctatgatatcgtccaggaagagatgaaaagtaaatcgacactcaacctggaacatatcgaagtaaaaaagcccatagagatcaaagcttttctggaccaatatgtcattggccaggatgaagcgaaaaaacacctggcagttgccgtttacaatcattataaaaggcttttgcataaagccggtaacgacgaagtggaaatcgagaaatccaatatcgttatggtaggtcgtacaggtaccggcaaaaccctattggcccgaacaattgccaaaatgctacatgtgccttttaccatcgtagacgcgaccgtactgacagaagccggttatgtcggggaagatatcgaatctatcctgacccgtttgctgcaagcagccgactacgatgtcgaggcagcagaaaaagggattgtattcatcgacgaactggataaaatcgcccggaaaggggataatccctcgatcacccgcgacgtgagcggcgaaggagtacagcagggactattgaaattactggaaggctctatcgtcaacgttcctccacaaggtggacgtaaacatccggatcaaaaaatgatccctgtcaatactaaaaatatcctctttatctgcggaggagctttcgatggtattgaaaagaaaatcgcagcccgtatgaatacgatggtcgtcggctttaatgcgagccaaaatacagaaaaaatcgaccgggagaatttccttcaatatatcgccccacaggatttgaaatctttcgggttgattccggagatcatcggccgtctccccgtattgacttacctggaaccgttggaccgggcagcgttacgtaatattctgacagaacctaaaaatgctattatccggcaatatatcaaactgttcgaattggatgggattacactcaaattcgacgaagatgtctatgaatatatcgtcgataaagctatcgaattccgccttggcgcccgtggcttacgctcgatttgcgaagcaattatgaccgacctgatgtttgaagtaccttcacaaggaaagaaaaatattacgattaccaaagcttatgccgaagaaaagatgaatcgcgtgaatgcccagaaattgagggcataaaataaaaattattttgaaaatatccgattgtgcacctgacacctgaggatattttcaaaataattagggatattcagtaaatagtataaa

SEQ ID NO: 5850 - DNA, 24384 bp, Unknown
  gut microbiota DNA sequence
aaaaaaattaaacctactattttttagttacagcggttacaaaagtacaataaatacctatttccttgataacatgaaaccaaagtcagctggaataaactatctttttagttaatatttctttaattttacgaggaatgaaatcttttatgaaaaaaatgtcgatcttgacgcaacgtaataaaacaggatgcatctatataataaaacacgattcggatgaaaacaaaacctaacttccaaaaaatcaggcattggcttcacatagccatatacattcttgtacttttgctgtttgccaattacgagtctcagcgcaaacaacacccggagcgtaacaagctttttgtagatcagcaccaacaggcgtatgtggaagtcccttcgaataacagctaaaccggaaagagggagaacaacactaaaaaacgctatcttttcagatagcgtttcggtgcacgggtggagaggctcgaactcccgacacctggttttggagaccagtgctctaccaactgagctacacccgtatttgatgctgcaaaggaaagcaaatttcctggaatctgcaatattcctgtacatatttcttagatttttttccgcttcaattttcccatacgccccggtttagaaataatattttgacttacagcttttcatctttttcagcaattcctccacccaataaaatatcttcgtggtaaaaagcaacaggttgtcccggagcaacggcccaggcaggctcacttaagaccactttcaagcggtcagggctcaaacgttcagcccggatatttcccctcggatttaatcccaacccccggattttgatttctaccccggcagctaacaaatccccaaagtacactgcctccacctgcccgactgtcagtacagaagtatataacccggatttgggagcgacaataatactgttcctctccacatcgatctcccggacatacataggaactccggtccggtcgggaatcccccgtttctgtccaaccgtataattcaagattccggcatgtacgcccaatacccgtcctttatcgtcaataatttctccactttcctgtcggaagtcttttataggataatcctttataaaatcacggtaatccttatttttcagaaaacatatccccatgctctcccgtctccgggccatctgctcgtatccattccgggccgcccactccttcacttgttttttggtatattcacccaaaggggtcaacgctcttcttaaaagcgcctgaggcaggccccacaaaaagtaagactgatccttctgaggatcgatccctttccggatataaaatcttccctcccgttcgacaatcctgacataatgtcccgttgcgatatactccactcccaactcatcagccacctgctgtaacaatatccactttacccggcggttacaaatgcagcaaggactcggcgtaagacctgaccggtaagcttttacgaaaggatcaaccacctgctgcctgaatagttcatgtccttcccggcagaggaaagggatattcagtttttcacaactgtctctcacaccgcttaaatcatttttctcccacaattccagggtcaccccgatcacttcatacccttgccggcgtaacaataaagcggtcacaaaactatcgacccctccgctcataccgacaaccacctttttcatatacagatttttgaactagaaaaattttcaggcaaaaaacaaataggcgatcacgaccgcagcgataatccctgctaaatcggcaatcagtccacacggaacagcgtaacgggtattccggatccccaccgccccgaaataaacagcaatgatataaaaagtcgtatccgtcgccccctggaaagtacaagccaaacgtccggcaaatgaatcggccccgaaagtcttcatggtatcgatcatcatcccccgggcaccgcttccactcagcggtttcatcaaagctgtcggcagcgcatccacccagtcggcattaaaaccaagtccttctatcccccgggtaatcgcagacatcaccacttccatagccccggaagccctgaataccccgatcgccaccaaaatcgcgatcaaataaggaatgatctttacagcagtagcgaatccatccttagccccctcgataaaagcatcgtacacattgatccgcttccaggccgccatcccgataaataccatgatgataccgaacagaatgatgttactggcgacattcgaaacaacggttaccgcttctttatccaaggttgaaaaataccagatcactcccgccatcaaaaccgaaattcctcccaaataagccagaatcactctatcgaacaaattgatcttttgataaatagcgacagcgatcaaaccggccaaagtagaaaaataagtggctagtaagataggaataaaaatatcggtcggattagcagcccccaattgggccctatataccatgatcgacaccggtacgatcgtcagtcctgaagtatttaataccaggaacataatctgagcattcgaagccgcatctttccgggtattgacttcctgcatttgctgcatcgctttcaatcccatcggtgtagcagcattatccaagcccagcatattagcagccagattcatcataatggacccatgggcaggactatcctgaggcagcccagggaaaagacggcggaaaaacggattgatcattcctgacatcacctgcacagccccaccccgttcaccgattttcatgatccccatccacaaggtcagcactccggtcagccccagggaaatctcgaaaccggtcttcgacatatcgaaagtagaggtcatcatagcgctgaatacttccgtatcacctcctatcactaaacgaaataaagcgacgataaaggcaacggcaaaaaagaaaatccagatataattcaacaccataattcactacacctgattaacgcaaagggaaccgatcacgacaagtaaaaagcaaaactttttacttgtcagccagtcccttgcaagctttaagggtattttgcagcaaagacacaatagtcatcggccccactcctcccggaacaggcgtgatataagaacatttaggagctactccttcaaaatctacatcccccaccaggcggaaaccggacttcgttttatccgaaggtatccggtggattccgacgtctaccactaccgcaccttcttttatcatatcggcagtcacaaaatgaggttttcccaaagcgacgatcagtatatcggcttgtaacgtcatttcttttatattttgcgtacggctatgacagatcgtcaccgtacaatctgcatatttatctttacgtgacatcaacaccgccatcggagtacctacgatattgcttctcccgatcaccacacaatgcttaccttgagtgggtatttcataacgtttcagcagctctacgattcccgcgggagttgcaggcagataggcaggcaaaccggtcaccatcttgccgacattgcagggatgaaatccatccacatctttatcgggatcgatagccatcaacactttatgctcagagatatggcgaggcaacggcaactgtacgatataaccgtctacgtcggcatcctgattcaacttatcgacgacagccaacaattgttcttcggtaatatcggccgaatacctcatttcggtgctcttgaaaccgacctcctggcaagcctttactttactggccacataagtttcactcgccggatcgttacctaccagaacggccaccaaatgaggtgttttggctccggctgctttcatccgttttacttcatctgccaactcttgttttacctgagttgcaatttttttcccatctattaactccatttcttctattcacttttcgttaatcacttacagtcgctcaacgtctcatgccgggcattttccgcatcagtttaccaccaccggacaacatcttcatcatcttcttcgattcttcgaattgtttcaacagacggttcacgtcctgaacggtcgttccactaccttcggcaattcgcttacggcgtgaaccgtttatcagggccggatcctcccgttctgcagcagtcatggaatagataatcgcttcaactcctttaaaggcatcgtcgtcgatatcgatatctttcagtgctttaccgacaccgggaatcatggaagccagatctttgatatttcccatctttttgatttgctggatctgactcaggaaatcattaaaattaaactgattgcgggaaattttcttttgtaattttttggcttcttcggcatcgaactgttcctgagccttttctaccagggacacgatatctcccatccccagaatacggtcggccatacgttcgggatggaaggcgtccaaagcttcgagtttctctccggttccgacatacttgatcggtttgttcactaccgtacggatagaaagagcggcccccccccgggtatctccatccagtttggtcagaatcactccgttgaaatccagccgttcgttaaattcgcgggcagtattcactgcatcctgaccggtcatcgcatcgaccacgaacagggtttcattcggatgaatagcctctttgattgcagcgatctcgttcatcatctgctcgtcgatagccaaacgtcctgccgtatcgacaatcaccacatcataccccttcgctttggcttgtttaatggcatccaaagcgatccttaccggatctttggtcgtctcatcgctatatacaggcacctggatctgttcgcccaatactttcaactgctcgatagcagcgggacgataaacgtcacaagccaccagcaaaggtttcttcccttttttattcttcaataaattggcaaacttaccggaaaaggtcgttttaccggaaccttgcaaaccggacatcaaaataatagccggattaccttttatatctacttcgacattcttgccccccatcaactcagccaactcatcgtggacaatcttcaccatcatttgtcccggtttgacagccgtgagcacattcatacccaaagctttctctttcacccgattggtgaagtccttcgctattttatagttgacgtcggcatctaacaaggatcggcgcacctccttcaaggtctccgctacattcaattctgtgatttttccctgcccctttaatatcttgaacgaccgttccagtctttccgataaattctcaaacatatcttattcgctttatatttaatgattattttatcttttcccaatatttttcaacaccacaaatgttttatcgatcaaggcattatcaaccaccaccgtaaactcgttggtagaagagatgacttcggtcagattgataccttcccaagataattctttcataatggtataataaaaaccggcctgcatactgttccctttcggcaatttcagcgtcaccgaagacagaccgttttttttaaagagacacaactcatctttaaaataatcggcgatcaattcctccatcgtgtcgctgatcacaagattggtttcgaaaactccctgtaccatcgtataaaaaatctcatcgtttttcaccagatttttcaatacttcgatatggcaatccaatagagtaggtgaatttttaaaagtatagtcacacaaactactcctaagaataatatcccccatattactcagcaacttattcaactgcacctgctcccgcacctgcaaataaggcgccaaccgattcaaggccatcacaatagccccggtattcactcccttctgcaacgctctctccacatcgggctgcaattgccgggcaagcgaagaaacattgataatgcccgccgctaaagactccgacagataaggccggtgttttacgatatcttctacaacatgagaaatactgaccatataaagtacatttaaaagatgagctgtttaattttcaacaaaaatagtatattctgagcatttaaccaccgatttttctatttttttcataagaaacgaaagaaatgaatacaaccagacaaacgcataaaaataaccggtaaaatagaaaaaccaaaaaatccggcaggatcactcctaccggattcacacaacataaatttgaaactacacttatcaacgcatcattctgcaattgtacaaggaagtgacacgtttgccttcatatcctttaaaagatacccggattttatcttttccctcggtaaatttagcagggattacaatcgtattttcaacgaagtttccatcttcacctttaggagagaacaattccagacgttcatcatcgatcaggatttcaaaggtatcacggccacaatccccgccccagaaagtcatcatcatcttcatgggttccgtcccggatactttcatatcgaaatcaaaatatccggtcggataagcataccggtattttttacccctgaaatctccgatacggctttccccggcactcaggttatgatcccgttcgggctgcatttctcccagcacgatataatcgacagtcaccttattcaactcttcgatccgcaatctttctgcttcgtattccgcctgtttttgtttccattccccgggtgagaatacatcccaatacaccgtataatactgatcgtaggtattgtaaaaaggaatcaatgtcacctctttcggataacccaaaccttcggtttcaaaagtcagcggtttaccgtttaccgggtggatatacttacatacctgtttgtcgggtgaaacaaaaaccggtacaccgcggatcggttctatctctttctcacccaatgcacctgccagtaaagtcggtccgtagaacacagcccgccggtcggcattatccggcatttctttcgtataaagattcatcggtatattcaattcgatccggtcgcctgctttccattttcgttccagcgtaacgaaagatcccggtttagaagttattttttgctttgtaccgttcactttcaccacaattccttcgccggcccataccggataacgcagattcaaagccaaaggctgacgttccccctcgaccactttcaacgtcacccgtccattctccggataaacggtttccaacctcactttcaatcccttctctttccaggtcaataccgagggtatataaagattgacaaacagagaacggtcgtcgctaccgtgactgtaaatcgcccccccatacttggaatgattttcaaaaccacttcccatacaacaggtgaatgaattgtatttatcgcaaaaatctttccgggttcccatcgccagcggcacaaaataacaggtcattcccgtttcgggatgctgagaagccaggatgtgattatacaatgctttctcgtaaaagtcgagatacttcggatctccggtccattcatacagatgccggctcaatttcagcatattataagtattacacgtctcacaggtagaatgcgtcaggcgatcgttcagtttatcgggtgtcgaaagatattctcccgagctatttcccccgttagcataactatgatgatttaccatcgttgtccagaaaaattcggcaatccgttcatcttttgggtttccggtcaactcatactgacgtgcactaccgatgatcttcggtatctgggtattcgaatgcaatccgggcaggatatctttcccttctgccaacggttccatcaatcgtctgtggtaaaatcgatatgaagcgtccaggtattttttatctccggtcagagcatacacctgtgccaatgcttcgttcataccaccgaactcacaattcagcatcgtctgtacctgttcgtccgtcagtccggcaagtacatccaccagataatcggccaaattcaccagtacttttttagcagtcttgttcccagctaacagataagcatcattgagtcccatcatggttttatgttcgttgtaccaggggacccacaagccgttcaaatcgaatccggccgaacggataatcccctttttcacctgtttgaatacccggtctccccccggcatgccaccgataaaaccgttcacaaaatattgctggcaactatccagttcgtgcacgatataatccacccgttgtttgaagcgttcgtctccggtagaggcatactgttgtgccacagccgaaagataatgtcccagggtatgcccggctatccccatagactcccagcttccataagattctcctttcggctcgaggcctgcattcttcaggaaattcgataacaaacggtccatatccatttccagcatccatgccgcattccggtccatagcattcttaaaagggctatccagcaaacggacctccttcaaaccgaaatacttcaccttcgccggcaccacattcccgacagccaaggccgcacaatgttcacaggctcggcctaccgacacaatccctataaccagtaaccatcctattattaattttctcataacttctattattttcaaattctacctttgcacctctttactctgttccgagtacaatcacattcgcactaaaagggcctactttcacctgtttggtatttttcaaacttttttccgacactttcaccacactttcctgtcccggtgtattataagccatatcgtcgggtccggtaagggtataaatcgtcgccactccgttcaaccggcatgtttttgcctgatactcaaactgtccacccagtatatccagctcgaaagtcacttcttcccagcccggatttataacagataaagtcaatgcctgatcggaagaccggatagcggcagcgacatccaggggacgtaactctccgtccactttcaccggaacggtaccgaattgttcgcgatataatttcaacacctcgccggtcgaagcataacaagcatccgtcgtcgtcgctttgatacaaccgatgacattcaccgtttgtgcataattggccataaataccatatcgctttgacggaggaactcattcagtccggcagcaatccccaaagcatcccgtaagaaataacgggtacccaattcgccatagatatgagggccgtaccaataattccattcgtccatacaaatacggatatctttaccttccaaagcgggaatatctctccggtacccccggtgtgcctcggctatccggcgaatattacggggaatttgcaatacgtgtgtcatcagtcctccgccatgccagtcctgacaataaaaatgttcgctcaccaaatccatccgctcggcacaattagccaaaatcatttcgtcccaccggcccacttctccgacagcgatcaggtggatagaagaatctactttccacatcgcatctgcaaaactgttatgttttttcacaaaagcttccgtactcataaaaccgagttgccaatccccgaacatttcattcccgacggaccaccatttcaccttccagggttttgcctgtccgttttgtttccgccatttacccatcggtgtatcctctgtaccgttacaatattccacctcatcggcagcttcttttacccctcctaaaccggcatttacagcaatataaggctcggtatccaacaattcacacaatcgcataaactcatggatcccgacatcgttcgattccactcctgtccaggccggatttctccggggaggccgtttatcccgttcaccgatcccgtcatgccaatcataaccactgacgaaattacctcccggccaacgatataccggagctttcaatcctctcagcaaagccagcacatccgcccggaagccgtcgatatgatcatccggcatcaaagaagccgtaccgatccataatcgtccttctttttgcggacagatcgaaaaagtagcatcctttactttatgatcgaaagctgaaaaatgcaccggatatttacgataagtagtcccgacctccaaggataattcctgagtaaacgaaccgtaattcaacatcacttttaccggcatttcgcgatcggctttcattacaatatatcccgaacaggaaataccgggccgtaatcccagttgcgtctgtttcagcgcgatccgtttaccgtcggatttcaacaccggagtatgccgtcctgtatagggagctgtctcgtccatatacaaacctttttccgctttatccgtgcccgcaatctgccagggagaacctttttgccccggagcataccagaatttccggtccatcaacatttcggcccagatacctccataaatacaatgccccatatgttctataaattgcccataaatataaggagacatctccgccttttgctctgccggatcaacttttatactggtttcgatgacctccgtacccagacattcgaacgaaagatcgtcaaaccatactttcccttttgcttttccttctgttcccagcaaacatgatacggtgacacaatcgttcgctccggtctcaaaatcacaactgaccaaagtccagtcttgcgtaccggtaaaatcaggcaattgtacctcgactccctgcaagcggaatccggctcccccttgcggttcggccactacattttcacatttgatccaccctttgaagcgatatttcgaccacggtttgagattcacccggttattccagtatccattagccaaaccgtcggctgaaatacataaactccgggtaccgtcatgagccgttgcatcatagaagtgcaaaacttctttactggcaggaggagcctgccaatagagcacttctgaagaaacgacctcttcggcagaaccgttctttatttctccccactgtccaccggtcaaaggttgacgctcttttgggacagaacatgcacaaagcaccgctatcccgaataaaacgatattattcttcttcattttcgatatttattgatgtatttatgacaactaatctgctcgttcgtagccgggaaaaactcgctcaaaatatcgtacaaaccgcggtcatatgccttcaattccttgcgggtattcacctggttatgctttccgtccggcttaggaacttcagcattcacattaaaccaatcctgtactccttcggcccaatactcttcgatattggtcgcggcataggtatctttccactttccggcagccaaagcggcatcataagcttttttcagacgttcattaaaatcgggatatacagtcagtattccgatcaaatgaatcgaatgggcaaattcatggaccagaatatcttcggcatggtatttatcgatctgatatcccaaaatattttcttcggcacaagtcgtcaaaggcaaccacttcgttcctcctaatcccctggctctcaagtcccaattcaaagaggtatcccgagccaaatgagcatgttcggggatatcggtcgtaccttcataacgagccatgacgcccacacgggtaccgatatctgtcatcgccttcaacaccccggcaggcagatatccggtcaacgccgtcaacgtacggtgagccgcatacatcgccgaatcgggaacccgccaggaagctataatatgaatcccgttggcattcaggtatttcttgtaaaaaggattcagcttcagctctagcggtggagccgtaatccccggtttctgtccggttactctctgctgcgcctttcccagacacagcagacaacaaaatacaatgcacatcacatatttcataacactttcatattagggttagacaatctgcccaccagcacaccatgcagaggtacatcattagcatccggattttcatccgcctatcggtttaataccttttcccccactttattacgtcccggtttttcctttttcaaatcacctaaacaaaggaatgacattcccttaactttcaataaaacatatatgcaaaaaaatacaacaattgtacaaatcgagtttttaaaaggaaaatagcatataaaaatcatacatacgattgttgacttgtcccccaaaacctcctaataaaaaaggaacggtgcatgtccagttttaaaccgttattaccgttttaactgtcggcaccgttttaaccttaaaatagcatccggtatcggagaaaattattctgcaaaaaccaaagttctgatacaatgttcggtttgaccggatgcccatgaataatagtcgaactcaaaatataaagtcttcgtatttttatcatagtaagcgatataatccgattcgagagccgtattcaccggttcatacatcgtcacgatttcaacttcataagctcctgaaggagccccgtctgcagtagattccacctgattaatcttaaataatagtggataagcagtatttccattatccaaccccatagcatagtcgtaatcggcagccctgaatttggcatagcgatcgtcataaaggctagtgcctgcagcttccagttcggttgttatctcatcgtactctgctttcgtatagattttatcaccgaaatgaacatatccggtatatccttcttctgtcaatgtatagtttccggctaatacaccggcctccaaagccggtaaaacgactaccgatgaagcatccatctgggtcaccgtaaagctttcggtaaccccttcccacactccggtaatcgtagccgtacgggtttttccggtattgttcgctgtagccgtcagattcagagtcacaaaagcatcgtcttcgccagcgacgaccatataaccgtcggtaccctgtacaaaactgactccctcactactgacagtcaaccaactcacaccggtcccttctactttatacttcgtcataccgatataatttccggaagtattcgactttgtacctcccgtatatgaaaacttcacttcttcagttccccagtcaatcaccgcacaaggttgtaccaaagtcatcgtctgggtcagattcccggccttaatcgttacagaaccggtgatttcctgagcggtcgtattcaaattcgccaccgaaacagtcacgatagaatcattggtccggctagctgtaaaatcgtccgttacgctttctacagtccaactatccgtataggctttcactttaatatcaccatttcctccccaaaaaaccaagttttccaggctgacatcacttaacataagtccggattcctgactaaccgtcactttttttaccgactgctctttctgtaccgtaatcgtcgctgtccgtaccgctgcctccgtatcgttcgggtccaccctgacggctatcgaatcggtgccctgaattcgttccggtttacaccacgacttatccgagctaaaggtccaatcgtcagtattacattcgaccacaaaaccctcttcgcctccttttaagccataactcaaattcgtcttcgtaaccgctagtgctcccgaccgctgagcaaccgtaaatattttataaagctgatccgataccgataccgtgatatgtccgaaacgttcttcagagccggtatttacttctgctgtaaaattcacgatcgaatccttttctacggaacaggtcacccaatcggcatctttatcgatactccatgcaacatccgaccgcacgataaacgaacccgtagctcctttagcactgacttccagggtgtcggcagataaactgatcgtaggtgcagcctgcatgacagccagactttgtgtccggctaccggcctgtatctttaatatagccgaacgtatttcagcccctgaattatcctgggttttcaatatcaacaaagtatcttttttctcataggtaatccaatcgtaatcgtattccgccaccgcccagaagtcgaaagtcgtcgtaatctttaccgtatccagccttcctgttgcagaacggttcaaacgggacggagtcagatacaaatcggcactttgagtggtaaaactacgtaccaccgaatgtacatccgcaacagaagcattttcatatttggcataagcgacataagaataagtcgtagccgattccaattcggtcaaatccagatacatcacagaatcgaccttttctacttttaaaacatccccataagataacaaagcactcttatcggtctgtactccataacagattcccacttcaccgataccggccgtctcattcaggcggatccgtacccgggcagatgtcggcgtgatcgattcttccagcggcccgccattcacatgtaccgaggatgtagtcaacacatcgtcgtcatcgctacaggctcctaaaaaaacggccagcagacctactaaaacggaaaatattttattcttcataagattcatcattaaagttatacttagtttttcacctccgtattgacaaatttcacccgataaggatattcttcatcattgccgacatcgtcgtcccaaacatgaggttcatgccgggtcggagctcccgataccacaaaccacaactgtttcagccctccaccgggcacggtaaaagatacggatgcttgcggagcagtcccggttgcctcccccatatccccgtatacaggtgtccaacttccttgcacaccgacaaaaccgaacctccatcctgctttgctatcaccgactgtccgataacggctgtcacctgtaatcccttcgaattcggcagtcaccgtcgttcctccttccggtacgctcaactgaaaagcattatagccgtaatcatgcggtgtaaaagcgatattttgctccgtgccgtgatctgcagtcaccgtatccggataggaacgataatatccgttctcagcgatcagacgggtcttgtgggtataccaggtttgccggtcggcctcgctttgtctatcgacgatacgccgcaaataaccgcccaaaggataatcccaggtaatgtcatgacaagccgattcccacacttcggcattgaattgatcctgtgaaagacctgcaatccgtttataagccgtaatcgggtcttcatggctttcagactcccgccatacccgtcccaacatatcttccccatgtttcatccgccaatattccatcagataaaaagcctggtaacgcaaccattcgtgcataaatccgcggtgatgattggccagataaataggtacatcacaattccactccgggaaaagcgcgatattctgccacgccatatgctgggcacacatctcccaaaaactattgccatcctgcgaagttccgctttgcccctgacggaagccggcctctttgttcggatcgtcacaatacacctgatattggaacgaatgcccgaactcgtgggcgatcgtctgtcccaccggtttcatcgtcgccggattgacccacaaagctccgatcacatcatcgtatcctccgccatatgccgtccacgtggtcgtataatggacgatcaccatcatccggatcgaatcgacgttcgaatttcccggagtgacaaaattcagggaatcatgatacaatttatagaaacgctctcctttttcgagtaaatcgtcgagatcgacagtcatatccaccccattcaaaggcggagcacttttgggatcgtcaccgaatcctttttcccagaataccacaaaattttcggaagaaaccatccggtgataactgagccgactgttatcgtcataaaaatccatagaccgcaaatcatcctggaccgggaaaaacagcttctttccactgggcaatacggtggcttttccttgtacctcactgtcggtaagccggcactcgatctcaaagactcctttctgagtcacagacaaattacaatcgaaaaagagatctttcctgaaagcggtattcgctttctcaaccttatattgtaccgcgttaccggtagattgtgatacaaccggataagagggaacgggataaggaacgatcaccgcttcgtcggtatagataatttctgcccagggattagccgtttcaaaattatttttatttgtccgggtcacccaacgatctttccaactaatgctctgattgcgtctgtctttaactttcagtatcaaataaccataatttttattataagcactgcctaaagccccggcgaattcctgcagctcttcctcgctcagttctttactactcacgtcggcaggagctttatcgctatccgtcgttccccaggttgccgatacagtgacagccttagccgaattgtctttcaactggatgcgacaaacgccttctttgatttgggtgacgcctccactgctaatctccagatcaaccagataaactgccgccggaatatttttggtaccggccccatacaatatcagttttccagtagaagcatcgaccgacagtgtcgccttttgaaccggattatatttagccagcaccgcttccatggtcttatccgtattcagatcgacaggcgaagaccacccgatgacctcacagctctcgaaaaaaagcggttcactttctttggtcgaaaaattacggacatctttgatctttaccgtgatatcctccccgactccctccggtagtttcaacgcttcagattcataatcttctcctttgagcacggaaaagaccgaggaaccgtatcccacctcatccagatcgatccctttgattttttcgttaccggaacacccggaagagaagcctatcgccaggatagcgataagcctccacccctgttttaatactttatatcccatatttattctactgctgaataataataagcatcccagtcttccgcactacaccaatcttcgtggaataagaaacgcaataccagttttttctttttgtagtcgtaatacgactcatctttcactacactattgtctcccggttcgaggaatttcaccacctccacccggtaacatcccggagcataagaagcttcctcatagtgtaatttgaaacacaagggataacggaaatccacagcaccggaagccgaaataatgtagtcgaaatcataggttccgaaatcgcttctcctatcccaatctaccgtatatccctctcccgccatatattgttctttagaaagaataatgcttccgatggtccctctatcccggctccataccaccatactatccaattgccaggtgaacgatgaaagatcgacctcttctatcctgaaccctccggctacagtcatcatgaccgttccgcaatccaccgttatcgtttctcccggcatcccttcatcgggcatcgttgcagagacataagccgtatcgtatccggtcatggctagtcccaacgtataatctcccggccccggcaccttcacagttgcaacaccatctgcatcggtcatatcggccccggtttccagtcccaaaatagaaacgcctgtgatcggcaggaaagtagaatcgtctaaaacggtaaaattgatcacataggacaccgttttgggattcaaagcaatctttacctccacatttttcgtacttccttcgcttacttccccgatagctaccgtcgttgtataatcctgataagcttcatgagaaaataccagattagcgacagcccgcggagcctgatcgaaggtcagcgtcgctttgccattggcatcggtcgtttccgaaattttcaaagcagtctgcttcaaagttacctccgctatcggtaagtccgtttctccgtcgaccaccgtcagattcacaacggcagctccggcaatgtattcttcatcggtgatctcgtcattatcgtcatccgtacaggccccaaaagccaatggcatcatccataacaaaaatgccagatatttaaatcttttcatacacttcggttttaattatttctttaccctttgaacaacaccggtatcatcagctcctttcagctgataagtaatttcaaaaactcctttacgctgtataaaccagctgaaacggagccagatatcaacccctttggtcgtcgccgaaggaatgatccgataataagacagatcgtcggtagacgtcggcgcattgatcaatgggaaaggagccatagggaaaggagcgatcatcgcatccgaagtataatacatcttctgccagggactccgtttttcgtagcttcccaaatccgattgccgctgacggatttctcctccgctattcgcacccgtattcggtgtccaatcgaaagcctctccataatgatccagcactttcagaatcatataaccgtagtcctcgttgtattctcctcctgctgctgccaatttacttttaaaagcttccagatcgtctcctttcagttctttgtaggtcacaaccggattcggacgggtacccgaattactggaattccacaaatcataggtaccttcttttataaaggaagaactctcggtcagaatgatggtacaagcattcctgatcacccgggtctctttcacattcgacactttgatatcgatttcatattcacctaccggtacgttcaaagtaccctcggaaaattccaaccgtcctcccaccggattgacctgaaaggtcggataaggctgcatagaatatttagcggctacctgttcccaggttgtatccgtttccgaattaatcttttctttccagaaagtaatctcactttcggaataccaggcctcttcggtttttccggtttctacattacgaatatccaatagctcgacatttaccggaccggtggaattatccagctccaacgcttcggaataagtcgtcagcccttgttctaccgtaaaaggatcggtcacatagtaaatattactgctcatgtatccttcttcaatcttgtcgcaagccaccagaacacctccggcgcccaacagtccatatatcagtttctttattttcataactttcggtgtttaatcatttccaactttaaatgcagaaaaaacgtgagaattatcgagtacatgcaaaatcgtacctgtttttgtacagataatacctgttgtctggcatttcaccgagatatcctgttctttcaattgctcggccgtcgaatcgaattccttgccgaccggatcgatttcatcaccgataatcttgcgcaaatacagaaaagagggcttggtcaccacagttacactggttccgggtaccgtccagtcactttcgttagtggactcctgctgataaacggcatatcccgaaccatccccggaataattgagaaattcggtgggtattttaggggcagtcgctaattcgatcttatcctggaaaaaatagatccggatcgaatcggcggtaaaatcacgatagagcgagtcgagggtataggcccacccttcgtcaccatgctcatcggccaactgatcggagcgttttttcaacaaagctttaacactgaaatccgaacaagcgaaaacagtagctgcacgattcatttcttcttccaacccataatggtcgatgatctgaatcaacgtatcgaacatatggtaggtatgcgaagacaagtattcgtaaggcgtagtattcgactctgccgaatgggttccaccatcgtccaggtaatcctgaatacaggatgtcattccgaataaaaacagaacggatatatacaataattttttcataatatgctgttattaaattagattttaccctgccaataggaagtttgacgtatcacactattattctcgaataaatccggatccagcggccaataatggattctcttcgccatattcgcttctgtaacattataaagtaaagaagtaccggtttcataataataacgtaccagatcaaagaagcgatggccttcgagaaagagttcccgggcacgttcgttcagaatagcacgttgtaaagacaccgaaccgtcgaaatcgccgatatcggccctttcccgtatctgattcagcaaaccgatagccacgccactgctttttccctgagcggtcaatgcctcggctttcagcaacatgatatccgacaaacggaaaataacataattgttagccggataaatcgatccgctggaggccgactcgatctgcacatccgtatatttaatcggaatgatatctccaccggcagccaagccgataaacgtctttctccggtaatccgtcgaatccgggaaaacagaagatataaaaccggtattcaaaaacttattgggtttttctttgttgattgcagtagtcaagtaaggagaggccaggatatccagaaaaaataccgtcgtgtattggataccggaagaagcatcgggagcttcttcttccgaattgaagaacaactggaatatcaactctttggaatcatttttataaatattttccagggtttcacgagcttcaaaagtatatacgccactattcaaaacagagtcacaagccgccacgcacttggcataatcgcgatcccaggccgccatatgtgccaaggtagcgaatacgactcctttattggcacgcacggcaaaattggcattatcttcatactcccagggtaaacgaacacgtgcttcctccagatcactgtaaatcaaagcagcgacatcggctaaaggcgaacgggccacataatccgcattgatgacattatccggagaagttgtcacgataggcagctcaccccaaatccggtacatataaaaataagtatatccacgcaaaaagtacaattccccgatatacttctccttctccccatcatcgaaaacctcgtcgctcatttgcccgacctttttcaaagcccggttacattgattgacgacccgatagaacagttgataattacgcaactgcttcaagggccgataggtttcactggcagcaatcgcataatccagtttaaactgattcatttgattccagtcttcatcttcatactcgaatttgctgaatacattggtaccggcaatatctccataagcataataagctgaatgattggccaaagctgccctcaacaagccatatccaccggcaaccgccgcttccacatcttcctcgctattccaataactttcgtccaccggctcgctgtacggctcccggtcgaggaaatcggcacaagatcccaatgccaatgctgtccatagcatcgctgaatttactaaatatctaaatttcatcttcataggtctcaaattttacgaattaaaaggttatctctgcacccaaagtaaacttgtgaggaagaggatattccgaaccattggcataaccattggtattgatattttccgggtcgggataagtcttactcttcgagaatacccaaacattgtccatatatccgtacactctcagacgctgtaatttgattttattcaccagcgctgtcggaaactcataactcatcgaaatatttttcacccggaaaaagcttccgttatcggtatagatctcatgggcgatatgccggttgtccatatgattggttgcgatcaaagtgggcaggtcagcctgttgtcccggtgttgtatagtatttcaatccaccgaaatccaatgccggcccggaaacatttccccatccaccggcagaataaaccccaccgttcatccgatcggacaagaaaccattccagaaagtacgtttgatcacatagttacaaaacacccccaatgaaattcctttccagcgcaccgtcgtattgataccgccataatatttcggatccggatttcccagagatactttgtcattatagtcgatattataatctccgttctgatcgacgacagctatatctccggcctgcatagtcgtaccgaagaaggtcatccggttaccggtcagcggatcgacaggcacatcgtcgtcagtggcatatattccattgcttctccatccggtaatttcatacaagggccgtcccaccgtcagaatccactccatccagggagctccggtgacaatactccggttgccgttcggcaattttttgatctggtttttattcatggcgatattcgcatcgatcgtccacgaccaatcccaattgtgcggaagcaaatccagactcaattgtaattcgacaccgctgttccgaacggataccagattgttcttcgcttctgtatatccggtggtgaccggcagagcataattgaaaatcatactctccgaatcccggatataataatctcccgttaatataatccgcttattcaggaaatgagcatccaatccgaaattcatctgtttcgactcttcccaacctaattctctggaagttacggcagagccgaagtcataagcaatcgtccccgaaccattataggaagtgatcccactccccccccgatagtccacgttggtggttaaagcccggtaagcatcgtaaaaaccggcggggtcatttcccgtaataccgtaactaccccgaatcttaatgaagtcggccacctgattttccggaaagaacgactctttggtgataatccagcctgccgataccgaagggaaatgtccccaacggttatctttaccgaaacgggaagaaccgtccatacgccagttggcagaaaaaaggtatttgtctttataatcataactcaaacgggcaaaccaggataaacgggcacgctcttcgatcgaagaagaagcattggagtttttagatacaactccctgaatcgtctgtatagaattcgatgcaatataatttccttccccccacaaattgtcgatataagagtattcagctccttgtccgaacaatacggaaagattatgtgtttctttaaatgaccgtaggtattgaatataattttctatttcccatctctttaccgatccactgctggaagtggcatatgcatttccattattgcggtaggaagggatgaaataatcgttccgcgttgtactataaccgaaagagtaagaagtcgtccacttcaagtagggtgtaaaatcgatatttgcctgaaaattagcatataaatcccggttgaggtttttatccaattcatccagattattccctttaaaattttctatgtcttcgtccgtcaatttgaaaaacgaagaagggaagctccaggtagagaaaatattgatactaccgttcgttttctttcgcgacatctccgaaaaacggatatttccggtcagattcaggaagctgtagggatgtgcatttaaataaagcgatgccgtattccgggtgaaaccggtaccgataaccgtaccctcctcatcataaaaattataagacaaccgatagctggtcttctctccataagccgacacattgacatcgtaattctgaatccgggccttctggatcacattcgattgccagtcggtattattattgaaggccggattcaaactatcggtaatccaataattgacattctccatacccggctttcctaaatactgataaatcagatccatctttaaatggcgttcggcagtacctaccaaggtcgaacgcattgtcggtttcatagccaccccataatagccgttcaagcgaacctgaggtttacctgccttcggagttttggttttgatgataattaccccattagccgcacgggctccataaatggccgatgccgaagcatctttcaacacatcgatcgattcgatatcattgggattgatcccggcaatcgggttagtccccgtcaggtcgatctggcctaagtcgccttcgtccatcacaattccatccaccacatacaaaggagtacttcgcgaatcctggctggcaatactggtattcccacgtaaagtgacaatcccctttgcaccgggttctccggtaatattcaacacattcaaaccggccacttttccttgtaaagccatttccacactggggaccggaatattctcaatcttttccccggccacactggcgattgcagcagtcgatttctctctcttaatcgcctgataaccgattactaccacatcttccaactgcttgacatccggctgaatactcaggttcaccgttgtttttccgtttaccgccacctctgtcgtcttatagccgacaaatttgaaaatcaaagtagcgtctttgggtatattcaacgtgtactttccttcaatatccgtcacagtcccaatattcgaacttcctttcaacaatacattcacgccaggaacaggctgattcgtttcatccgtcactgttccagtcacctttaccagatctgtctgagcaaatatactttcaggcaatccaaatgataaaagaagtatcagcatataaagccaacaccgggtcggtagacctcccctttttaaattcttgacaaatttttccataaactgatttggttttgatttcaaaatatgttttcaggtacaaaaacgtttgcataacaccagcaaacgatttcaccactcatgtagaaaaacagatcggaagagcacacgtctgaa

SEQ ID NO: 5851 - DNA, 14994 bp, Unknown
  gut microbiota DNA sequence
caatggttttaatatgttgagggagatgaatgaaactgaaagtaaaactgataatttttcaataacgtcccgttttaacctcgattattctttttttaagcagctcaaattttcgggtttggcttcttattcttttacgaacaataaaagcgataattataaagggaaagatacttacgctgcgtttgttgaccgtttgtatttcgatacccaggggaatagttcgcggacgtattcttcgatatcgcaatccaataccaacaattcaagttacagtctgcgcggtcaattgagttattccgatgtctacagggaaatacaccgtttttctgttttggcaggtgctgagattcgtggcgagaaagccgaaggtatttttgaaaaacgttacggatatgaccctgtgaccggtaattcagctatgccggttcctaaagatcctggtaatggagaaggttttaaatattcggatctggtgtcttatgccaatgcaatggatcaattgtcaggacaggaaatagaagaaaatcgttttgcttctttttatggagcgttggattattctttgtttgaccggtatgttttgaatgtatcgttccgaacagacggatctaataatttcggtagtgatgaacagtttaatccgacctggtcggcaggtgctgtctggcatgtgagtgaagaaacatttatggaggttgttcgtccggtattaagccggctgtcattgcgggttgctaccggttataccggaaatatcaataagacggtgaaacccaacctgatgatgaagtattataaaaatttccggatatccgacgatgagaattaccgcatggggtatattaacaatgcaccgaatccgaaattgagatgggaaaagaccagggatgtgaaagtggctttggatttcggattgtggaaagaccggattaacggtattgttgaagcttactggcggaaaagtaaagattgtgtgaccagtgaatatgttccggtaactaccggattttttaaccagtcgtataatacctctgtattgcagaataatggagttgaattttcattatcggtagcagttcttaaaagtaaggattataatttgtcggtatcggccaatgttgcctggaatcaaaacaaactgaaaaaatataattcacctaatacttcgctggctttggataaatatgtaggttatcctatgggagccgtcttttccgggaaatatgaaggaatagaccctgaaaccgggatgtataaatttaagcttcgtccggatgctgtgacgaataaagacggatatttacgtgagcctaataattactattattatctggggacttcggtagctccttttaccggtggatttaatttgaacttttcttataaaaatatcgggctgagtgtaggcggaagttattcagtaaaggcaaagatggtggataatatagaatctccggctggatatgaattgctcagtggaagtaagttggaatctatcccgactccccataatgacttgtacagaaatcatctgaatgtaaaacgtgaggttcgtaaccgatggactccggaaaataggacgggagtgaaatatccccgtttaatagatgcttatggaaaaaaattgggattagacctgactaatcccaccttaactacgattacaaggggagctttactggaagatatttcctatctgcggatcaataccattgccttgtcttatagtttgccgcaaagagtattagaacggataaatttctcttctgccgcactgaacctgacattgaataattttttcaccataacgaaatattccggaatagacccggaggtcccgggagctacttatccggtttcccggtctgtgactattggtttgaatgttggattttaatgatatgtgtatgaaaaatctgaaaatgagaataatgctgatgctattgggggtatgtttctcctgtaatagttatctggaccttaaaccgtacggagagacaatcccgaagactccggaggaattttcggccttgttgcatagcatcttgaatgacatagactacggtacagaccggattatcattgggaatagccgttctgtactggattatgagagttatgccgataatctggatgccagcttgactatttatcctgaaggtggccagttggatttgtatgtagctcctcgtttgaacggttaccagaatgtatatcgggaactctatgagaaaatacggaattgtaatctgattatcgaaaatatgaaagatcaggatacggaactcggtaaggatattctggcaacttcttatgcattgagaggggtatgttattataatcttttacgatggttttgtgaaccttatgataaagcaatggcaaagacccagttgggtattcctctggtcagtaattttgacatggaagcactgacggaccgttcctctatggaaaagacggtggaatttatccgggatgacttgaagagggccattggtttcaatatgaaaaaggatatctaccggtttaagacagaagtggctaaagcctatctggcaaaactatatttctgggcacaggattgggaaaatgtgattcctttggctgaagagttattaaaggattttccactgcttcagggtgacgattatgtgaagatgatacaagataaagcgactacccaatcgaatgttttcattcgttcttatgtttttcagggagcggataatagtgagactcaggtaagttctgcaatcccttatcgtcctgtaaataagtcttttatcgatttgtttaccgagaaagaagctgatattcgctatgccctttcatttaataaaaagcgggaagagacaaaagtattacgcggacgggtaaggtgtgccgaaatggtgttgatgctggcggaatcttatgctcagctttcggatacagaaaatgccctgaaatatttgaatctgttacgatctcaccgcatcactccctatatcccgtatacgctggaaaatctgccggaagtgaatccggacgctttgatccgggttgatgcgaccggaaaacctcttaccagactgatggctgctattatgaatgaaagacagaaagagttgtttatggaaggtgatcgttggtttgagttaaagcggaatggacgtcctgaattttgggttgcaaaagacggacaaaaatatgtgtgtcagaagtttatgtatacagctcccatacatcggaatgacctggagttggttccgggtatgcaacagaatccgggttatgaataattaatacagaaaaatatgaaagcgaagatttgtttttggatactgtttatcgtattgttttgttgtggatgtgctgaagagaatgaagtacctccctatcggaaaacgtcgacagaggcttatgtcatgcccaaacctgttcccttgactcccgaagagagggcattgattgattcaaaacgggaagaatataagaatgcaattaaaggtcaataatttttactaaaaatctgaacttatgaaaagaatcgtttttttattatcatggtttgtgttactgggaaccctgatgtcttgtagtgatgacaatgacgatgtgaatccgcctgctttgtcgtttgcccaatctgtttatacattaagtgcagacgcatctttagtcgttgaattgcaggcatcggctgctgctacacagaatacatccgtaagttttactatctcagggactgcacgggaaggaatcgattacacgatttcggctaaggagtttaatctgaaggcaggggaaacaaaagctcagatcgtgattactccgaaagacaattatacgccggatatgcagatccagctggaattaaatgctgtagggggatttgaattggggaaagtgaaaattacgactattacggtagaaacaaaagataagattgtctattcttttgtaacggattaccatgtgctggccggagaagtaactattgaggccgaattgaaaactccggatggtttggcgtacattgctaccgaagatattcatcttccttttacaataagtccggcttcgacggcggtgaaaggagaaaattttgatgttgaaggtaatgtgacggaatttgttattccggccggcaagaagaatgcttctgttaaactgaattttttgaaacaggaaaacggaaaggatgaattggtcttggaactggacaatccgggagagaaatttatgctgggaaattatggaaagacaaccataaaagtgtatggtccgacaaccgtaggtaagttattcggtaaatgggcttttaagagctgtgatagttttgaaggacttaaaaaagattatgaaggtcttgtatcagccagtgattttacccatatgccgacgaataatctgctgacagataccctggagtttattgccggggatgaaaataaattgaaacttcatgttaccggtgatatgaaaaattatttcagggattgtgaattggtctatgtgtgtgatacaactgtacgtacaggtttgtcaacccgtgtcgtgtattctttgatcgagatgagcaaagtcaatgtcagtttttctgccagtacagtcaacgaaaggaaagctcaggtcggtttcaggatattggaagatgaaaaaacattggaagtaaccgtattcgattatgcaccggttgacttttttatggaaatatatgattttttcaaggacgacccccaagccctgatgtgggatgcaaaaattcagtatattttcagtttggttgaggaagaatgagatatatagtcattattttatggattgcatgtcttggggcatgcaatccggatgtaaagcaaaaggttacggtaaacggtaagctgacaaattacaagggaaataaaatatattttgagatttccggccgggattctttagttaaagcggagcttgattcggctggcagattttctgcatgtttggagttggatgaagggacttatgtgcgcctgatgaatgggaaagccgcttttcctttgtatctggcacccggcatgaaactcagggttgaaatggatgcagccaaaataaaaaatggcgaatatgggtcggttgtatttcctgaaggcatcaataaagagactcgcatgatgatacattattacgagaatcaatggttcccctctacggaagagttatttatctatactccggctgaatttaaagagttgctggatacgattgtcggctataatgatggattgattgaagattttttgaaagctgattcatccggttatgaccgggattttgcagatttgttcaaactgcaggtgaaagtacctttggctgtatcctatttctattatccggtgtatcatgctttgctgaatccccaggatcagagtgaaattcccgaagactttaatatcttcgatgagatattacccaagaatgactctatgatttataataaggtctatcgttacaaaacgtacgaaatttcctattggaatgagaaaatcgctcaggaattgaaagacttttccggggaaccggctcagtatttcaatgtatggttcgataaactttcggctttacatctttgtccccagattgcgggtgatgtggctcattcctttattatgcggcatgccaaagaaatgactcctgaagtcaaagagatcgtcagaagtcgcagtaagggggtacttatttcctccagccagcaaatagaagatttttgactagtagaagagaaatccgataatccgtatttttcagaatatttgtttctgaaaaaacgtgtccggagtgggtaaaatgatgagagatttgagttttattttgactgttttgtttttttttatgacttttgccggaggataaagcagagatatgatagtatggaaaatacaggtaagatttttggaatatcgctgggaccgggagatccggaattgattactttaaaagcgttgaaggctttgaatgccgtggatgttattttttgtccggggacgaaatccggcgaagggcggatgaaatcccgggctttggatattcttcggcaattggaggtcgatgaaactaaaattcgtctatttcaggtgccgatgtcccgggatcggcaggaagctttgtgtgcttatgaccgggtttgcggagaggtattggaattggtcagatcaggaaaatcagtagggattacagctgaaggggacgcttgtttttattcttctgctcattatatgtacgggcagcttgcgcaggccggttttccggttgcgatgatcgccggtgtacctgcttttattgctgccggggcatctgtcggattgcatttggtaaaacagcaggaacgattgttggtgattcccggggatgtgattgtcgaagaactgctggaaactatagttggcaagcgtacactcgttatcatgaaagttcctttgggcgaggcggtattgcgtccttttatagcccggcatcctgaattacactattattatttcgaacaagtgggaacaggacaggaatattattcttctgtgcgggaagaaatattggggcattcgtttacctatttttctattttagtgataaaaccggctttctcccgttgagaagcaggggacgggagaaagcggtcacggtttcaatgaactgtttttttcttatagtacttgcctaagaatagcaggataagcagaataggtacccaaagggctttgaccgaatagtttcctaaccggggatagacatattggtcgtcatacgaggcaaaagacagctctgccgggaaaaagtaatgtccgatttttgaggccatgctgctttgttgcggataagtcagggtatcgaccaaagaataatccgttgcgtcgagagcgaaaatatgttctccgtcttttttgtcgatgctgacggtccagttgaaaagatctccgataatttgtatatcgtcctgccggggatcgtattttcctatcggtaggggatatagctgataatccggattggataatgcccaaagattattttcctgatctgtcagtagggcataaaatttacggttcggatattcttttacgaaaatatgtgtgatttcgattcccttgggtaaggggatcggacgaaaataaggacgtccgcgcaattgtttcagatgaaaaagccggtgatccgaatcggttagaaaatatccttcatcgtactcctttttcacagtgggattgcctccgatacaccggaccggaaaacgaaagtctttctttttcattgcctgggtaaagatttcacttttcttttccagtatggtgttggttgccatatctataaattcgatccggtcgtttagccggaatacgtctcccggcatttgcaggtctacccgtccggacatcgcttccaatagcggatataagcggggaaccgttttatttatgtccgaagcggattgtctgaaaatgaaattggtcaatcctattttttgcggagttagttttattccgttcaggctgtccggcaggcggccgtcggaagcgagctgatggtaataaaagaaaggcaatatgctgtcgaactgacgatcggaataaagatgtccgttccggtctttgtattgtacccctttgttttcactgtagtcgagacaggcaaaatcatcgatgatgcagctgtatagagtgaaaggattgcgtattggctgggcggtcatgaaatggtaaaaccagggaatgagccaaagggataagacaaggatgataaaaacgaaaaatattttgctatagcgtgccattgattttattttttaatgatgatcagtcttgttttccggctttaaagcgtgtgacagatagccagggcaatatgaatgtgaaaccggtaaaaagaagcaggatccatataaatccgtcatatgcctgaggaacattcgagaggaaaaaaatccgtataataccgcaactgataaaaaagttgagaatcttccgtttccaggtcggttcgaggcaaatccagcttgtcagggaataggcagtaataccgccaatataccagggaagcgaggtcagcaggatgcggtcggttagttccggagccagtatattttgaagataaacatacaggatgaggtagtcgataagataaatgacgatcagttcactcagaccggcaatcagcatcagcattagcatccggttttgaggatatggaagatgcagagtcagctttaaccgtttttgctgcatttcgggtacaaattggacaatggcaagcaagagtcctgccaatagggggatataggtcaaagtttcgataaaaacgacatccctgctcaacaggatttcccataaatgggctactcccctgaaattgatcactcgttgtactccaagcagggcgtaaatgatgaatatgaccgatacggttaaagcgataggaaagtaacggcgtgttttgatccattctttgtaaaaaattgcttttttcataaattcaatattttccggttaacccgataaaaacgtcttccagattcattttttcagcggataaagaagtgtgtgggattccgttttgttccagccactgtttgacatattccatatcctgaaaagaataggtctcggcatgtccgcggattacggaggtattgtagagttgggaatccgccggtaattgtacttctccgctcccggttgtaaagcggtaacgggtgaaggtgttcagtaagtcgtttaccggtttttgaatcagaatttttccgtaatccatgatgatacaatcgtcgatcagacgttccatatcctggatgatatgggaagtcaggaaaatggttttcgattcggctttagcgtattctttcaggtattcgataaacagccggcgataaccgggatccaaaccgagcgagaagtcgtccagaacgagtaattctgcattttgagcaaggattagtcctaaagctacctgtgaacgctggccacaggacatccgtgagattttttgtccgggagcgactttcagtttgtgcatcagttcgtagtaggcatctttattccaggccggaaagaaggcggaataaaaccgttcgatttctttgatcgtcataaatgtgtattgtacgtgcccttcgatcagcaaagccatccgctgccgggtctgcggattcatgttccggatattttccccgaatatccggcattctccggaatggggctgtaaatatccgctgagaatattgatcgttgtggttttaccggttccgttcttacccagtaaacccaggatacgaccccggggaacctgaaaacttaaattttcgtatatcagccgtttcccatagtagtgagtcaggttttggcattcgatgatattatcctgcatattgaattgaattagaatttaagactgcagccgaccgtgatccggtcagaataattatgattccggaacctgcaatgttgccagccgatgtctgtggataaagtgaacgtatggtttaacggacggttccatacgatggacagttcgtagcggctgaaatcgcttttcaggttttcatattgttgccggacggcatttttgatcagttcttcggaacttaagcggtcgatatccaaatggctggttgtcgttccgaaatagtctcccgctatggaaatccggaacaatgattttctgagcatcagcaaggatgaaacggacagacctccctgatatttggaatctttcagggaaagggagggggacagataccctgtgctgacagagcggaaaccgatccggggctctacccatagtatatcctgctgttcatttccccagccccatattccgtttaacaacaaggcatatattttattgctgtattgttccaaatcgttgattttcggataattgctactactaccttctccgtagataaattcagtaccttttcgtttatggtacagtccttccagttggataccctgctgatgtcccggggcagaccgtttccatccccaggcgccctggatgctgttttcgttcaatcgggtcaatggcaggtaattgtgagccaacatggttcgtttgatgttcagcttgtgaaaatggacactgccgtaaaagccttgccggtcgtgcggaacgaggtcgatacctcctccgatgcttcctccgtcgtattgtattcctgtatttccgtctgaaaaccgggtactatacatacctaatcccagcatttgatacactttggatacgcccaggtccgaaaagaatttgatactgttccgttgacggtaaatccttccgtaaaccgcggctccgatgaggtatcgggtatggacctgccaggcagcacctcccgacaatttcagatcggaaacaatattgcgcggccggggatcggttttccggtattcgatcattgcccggtagtctccgctgagtccccaggaaaagtgtttatagatccgcgagtagcctccgcagaatgtataggattcggtattcaggtcgcctccggctgtgtcggccataatgtatgggtacagcagttcgaaatcggaagtttcgttccagcaaaccgatttgatttttccggaccggtatccggcatgcccccagacagtggttcggggattcaggtggaggtaactttcggcccggaatactccttgccggtatccgctcccttgttgtacgataacggcttccttttcatttttgtattctccgcttaaccggagagaagagagactgaattgccgggcatagggttgtaaggccggattggcatatgacttttctccgaaggcgaacagaggggaaagacattcccggacggcttggaggctgtccgggttgtcttttcctattcctaagatcggtgtcgtatacaaaaacaatatgatgaatagataaccgttccttttcatggatatttgtttattctttcagagacggggtcgcatcggcttcgaagtctactgtcgaattgttggtgtcttgtaatattttgcgtccgttaactgtcgattcgactttccgccgtacggatttgttgtaccgattgggatcgtgatctatgctaccacagtgtgtccagccggcatccagggaagaagaggtgacaatccactggaatttggattctacacttagattgacggcatcgatgatccaggaattggggacgtaataggtttcttttttcatgggaaatgaatattcgttaaaaacgaatgtgtaattggctgtataggcatattttgccaggaaagtttctttgtctgtttccattttggctaaggcatagctatggaatccccggttgtgtaagccggtgtaagtagctgtgtaagaataccatttgtccaggttgggtactttcggattatctgtatccagaaagttggggttcgaagattcgtcataaaattcgaagtctgcaacactcagatcgaatgagttgggattggcttctgtatgattgctggcatccagggccaatagcagggattcgcccggctgtacaggatgatcctgaccggaacccggaatgacgaaaatgaagtctacagagaacccttgttccataatatccggggtataatcttgcttgtctacggtcataaattccgattccagaattgccagaccgtcggcatacagtacttctgaagagttgttgtaaattttgatgtattggtctgcgctgtattggtctccggacggagtcgtactaccggcgaaatagatctcttcaatgacgaaaccgttggtagagggggtatagaaagacatgacctgtgcgggcagggtcactgtcgttccgctgatggttaccgattcctgataagcacggatattggcaactgtcggagtctggataccactgatcgagtagctgacttttccctctgcaataactcggtataaaccttccgggacggttgccgtgacggtgacggtttgttcgttcatactgacactgccatcgtattgggtgttggtgttgatgttggtgacggttaccttcagatccgatagggtcgggttttcgatatcttccggtagtgacagcgtccagcttacctgactttcggggactgctttatcatcatcatcgcaggctgtgaatgtgaaaggaatgataaatgccaataaaatggcctgaaatagattgtacttagatttcataatattaaatgttaaaatttagttccataccaaaataaggagattgaccgatctgtctgacctttactccattggaggtataatcgggatgacagctgatcaggcggttgacaaaaagcgccagattgatccggtctctatatagttgttttgtgactttcagattgaaattgacattgaaagcctcgctgattctccggtcgaatagggcttcattgtatgattttttcagccattgcaaatacatatcctggctggattcttcggtataaggataactattgccctgactgtctatataatattcgggaatcccgcttttccattccgtttgctgattgctgaaccacaggcattgtgccgacagggaaaagcctagtttcaggttgggaatatgggtgtcgaacataaaatttgtattgaagctttttctgatgtatccgtcgggatcggtgtaccagccgacataaggtaaccgccggttgttgatgatcttggtactgctttcatagtaaccctgactattggaatagacggtccggaagtaggctcctgaaatggtgatccgggtggccaaagccggaatccgtttacttgaaaactgaaactcgacgcctgttttccggagttttgtcccattggtcgtgatgccgtatatacacatcagggtatcttgtgtataagtcatctggcttagatcggggggaccgtctaaagtcgttgcatcgatggaattgttatcgtatgttttgtaagccagcggtagcagccgggttcccgtccggaaaccggaggtcatattttctttaaaataggtgacactgagattgttttcagcgtatgttatattcccccggatttcccatttgaaattccgggcagccgacaaatcggggttcgtccggtcgatgatgtaagtgatcatctgcagacgtctgtaggccggattgttgtgataatagttcagttgtatgatgtcttcatataacagattgggatacaattgagtcaaagaaggcatcatggaatgccatccgattcctcctcctatttcgtagcttagtttctggtctccgatgaagaaagcgggaaacagccatttcatgttgacacgtggatcgaaataaaatttgttgtggagtttatatgctttcggtagattcagaagggaagaagcccggactccagcctgtatttccaaggtatgggtactgaccggtaatgtaaaataatcctcggcaaaaaaggataggtcgtgtcctgccggtatgtcgttataggggcggggacgtgtagagatggaggtgtagttgaccggccgcaggggatcgtaaagttgtccttctccgaaatttttatccatctgccagtctgtacctattttcagttcctgtcttgttttggctataaataacctgaaattacccgttaaccggacataggctccgaaaggacggttgtctactttttgagtacctacgaattgaaagggcagaaagacgccgtcatgttcccctgcttcattgctgttcggggctgccatagcccggctgagagaattatagcgtacctcatcgaccttgtctttggaaaagttgattgaactattaaaagataaggaattgaaaaatgcggtttggttttccgattgccattcgatattattgatccaggacagccggttgattctggatttgtaactgtcttctttatgacgattgatgtccgggtcgattttttcggtattgaacgaaccgttataatcggcgtgagtactgtaaaagacattgtacggaccggttttccaggttttttccaaccggagggaaaaggtcaggcgtttgtaattttccagattgtcccgggggtctgccttggcatccagccagtcgatatcgctgttgattttgatttgccgtttcggaaattcgaatccttttcccaggtaaaccaatttgctgctttcatctgctttgaatctggcattgaaatggttacctcccattttacgtttgatttttacgattccgctggtcagatttccgtattctaccgaaggaataccccggatgatttctacttgttcgattccatcggtagaaatgctgcgcatatcgactccccggtttacggtacttcttttccggtcgtctgtacttgcttcaccgctgacgtacagcatatcggctccggtattgatcggtgtaccgttgatgaaaaaagcgacaccgcgggaagcgacatcgtagtcggaactcgaagaaccttcgccggcttcccgcaaccgaatcgggtttacctgatttagggccggatccgctgaacgtccccccggtaacaattccaggagatcgctgaaactggaaggttgaagatgttccatggctttgcggtcgattatcgaggaggaagtcataccatgagactcccgggcggtaacgataacttcctgcatgacaacctgatcgggagccagcagaatatgccgggaaaaatcacctgtaatccggatggtgtcggtataagttttataaccgataaaactgactttcaatttatagactcctgtctgaacggaggggaataaatattcgccttgtgcgtcgctacttcctgcaatgattttatgattatcctgtgttaagctgattgtcgccaaaaaaaggggttcatgattgatagaatcgcacactgtaatccggatggggaatgtattctttcttgtgttttgaccggtcagattatcagtcaaaacaaaaatcagaatgattgcccatagtgttttcatgtttttattaaaatttaatttga

SEQ ID NO: 5852 - DNA, 20726 bp, Unknown
  gut microbiota DNA sequence
gcaaagtttgtaaagctgtcagagaaaaaaaatccccatttattgttattttttttcttactgggataacgggatatgattacttgattttagagtaaagacaggatgtatttaccagaataatcggaaaatccggatttgtcaggtagtttaaaatacctaaaaattgtgattacaaaatcgatagagaaagctttacttcgcatgcttaattgaaattttgtatgatacaatttagaacattattcctgtctgtattcggactgttcatgatggcctgtgcccgggaggaaatcatcgtatctgaaacttctgtacaggacactccgatcgggatgcaggcacaaaaaggacgccttcgtttaaaatttaaatcccggtttgccgggaaagctgagcaggcggtatatacccgtgccggaaccggagatatccggatcgtatctatgaaacggttatttccctttgccgggaaatttgaagaaaggacccggaaagcgggtctgcatctttggtatgaggtcgagttcgacgaacagacacctgtgacccgggctctcgccttattgggagatacaacggagattgagatcgcagaaccggtatacattatccgtaataccggaggagagggaacggttcctgtccgctctgccggagagcggaattcggatggaactgcacctttcaatgatccggaactatccagacagtggcattattccaataccggagagttaccgaattctgtggcaggggcggatatcaatttatttgcggcctggcaaaaaaatcaagggtcgagggaagttattgtggcggtcatcgacggaggtattgattaccggcatgaggatttgaccggaaatgtaggaaatcctgcagaattattcggagagccgggggtcgatgatgatgggaatgggtatatcgatgatatatatggatggaactttatcaatggaacgaatcagatcgaagcggatgatcatgggacccatgttgccggtactatcggggctgagaataacaatggtgtcggtgtttgcggtattgccggtggacatggcggaaatacgggagtatggttgttgagttgtcagctgttcgggacgatagatggccgggaggtttctgcttctttcccggaaatgatcaaatatgctgcggatgccggtgcggttatcgctcagaatagctgggggtatgaaaatatcacttatttaccccgggcagatcaggaagcgatcgattattttattcagtatgccggagtcgatgaacgaggggagcagacagggccgatgaaaggaggagtagtcatatttgctgcaggtaatgaaaataaagattaccggacttatccggcggcttatgaaaaagtcgtttctgttgcggcttatgctcctgattacaaaaaaagctggtattccaattttgccgactgggtcgatatcgctgctccgggcgggacatacggctatgggaggaagtataacggtgaatgccctgtatacagtacgttaccggataaccagtacggctatatgcaggggacatctatggcttgtcctcatgtttcgggtatcgctgctttaatcgtatcccaattcggagggcccggatttactccggaaaaacttttggctcacctgtatcagggaacccgggacatcgatatttataatccggagtatgcgggtagattggggataggggccgctgatgcctatttggctcttgctgaagatcagggaatcgctcctcaggctgtcgataccttatactgcggaaatacttccggagtggttgacgtgacctggcagatctcggccgatgaagatgatggcaaaccttttcagtatttggtttgttggagtgaagaccctttggggcaattggatcccggacggttacccgaaggagttgcttcggtacgggttactgttcccagggccgggcaggtcggggatacgatggcgtgccggctgacagctatccggggagaaacccggtattatgtaggtattgttgctattgatccctggggacattattccgggactacgacggtttcttttgtgtcgccgcataatgaacccccgatgattacttctgaatatgaggaacaagcgcttactttgaagtataaccaaaccggagaaatagttttttggatttcagatcctgaaaaccaggaatttaattatgaattggaagatgaaaaccatctggcggcagcgacacaactgaatgaccggattacggtgaaaatacgtaattatggatttcaggccgggacatatcgtttgtgtctgaaagtgacggatagcggaggggcaatggcttccaaagaatttacggtggttctggagccgaacgagagtccccgtttgcaatctccttttgaaaatgtatggttcggttccttgcaggaagtgcgtacggtgtcgctggccgctcattttactgatgaaggtcccggaggcttgagttatgcttatgaatatgatccggcctatttgactttaacttccgggcagggagaatttagactgaaacccttgaaattcggtctttcccaagtgaaaatcactgcgacggatgctgaagggcttgccggggaaactgattttttggtgatgacccatgactatcggcaagaggtaaccttttatcccaatccggttatggataaactgaatgtccggatggggcgggaagtagaaggaactatttacctgactttttcgacgctggacggacaattggtcaaaaaggtgaatgctccgatcggaccttttgctccggcggaagtagacctttccggtttgaaaaaaggaacgtatgtcgtacaattgaaatatttgcaggaaacctatacccgaactctaataaaacaatgaaataatgaatcgtattttttatatattggtgatatgttgtcaggcattcggagtatccgcacagtcggtggctgatgccggtttgtttacgtattcggcggccgggacggttacagcttctttgggaggcaacggggttgcctggggaccggatgcttttgctgtgttcaggaattcggcacagggggccctggctgatgcgaaggttattgccggttatgcggtttcttcctggatgccgggatgggatttggcggatcggcattggatacatgatgccggagggctgtttacattcggaggaagacaggctgtacttaccggagtgcgttatctgaatctgcctattgtcgaattgactgatgaagaaggaaatcttcagagccgttttactccttacgccttggaagtggatgccggatatgcttatgcttggagaggaaagctggcggccgggctgacgtgccgctatttccgcctggaccaaaaaacattgttgacaacatatgtagcttgtgatctgtctttgttttatcgcgattcgcttgccggacgtccttacttctggcaggcgggaatgcagctgtcgaatatcggtgaggcttatctgcctttaaaaatcgagtatgccgtgagtgccggttgggaacagggggcacatcgggtgatgtgtaccggaggaatagcccatcaggaattggcttatggattttgtactttgggaagtgcaggagtagagtattctttccggaagaagatatttttacggggcggataccggagtggcagacctgcgaaaggtatatttgcctgtacggctttgggaggcgggatgaaatggcacggaatcggccttgatgcaacctggagactggcatcttccgacagtccccagagaaatgcatggcatctggcccttacttttgcgatttgaaaatcaggaaaagaatatgaacccgatagggatgagcaaaccgagtgcgaattcgatccctccgcgtccccagaaacctttggggcctttgatcataatcaaaccggtgaaggtaattatcagtagagacaaaatgaaaatatctgaaaatacagtccaccaacgagacggattataatgaaggcgattaaaccagctgataaccggccgttttttgattgactcgtagatcccttctccgctttcagtgtggattaccagagaacttcctccctttatgaagattttgatgcatcccggttcaggggaataatgtttcaggtaacggttctcttctccgattgtttttaacagtctttcggcaaattcccggtttatttcctggggattcgccgggattggctcggtaaaccgaatttgtttttgccggatgagataatcggaattgaaatcctttttgtggttgagcataaaaccagagatggcataaatcatcagtatgccggcaaaaaaaaaggagaggtcacgatgaagtaacctgctccatttacggatgatatcagaatatgatttttgtgacataatttattcgacaatttcgtatgtatctccttcaatgtaatagaaagacaggtaatttttgccttctttggcttgacggtcggcgatcctttgccggaaattggtgatccgttcttcgatgctgttggcaggcgcttctccccttgctttttgttcggatgcacatccttgctctgtcgtaccgtgtttctccgcagtctgggctttcacctgggcttcccattcggtcagataggcttcatcgattcgctgttcgactaattttcctgttatccggaccagattgtttacggtttcgggtttgaaactgccgattttcgtgccggcctctacacggatggttttggtgtcatcgctacccatcaggaagattttgccgcctccgtgagcacagatgtgcgtacagagcgcttctgtcgtgaaagtttttccggtcagactgtcggcccgggccaatatgtcgtccacttccagaatctgggattgtgacatttgggattgtgacgtggccgattgagtcgttttggatttgcaggatgtcaacagacaagctgtaatagttgtcagcatgataaataacaaaatatgtttcattgttccgatttttaaatttcggtcaaaaatagagcttattttcacttttttaaataccaatatataggtatttagaagattgagagtggggatattcggttttagatatactccgggcgaaatatttttgacattcattttttacttccggctttttcatatatctttgcaatccctatcgagtatggggagagtattaatttttttaattagaaacaatgtctacaaaaatcagattagcgagacacggacgtaaaggtcgtccattctatcatgtagtgatagcagatagtagagcaccacgcgatggtcgttacattgagaaaatcggaacttataatccgaacactaacccggctactatcgatctcaagttcgacagagctttgtattggttgatgactggagcacagcctaccgatactgcttcaagaatcttgtcctataaaggtgtattgttgaaaaaacatctgttggaaggcgtaaaaaaaggtgcttttgatgaagctgctgctgaagctaaatttgaagcctggatgaaagaaaaagaagctaaaatacaggctaaaattcagaaattggctcaggccggtgatgcagctgctaaagctgctttggaagccgaagctaaagttcgtgctgcaaaagaagaaataattgctaagaaaaaagctgaattagctgctgccgaagctgctaagaaagctgaagaagaagctgctgctgctcctgaggaagctgctgccgaagctcctgctgctgaataagtttctggtaatgattacacgggaagattgctttaaagtcggagaagttgcaaaaacacataacctgcaaggggaagtggttattactaccgatagtgatctgctcgaaaaatatgcaaatgaaccggtgttcctccttttggacggagtgccggttcctttttttataaccgatgaaggattgacggtccgtaatcatacttcttatattgtaaaattcgactatgtcgattccttagctcaggcagggcggcttgtcggatgtgaagttctcttcgaaaaaagaatgctggagggacaagaaccggaagaatcgggttatgatattttcgaattaatcggttttgaagtgaaagatcaggtttccgaagaaacgggagaagtagcggatgttgccgattattccggtaatgttgtgctgacggtttccattatgaataaggagattcttttacccttttccgaaaattatatctgcgagatcgacttcgagcatagccggttgctggtgcagattccccgggaacttgtagaattgaattgacaactctgttttccgatgcttgttccgggtgtcctcttgttgaaaactatttctgttaaaatacttgtttgtttcatttttgttattcaccaaaactatattttggaaaacttttaacctgttggtaactttttattttgttgataaataaatggttgtctgtttgttttggaaaacttgtcgaaaaaatcatggaaaaaagttatcatctttgatctatttttctatatatttgcaatatcctaatgcagaaaaaatctattaaatcaatatgctatgaatgaatacgaaacaaaggggaaggatacttatacgcaagaagaagcgtttcagagttcattgaattatttcaacggcgatgaattggctgctcgggtttgggtgaataagtatgcattgaaagattcttatgggaatatttttgaaaagaatcccgatgatatgcatcgtcggttagccaaagaaattagcagaatagaaaaccgttatccgaatccgctgagtgaggatacaatttttgaggtattacgggattttaaatatatcgtgccgcagggggggcctatgaccggtatcggaaatgagtttcagatcgcttctctctctaattgtttcgtgatcggaaatgaaggtccttcggattcatacggtggagttatgaaaatcgatcaggaacaggtgcaactgatgaaacgccggggtggagtgggacatgatttgtctcatatccgtccgaagggttcgcctgtaaaaaattctgcattgacttctaccggtatcgttccgtttatggagcggtattctaactctacccgggaagttgctcaggacggtcggcgtggggctttgatgctgagtgtgtcgatcaatcatcctgattcggaaagctttatcgatgcaaagatgaccgaagggaaagtaacaggagcgaatgtatccgtgaagatcgatgacgaatttatgcgggcggtgatcaacgacgaagaatatgaacaaaaatatccggtttattccgatgaaccgaaaaaccggaaacagatcaatgcacgccaattgtggaataaaattgtacacaatgcctggaaatcggctgaacccggtatccttttctgggatacgatcatccgcgaaagtgtacccgattgttatgcagataaaggataccgtacggtttctaccaatccttgcggtgaaattcctttatgtccttatgattcttgccggctgctggctataaatctgtattcctatgtacagaatccgtttactaaaggggcctttttcgatttccctttgttcaagaaacatgtagctatcgctcagcggataatggatgatattatcgatctcgaattagagaagatcgatgctattctggataaggtacacgaagatcctgagagtgaagaagtgaaaggcgtagaaattcgcttatgggagaaaatcaaacagaaagcgaaagaaggccggcggaccggagtgggtattacggccgagggagatatgctggctgctttgggtctgcgttatggaagtgaagaagcgatcgattttgctgtggatattcagaagactttagcggtcgaagcttatcgggcatctgtacatctggcaaaagacagagggtcttttaagatttacgatacccgccgtgaggagaataatcccttcatcaagcgcttacgcgaagccgatcctgacatgtatgccgaaatggtgaagtacggacgccggaatattgcttgtctgacgatcgcaccaaccggaacgacaagcctgatgactcagacgacttccggtatcgaacctgtgttcctgcctgtatacaaacggagaagaaaggtaaacccgaacgatcagaacgtacatatcgattttgtggatgagtcaggggatagctatgaggaatttatcgttttccatcacaagttcgctgattggatgaaagcgaatggttatgataccactaaatgctataccgacgaagaaatcgatgaattggtagcacagtcgccgtattataaagcaacttccaatgatatcgattgggtggctaaagtacgtatgcagggacaggtgcagaaatgggtggaccattctatcagtgttacggtcaacttaccctcggatgtaaccgaagaattggtcggtaatctttatatcgaagcctggaagagcggttgtaaaggatgtacggtctatcgcgacggttcacgggccggtgtgttggtgtctaataaagataaaaaacagactactagtcctaatgaaatgccggcaaaacgtccgatggaactggatgccgatgtcgtgcgtttccagaataacaaagaaaaatggattgcttttatcggtttgtataacggtcggccttatgagatatttaccggtatcgccgatgatgaggaaggaattatgctgcctaaagcggttacttcgggtaagatcgtcaagcattatgatgctgaaggaaattcccggtatgatttccagttccagaacaaacgtggttttaaaacgacggtagaagggttgtcttataagttcgataaagaatactggaattatgccaaattgatttccggggttttacgccacggtatgccggtgcatcaggctgtagaactggtggcttctatggaattcgataatgaaaatatcaatacctggaagaatggcgtcgaaagagccttaaagaaatatattcccaatggaacagaggctaccggcgaaaaatgtgagaattgtggctctccggtggtttatcaggaaggttgtctgatctgtaaaacttgcggaacatcgaagtgcggatagaataatcactcctccgaatattttgcggatagcggttacatgggtttaggctgaattgcaaataaaccggtgtaaccgctatcactataataacaatttcgtatttttgtcctcctaaccggagagttgaaggtgtatgacagcactttttacttttcacttttcactttttgagatgcagatacattacggaaccgaaaatttacaaatagtcaatccggtagtaaccatcggtagtttcgatggagtgcataaagggcatgtgcaggtgatcgagtcactgaaaagagtggcccggaatttgaagggagagactgttatcatcagtttcgagccccatccccgggaggtactctatccgatggaaaaaaggccggggattttgaccactttggaggaaaaggctgctattctcgccacttatggagtggaacatctggtcgtcctgcaattcacccgttcgctggccgaattggaatatgcagattttgtacgtcatatcctggtcgataaaatcggtttaaaaggtttggtcgtggggtatgaccatcgtttcgggaaaaaccgggagggaacttttgaaaaactgaaagaattagctgaccgttatcacttttacctcgaacaggaagaagtatatgaagagaaccaaatcaatatcagttccacaaaaatccggaatgctttgcaaatcggagatatcgatcgggtaaatgaatttctggggtatacgtattctgttagtggaaaagttgttgccggtgataaaataggacggagtatgggtttcccgaccgccaatatccggttgaacgatgaccgtaaactattgccggccgccggagtgtatgctgtaaaagtgaaggttgaaggacaagaatatcgtggtatgctcaatattggcgtacgccccacagtcagttgttccggcgtagtgcggatcgaagtgaatatctttgatttcgatgccgacatctatggtaaagaaatccggcttttacttattgcccgtatccggggtgaacgaaaattcaacggaatcgacgaattgagcgaacagctgaaaaaggaccgtcaggaagtatcggtattgctacagcaatgacgtttgttctgtaaacctgattagcgggttctgaaaaaaggtaggttttattttttctttctattccgatttcgggttctgtgtcgtcagacccggtcgcctggaacggtccgttaaggctttccttcactgaccggcggaactcctcacttcgttcgtcagacaccaccggtcgggcgctcggaaaacctaaccggaccctcgttcctgctccaagggtcttccggcacaaaaccctgcatcttccgtttgcgctacagagcaaaggaagaataaggaaagttttgtaaaatgaaataccggatcacctctatcgtgatatggattgctgagttactttatcggagcgtcttcagtacctttgattttaattcgatttctggcataaggaatggaaaacccttattccgttgtgatttctatttttcagatcctgattcgttttccatgaagtgataagatcagtcgaaggtgatcgtgttcggagaccattggagctctggcgagtgtcgtcttgctttttctgagcgcccgaccggtggtgtctgacgaacgaagtgaggagttccgccggtcagtgaaagaaaaagctagatgaccgacagaagcgaccgggtcaccgaacatgaacaccgaagacgaacaaataccggaataattctagaattaaattagtttataaagctcataaagtttagagtttctgaatctgcggtcatttccttacggtcgttaatgcgaccgacctggactgaaagtcctataaacaaggtgctaagcagggggaatactaattttatgaactttataaactcaaaccttttggctttcttcctgccgatctatttcggtaaataatcagaaccgatattgaatcatagcattgatacggctggcattaccatagtcgtggttgaaattattacggcgtccgaaaacatattctatgccggtagttccgaattccgtaaaattccataacagattagctcctgcatattgtgcatatttgtaagtatccccttccaggctgccgcgggcttcaagccgggcataactgtaggtgatcgtcgaataaagcttaggattccaattgtgttggaaagcgccgaacaggccccacataccgggagctttcagatttccattgtcgtctgctgtcgggatcaggtcataaccgatacccgagatatcctgaatgtaattggcaatccctttaccatattcggcctgaaacagaaaactggtcgatgaggtgatatttaatttaccgctccccataacaccccaaccggttctgattttatccttatctttcactacatttttataaccgatatttcttaagatagctcctacctgaacgtggctcccgtttttcatcgtatagcgtatgttcaaaggaatatccggaactttctgccggatggattcggcatttttcccggttgtatacgatgctttggcatattccaaggctaaagaagattgccatcgatcgttgatatggtaagtataccgaagcatcggctgacggatttcgataccactactcggtccttcttcatcgatagtcgtaggtacggctgtcatatcgccgaaagtactccaggcttgtcccagcgtaaaacctttgaattgtacgaaagcttgctggagcttcggggtgttctgcggcccctggaattccatttcgatataagacactaaacgtcctacatccgtattgcctactaatttaaaaaacaaacgggattgtccgactgtcataccgtaactggcaccgggttgatgtcctttcatggcaatagtcgaagttgtaaaaaaattataatcttctacgccgttaaagtcgtaaactcctgacaactgaacgtatcccccgacaccgaaaataaaatttttgttgtcatcgaagaaaataaagcgtggagctgccgggtcattgtaagccagcggaaaggcttctttcatcatggtatagaaattatggatatccctttctttcgataccgatacgacatctattttctgtgcttgtgcttgtgcataaaaccctgccacaaacacagaaaataatacgattaaaactttttttttcataatcctacctatttggttttttacattttcatttttgttatggagtatatacgctttagggagcgaaaaagtagaaaggaaatattataaagtaggttgcgattggttaaagaatttataactctgtataagctgagaataatttttggcagttatatacatatttacacttataaaggtacatttagggtaaatatgtatataaacacctttgcttttttatgaagttatgtattaggtataaagtgggatttcaatgctgcaaccctcgctatggatgatttattgggaaattcaggaataaagatcgataagatttagcaaattaggtgtcccttgtgatatcttgataattagccgtttactattatttttcgggagtactgaaacaatacccttttccataggaagaacggattttcagcgaagtatcagttttcagaattttccggagctcagagataaatcccgtaacagacttattttggacgcgttgtcattgttccaaagtcttctgcaaatgattgttcccggtataaaggaattctgattttgacaaaaaatagtcaataattcggcgagcatcgttttgagcgggtaacgctggtcaccgatttcaagggtagagtttgcggggtagaaacagctgttcggggatagctgatatatcttttctgaggggtggccggttatttccggtcccggatatcgattcagggctgcttcgatccgggcacacaattcgtctatacctccgtccttacggacaaagtcactggtacctatttttaatgaggctgcacatagttcggtgtaagagctaaggatgagtaccggaatttttttatccaattgccggatcaataaaaatacttctattcctgtttttcccggcatttgatagtcgagtacgactacatccggacgggaagactggtaggcgagccaggcttcgtcgccatcgaagactgtttttacttcataaccgttgtcttccagggcttccccggtttcttgtgcggtgatgcggttatcttctgcgtacagtatttttatttttttagtatccctagtcgtggtataaaatcatcggatgtgttttgagtatggttaatttgtccagcaggtaatttattttaatgatcatattttcgtattgtttgatatttttgtgtaacagttcgacatggatcggtggggatatagggataaccggggaggggtgatccgattctgtgccatgtaaatgacagagttgtacttgtaattcccgaaggaaatgttgtacttcattccgttgcagatggatcagtgctttctggcggcgatcgaccgccaccaataaatgggtgaaccatcccgacaataagatcgatagcaaggcaaatagtagccaaattttgtgggtggtcaaaggctgtaaccagggataagcgagttttacctccagtcggtgtccctcgacataccccaggggcatacggaaaatagccggcaggaagatattcggatcttcggaaggataccggtcgatgatttttccattggcgtccttccggatgaagaaaattggaaatggcaggtcgctcttcttataatagtggacaagtgaatcgagacaccaggatgaatcccgaagatcataagataaacggccatatacatagctttgattgacgatcccgcccatctctactgtcgtatcttttactccccgggtgatcgtaattgaattctcctgccaattgttttgaaacctggcggtatcctgtatctggaaaagatttttactcattttaaaaatcgtttcgtcgatcaaagggctttcgtggtttacaaaattagtccgttcggctgaatataaattgaacatccagaccatttcagccagtaataaggcaatgaaaaaatagcggtatatgtgtgaagaagaaactgattttttatatgatttcggtttatccagacacagagacagacagaattccgatccctcgttttctttgctttttatctgtatgtgtccattgtactgccgcacaattttacgcacataagcaagtcctataccgtggctattctggtgacggtgattggaacgaaaaccggtcctgaaaatacgtttccgggaatgagtggaaacacccggtccgttgtctttgaccgaaatcagtaatttatttgttttttcctgtttacaggtaatctgaatttcggctttttctccggcatatttcagcgcattgctgatcagattgtctaccaggtggatcaaatgaaaaggatcggcaaagatttccggatctttcaattgaaaatcaagattgatagtggctttttcgtggccacaccggtagttgtcgatcagttcttcgagtgcttttttcaaatcgaaagtccggttttctatttctcctccccagcgtcctgccgactgtatggtgatttgttgcatttcttttaataaacgctccgattggtggcggctgatttgtagtttttcatatattttttcgggaggccaggtggccagatttttcaggatcctgccttctatatcgcgattggtacatagcggagttttcaggtcatggataaaaataacttgtttctcgatatagcgtaagttcttacgttccctgcattctttctttatgatcaggaatccataataaatggccaggaagagtggaagtaatgaaagtaaaattccgtatttctgatacttccaaaaataaataagcggaaaatcataccaggccatcagctggtctttctcgatattacccaattcctgcgggccgaaagcaggaactccttgaggcaatagatgggagggatagtgatctataagctttccgttcgggtcttctcgtgtgaaaattacgggtaattccgttaccggacaaaaatgccggaaatagtgggctatactgtccagtttccacaactttttattataatcataacgttgtttgttgaataagtcggtcatctctttccgcagggtatctattctgaaatgttgtccccgaagagtatactccatgataattctgttttctattctgaagtcgacgaaactgtcgtcctcctcatttatcctgtatgcttcttcttgaatagcagcatgtatcgcctggttgatgtcgttccgaaaatttttttcttcaatccggaaccaatagatcagccagctgctttctgtcaggagaaacaggattatcgacaggatgatcatgccgggattatataaaaataattttttcatcgggttaaaaataaagattaagtgaaagaatcacaacttttgtttctgttgaatgtggaaataattccgaacattttccgatgattcagcctggtgtgagaaaagtggataacgtatttttatactcctggaatcatcaataaaggtgaaaaacctcttaaaatattaggtattttaacaagttgtagttgtgttgaagtgaaaagcgccaaaaaacatatgttatgaaaggtttgcaaatagatattcgaggaaaaataatgaattgcgtcacaccgaaagggcaggtttgtgtgtttgtagaagctgacaatatggttgttctcggtgaagacaaagaaaacagcgttaagttggattggggtaaaatagagttggctgtaggagacaaagtgaaaattactgctattgagggtatggagtatgataccatatatatgagtaatatgacagatgaagatatgttaggatactataatcaacttaaaaaatttttaacaaaagaaggtgtgttgaaatgagaggattcagaataaaattcaggtcagaagaaattgttgttacccctgacttccgttcatcagtcactattttttacaatagttcgaacggctatgaactatcggttgccggtatcaaaggctttggagatgatgccctggatactttttggataaaatcggatatgcatattggagaaagtattgagatcgaaattataaatgcagacgagcaggtttgttcgtctccgacttgtgtaaaaaaattagatcctaatccactaaaattatccgaaaaacagaagcaacaaatgcttgatgaatatttgaaagatttttatcttttagaagctcagttgaagaaaaaaggagttttataatatagttatgtaatatatggcaaatatgaccgcattaagtattaatgaatcattgttttatatcccgttcgatcatactggtgtaatttctgtttgtaataataaatacgggaatgaattagcatgtattgtctcagatatttcggatgatagaacttctttgaatataggtgattcagtttgcataaagaggattgtttctgagggtactgagtcggtacatgagtttgttatgcctgatttctctaaccagaaaaaggagtttatgagtgataagggaatatatggaatggaagtctgtacagaaaacaatacgatatgtatgccatttatagatgggggagcagtcacttttgttgtaaccataaatcaaggtcaagtatctgttgatgcgggttctattaccgccggtaacgtattgttggatttttatcattcgaacctgaatatgggggatgaaattcgtgtaactttgaagaacctggattttgtttcatctccattaagtgaaagaagtttttcgggccatactttatgaccggtgttaactggtcgtagattgttcatcccacatagaataccggtatgttaaagaaattggctgcacagacggctatatatgggatcagtagtattattgcccgttttcttaattacttattgaccccctatctcactcgtattatgactacgggtgagtatggggtggtgaccgatctctatgccctcattccttttatcctgttactgcttacgatggggatggaaacagggtattttcattttgccggtaaagcgggaacttctgaagagaaaagattgatatttcaaaccacctggggtatcgttatattagtgagccttctatttttcggtttcaccttattgttcttccagcctttgtcggtggtgatggattatgccggaactccgtcgtatctattattgatgggaagtattataaccgtcgatgctgtgacggccttaccattcgctaagttaagagaggaaaataaagcatcggcctatgtgaaaatccgggtcgttacgatactggtcaatctgttttttttgtatcgttttttattctgtgatacctgggattagagacctgcaaaatattttcccggcagaatatggtgccggatattatttgatatcgaatttaatcgctagcgtgacagcggcttttatgctgattcctgccgtccgggggatccggcctcggataaaacggaaattgcttcagcctttatttatctattcgttgcctttgctgatcagcggggttacgggtaccgccaatgaatttatcgaccgccaatttattaaatatttgctgccgcaagagtcggcaatgagtactttaggtatttatggagctgtccttaaactcggaggcattttgttgttgtttgtgcaaatgttccgtttggctgcagaaccgttttttctggctgattttaaaaaggaagatttcttgaaagcaaatgcggagacgttaaaatattttttgatcgtttctatgttgttgtttttagtgatttcccttttctccgatttctttggtttgatcctcggttcggattttcgggatggattatttattatccctgttgttttgtttgctaatatcggaaatggtatagtctttaatctttcattctggtataagcggaccggtaagacccgtctggccattttggtcaccggcagtggattgatttgcacgattgtttttaatttattattacttccacgtctgggatatgccggaacggcctgggcacatctgggaagcgaatggattatggtgatcgtcagttatattttgagcagaatatattatccggttccttatccgctcaaacgtatcctattttatctttcaggcggtatattattctattttttgggagcatggcaaaaggatatatcctggacaggaaatatattgttcaatctctctttgattgtaatctataccggggtagtagtgaaggttgaaaagattaatatttccagacatcctttttagttaaattatgatcggaattctggaagaataatttaatattatatttgtaattcaaatatgggctgtcgctgagagggggatatcgataaattttgatttcggatgtaaaatgctatttagaatcttttctttttttattattgtcgggtgttcggcttgccggccttcggttttggaatcggctcttgaaagggccggggaaaatcggatagaactggaacgggtattgcgtcattattccgaagaggataaagatagcctgaagtgggaggctgcccgctttttaatcgaaaatatgcccgggcatttatctatcggtggcgattcgatcgggccttattatgcggctttgaatgcggtgttcagtaacgatactttgagaaattggcaggatagtctcgataagatccatgagtattataaatccggattgcgtgtacaggaagatataaaggtgataaagtccggttttctgattgccaatatcgatagtgcttttcgggtctggagggaaaaaccctgggcttcacatgtcggttttgatgatttctgtgaatacatattgccttatacggtcggacaataccaacctttggaagattggcggaaaaaatttgctaccggttatgaagaacagatagacctccggcatccccggctcagtcactctgcattttgggctgcaacttgggtaaaccgggagatcgggactcagattcgttttcagaccctcgaacctttttctaaaattcctctgttgtttccttccttgttgccgaaatccaggggagggtcttgccgggagtatgctttgatgggattgagtattatgcgttcgaaagggattcctgtcatgatggattttatccctcaatggcctgtcaggtccggtaggcattattggaatgtgatgttggataacaggggaaaaaatgtagtttttctggctacggagagtgatccggggatgcctcataaagtggaagaaaagttagggaaagtttacaggcagacttatgcaatcaaccgtgacctggaaagattgaaccgggagtgtggcgatgtgcccgattttttccagaattgttttatgaaagatgtgacagccgaatatatgcgcacttccgatgtggaaatcgaagttccctcttcggtgaaatgctctgaaaactatgcttatctgactattttcgataatgaagattgggtaccggtcgattgggccggaatacaccggggaaaagccctctttaaaaatgtagcccgtgatattgtttatctgcctgtttactatacttccgatgggctgaaacccttggccagtccttttttattggatacggacgggaaggtaattgtcctgaaaggggatacgttgaatcggcaacagttgaaactctaccggaaatatcctccttctgacaatgcttatgctatgggaagacggattgtaggaggaaaaattcaggctgccaatcgggcggacttcagcgattcggttactatctatcgggtacctgagtggaaaagtgcttattccctgaaggttactaccgatactgcctggcgctattggaggtatttgtctgccgaaaacggactttgtaatattgccgaattggtattttatcagagagattctatgcgccctattgtgggtgaaattatagggacggaaggaagttgttttaatgatcctaaccatgtgaaagaaaaggtattcgacggagacccattgacttttttcgatgcgccgactggaagtggtgcctgggtggggatggatttcggaaaggaagtgaacatcggtaaactgatttttattccccgtaccgatggaaatatgatccaattgggcgacacttacgagttgtattggtggggaccggagggatggcaactgattggcggaccccgaatagccagggatgtcgttctggagtatctggctccttcgaatgcgctctattggcttagggatgtaagccgtggaaaagaagaacgcatttttacctattctgacgggaaacagattttctggtaattctcataagcagtaatttcatttattgaaaaatttcctataataaaaaatattcagttacaccatagttaggctactgaaaattgggctcaatgttcggaaaaataagataattagtcgtttatttttgatttgggattg

SEQ ID NO: 5853 - DNA, 9375 bp, Unknown
  gut microbiota DNA sequence
acaaaaccactaaaacaaatccattttttttcaaaccacaaaaaaatcggcatttccattcaaaatgtttcccggaaggagcaggttatttaaaatattctttctaatttaaggtcggtaaaaaatgatcatccaccgatggtatatttgtcgctaataaaattgttataaataaatctataaattatggaaaaacaagccgctttggatctgctcgaatttatacacgagagtccgaccaacttccatgctgtcctcagcatcaaacaacgccttcaggctcatggtttcaaacagcttttttcaggagaagcctggcatatcgaacacgggggtaaatatttcgtgaccaagaatcattcttctttatatgcttttattccgggcaacggtaatttggcagaagaaggctttaaactgatttgtgcacatagtgattctccgactttccggatcaaaccccatgcagaaatgccggtggaagggaaatacctgaaactgaacacagaagtttacggaggcccgatcatgtatacctggttcgaccggcctctgtctatggccggacgggtcatggtcaagagtgacaaaccccttaaaccggccactcaattcatcaatttcgaccggccgttgcttgaaataccccatatcgccatccatttcaaccgggcagtaaacgatcagggtaatccgctcagcaagcaaagagatatgcttcctgtcatagccatgatcaacgagactttcgaaaaagacaatttccttctgaagcttattgctcaggaaatgaatattccggcagaagatatcctggatttcgacctcaccttatatgaatatggtaaaggaactttattcggactaaacaacgaatttatctcttccggccggttggacgacctggctatggttcatgcaggcctgacggctcttctcgattccaagccatgtaataagaccaaagtgttagccatcttcgacaacgaagaagtaggcagcggcaccaaacaaggtgcagcatcaccgatactgcggactattctggaacgggtagctttcaaccaaggttataaaatcgaagagctctaccgggccatacacaattcttttatgatctcggccgatatggctcatgccttgcatcctaattatcccgaaaaacacgatccgaccaaccatccgatcatgaaccagggaccggtaatcaaaatcaacgcaaaccaaaaatatataactgacggtgattcggcagctgtattcgctacaatttgtaagatggccggtgtaccttatcagacttttgtcaatcattcggatatggcaggaggttctaccttgggaaatatcctcctgacgcaaatggaaatgcgcggagtagatataggtaaccccatgtgggccatgcactctgttcgtgaaacagccggtgtgctcgatcaggattatgtgatcaaagcgtttacgactttctataacatttaaaatcagggactacctgaggagctatccccacaaatcaaaaagtctgatttgtggggatcagtgttttggccggcaagatcaaattttaatttcacaattgattcttcggatgattctattaccaatatttttttaattttgtaataaagaaaatcaattatgaaaattatcacttataacgtcaatggcctgcgtagtgctttatcgaaaggatttacggactggctggcagaagagctaccggatattgtctgtttacaggaaacgaaagcccaaccggatcaaattcccacacttgaattcgaagctttaggttatcgttctttctttttctcagccgagaaaaaaggctacagtggggtagccatcctgactagaatcacccccgatcatctggaatacggaatggggatgcaggaatacgatcgggaaggacgtttcttgcgggccgattacggcgacctttctattgtcagtgtctaccatccttcaggcaccaccggagaggaaagacaagcctttaaaatgaaatggctcgaagacttccggcattatgttatgaaactcagcaaaacccgtaaaaaactgatcctttgcggggattataacatctgccatcgtccgatcgacattcacgatccggtacggaatgccaacagtagtggtttcctacccgaagaacgggaatggatgagcctgttcctggaatcaggatttaccgatactttccggtattttcatcccgaagaacctcatcaatacacctggtggagtttccgggcgaatgcgcggaacaacaataaaggctggcgtatcgactactgcatggtcagcccggaagtcatccctctgctaaaagatgcctatattctaccctaggtaaagcactcggaccactgtccggcagtcgttgaattgaaagtactctaaagtatgagaaaagtacgtttcggaataataggtaccaattttattaccgactggattcttgaagcagcccgcgaagagttgcgtttcgaagccacggccgtctgttcgcgaagcagggaaacgggccaggcttttgcccttaagcacggcataccacacctcttcacttcgcccgaagaaatggcagccagttctttgatcgatgccgtatatatcgctgtccctaattctttacatgcggctttgagtattcttttcatgcaacaagggaaacacgtcctttgcgaaaagcccctggcttctaatgcaaaagaagccagggaaatgatccgggtagcccggcaaaatggcgttactttgatggaagccatgaaatcgactcttacccctaacttccggcaacttcgccggcatttagcggaagcaggatgcttaagacgctattttgccagctattgtcaatattcttcgcgttatgacaaattaaaagcgggaattgtattgaatgcttttaatcccgaactttcgaacggggctatgatggatttaggagtttacaccgtatatcccctggtcgtccttttcggccgccctaaacgtattagcgccacaggattgaaactttcgacaggagtagacggccaaggggctgtaaacttcgaatacgaaaacctgaatgctaccgttctgtattcaaagattgcagattcctttttacctgcagaaatccagggagaaaaaggaacttttattttagatcgtattcaaaccatccgtgaagtaaaatttatccccaaagggggacaaatccaggatctttcggtcccggcctcacacaacgaatattattatgaaatagcggaatttatcgatctgatagaaagaaggctatgcgaatcgacgatcaatagtcatgatcattcgctcgccacgcttgaaatcatcgatgaagtacgcaaacaatcagggatcatttatcctgccgacaaataaccatcatgaacaaagccaaagtatatttcaccaacctgaggaccacccccaacagcaatctgttggataaaatggagcgtttggtcagaaaagcaggtattgccgatatttcattcgaacagcagtttacagcaataaagattcatttcggagaacccggaaatctagcctacatacggcccaattatgccgcccgcctggtacaagttttacgttctttaggtgccaaacctttcctgacagattgtaacacgctttattccggacgccgggccaacgccgtagaccatctgcaaagtgctatggaaaacggtttcaatccgatttccgctcaatgccaggtaatcattgccgacggacttaaagggacggagtacagggaaatagaaatcgggggagaatattgtcaggctccgaaaatcggagcagcgattgccgacgcggatatcatcgtcacgatgaaccattttaaaggacatgaacaggctggattcggcggagcattgaaaaacctcggcatgggatgtgccagtgtaggagggaaactcgaacttcattctgcttcccaacccgttatcgatagccaaaactgtaagaaatgcggtatctgcatcaaacattgtgcccacgaagccatccacttcgatgcacaacatattgcagaaatagattattcacgttgtgtcggttgtggtcaatgcgtggcactttgtcaatacgatgccgccgtgatgggcgaaagcgacacttccgaacgcctgaattataaaatagcagaatacacacaggccgtactaaaggacaaacctcatttccacatcagctttatcatgaacgtatcccccgaatgtgattgctggaatcacaatgatgctgctattattccggatctgggaattttggcttcgttcgatccggttgcgctcgataaagcctgtgccgacctggtcattgcagcccctgtcatcggagggaataaactctcggaagctcatccccatgaacacctgcaagggacggataaattccatctgatccatcccgataccaattggctggccggacttcaacacgcagaaaaaataggggtcgggacactcgattatgaactgatctccgtatgacccgttacggtcggactgtaaaaaacgccgagggattattcgggactttgccccttatgacatgaaaaaaacagattttccgatcgatcccatcgcacctctttaactacgggaaaaaagaaaggaagcctttttgacttccttttgtgggcgctgagggattcgaacccccgaccctctgggtgtaaaccagatgctctgaaccaactgagctaagcgcccgtgcgatcttgttcgattgcgggtacaaaagtagtgcttttttctttcactccaaacaaaatgctgttttttttcaaaattatttcaaataatcggcaaagatttcatcgaataattccccccgggtcaatttcccatcctttacacaaatcgattccacccggccacgggcacataacttatcatccgacagccgataaatatcttctaaaaacaccagcttagccccttcccgggatatattcaatttaacagaaaaacgattcccgctgatcaaagacactttatagtcgatctcgacccgggccaccatcgcatcgataccttgctgatgtaattccccgaaattagcaccggcatgctccaaaaactcatgacgggcatgctccatataatgctgataattggcattattcaccaccccctgcaaatcacactcataatcccggactttcatctccaattcaaaaatatactttctcataactttcatttaaaatcacaacaaagataagggttctttttcactcattcggtttatctatatcagcatagaaactatcgatcaaaaatattttatttatcgacataattgatatatttttgtatcgaaaagaaaaaacaataacaatttaaaaataaagattatgcaaacaattatcaattctcagcttcctgaattcagtgtacaggcatttcaaaacggtcaattcaaaacagtaaccgacaaaaatgtaaagggtaaatggggaatcttcttcttctatccggccgacttcacttttgtttgtccgaccgaattggtcgatatggctgaaaagtacgaacaatttcaggccatgggtgtggagatctactctgtaagcacagactctcactttgtacacaaagcatggcacgatgcttctgaaagcatccgtaaaatcaaatatccgatgttggcagacccgacaggagctttaagccgtgcgttcggagtcatgatcgaggaagaaggaatggcttaccggggaacttttgtcgtgaatccggaaggccagatcaaagttgtagaaattcatgacaataacatcgggagggacgcgaacgaacttttaagaaaagttgaagcggctcaattcgtagccactcataccggtgaagtttgcccggctaaatggaaaaaaggtgaagcgaccttaaagcccagtatcgacttagtcggtaaaatttaatcccggactaatttcagggtttcaatggtccgaccggttgctgaaaagtctgcctgccattgaaaccctttatcatcttctgaaaaaatatacgctatgttagaaacagcattaaaagaccagttacgcaccatttttgcaccgctggattcccgatacacttttttaatccggcttaatccccgacacgaaaaccggaatgaattgatcgaactattagaggatgtcgcctcttgttcagaaaaaatcaattaccggctggaagaaggagaggggctggaatttgaattgctgaaaaatgaacaaaaaacgaggatcaaattccggggcataccgaacggtcacgaattcacttctttactattggccatcctcaacagcgacggcaaagggaaaaacatacccgacgggaacttacagaaacgtatagcagccttgaagggaccgatccggttaactacctatgtatccttaacatgtacgaattgtccggatgttgtacaggccttgaatctgatggctatcctgaacgacaacatagaacacgaaatggtagacggagcgataaatcaagccgaagtagaggctctgcatatacagggagtgccttcggtatatgccgacggtaagctcatacacgtcggacggggagaattcggagaactccttgaaaaattggaggcgacctacggttcggagaataccggccaggaaatcccggaaaagaaatacgacgtcctgatcgtaggaggtggtccggcaggctcttcggcagccatctactcggccagaaaaggactgaaagtagccatcattgccgagcgtatcggaggccaggtgaaagaaaccgtgggtatcgaaaatctgatttctattccttacacgacaggtagtcagcttgccgataatctgcgtacccatcttcaacattatccgatcgatctgttcgaacatcggaaagtggaaaaaatggagcataccggaaaagaaaaaattctttcggtaaccggaggagaaaaatttgtcgccccggctatcattatcgctaccggagctagttggcggcgtttgaatgtacctggcgaaacagactatatcggtaaaggagtagctttttgcccccactgtgatggtcctttttataaaggaaaacacgtggctgtcatcggaggaggtaattcaggaatcgaagcagcgatcgatttggcgggaatttgttctaaagtaactgtttttgaattcctggaagagttaaaagccgatcaggtattacaggaaaaagcgaaaagtctgcctaatgtagaaattctggtcaactcccaaacaaccgaagtggtgggagacaaagaaaaagtgacaggcattcgcacaaaagacaggacaacgggtaatgaacgcttgttccccctggacggtattttcgtacaaatcggactagcagccaatagcagtgcttttaaagaaattgtcgcgaccaatcgtctgggagaaatcatcatcgatgcccattgccggaccgacattccgggtatctatgcagccggcgatgtttccaccgtcccctataaacaaattattatctcaatgggagaaggagccaaagcagcactctcagctttcgaagaccgtattaaaggggtattggattaacatcactttatttttgattcggttcgtttctcaggaagcctgaaaagcgaaccttatccgttttctaaaatatacacaaaaacaacaatacccaagttgctaatcctgtcaactttcactaagtcgatgttattatttatacatagagaagctgaacaaaagggaatttcaagacatagcccaatcgaataccagcacatattgtcaggaaataaaaagaacctcgccaaagaaaaagcatctataaaatcgatgaactttataaactttcgcccaggtgactattcaattatagatgatctcgactccataggcggggacatccagaattattttcgaattatcatagctaaaacggttaccgaatagggaagagaagttttcctcccgtttcatctccggtaaatcgagctttaaagagaccgtttctttgcctttgttgaaaactacgaggacatttttaccgaaaaaagaacggatataagcgtaaatttgcttttccacccgaagggggataaaatccccatagagtaaagccatatgttcacctcgcaattgatttaaagcactcagcttcgatttcacgttcagctgttcgtcggtccattcctccccctgcccaagtattccttcctttttcggccaaccgatttcatccccttccccaatcataggaatccccggaatcgtcacattaaaagccagaaattggactaatttccgatagaccgtatcctgtcgctcactctgtacaggcaaaagggaaaattcatcggtacgggtgacaaaacgcggagcttcgccgttacccgaataatgaatccctaaatagtcattctctgcatcctgaaaagtagcattcaatgcctgtgctaaaatttcaaaacccgtattcgacctggcaaaaaccgcagtggctttatcaaaaacaaaacggtctaatccggcaagactgtccgttacgacaacggtcagccggcaccgccgagcttccagctccaactttcgaagatcggcagacaaactatcagccgaagctttcggaaacaaatagagcgtatttatccccaagtctttgaaataaccttctaccattttttgaccgatagcagcaacctctatattcgaataagccgggttcatcgaatcggctatgaacccggtatccggcgtggccaactctttcacttccaaaccataaataactgtagtcctcttatctgtatcgttcaattgcccgacttcggtaatcaatttgcctcgtctaagagggataataatcgcatttgaaatactgaaactatctctcgcccaaatcctcaactctccatacttcaactgacgggcagcttcgggtaacacgatacctaccctcttttccgtacaggaaaggaaattttctgccagtttataattttgaaaataaacagcccagtctattaccggagaggtactctgtaaaaaaaacgtatctccccttacttcatcggtaccgatataaaaaccggcatccggattcggccgcatcaccggaatctgataatcatatccctcgtaacggatgttcatcccggataataacacacctgaatccccggcaattactcctaacgtagaggccgttttgtcccaatacaactttacaccggcaaacggagtaatttttttaattttttcaggatataagaaataatccttcagatcgacccaagtggtatcggacttcagaaaaacgggcgaagccaaatgggacaggc

SEQ ID NO: 5854 - DNA, 26538 bp, Unknown
  gut microbiota DNA sequence
caattcttttgtcctgcaacacacgatacaggataaaattataaaaggaatcaatattctcatcaacattcgtaaatcattaacttatcaaagatataataaatttattaccgatcgacagacagagtagaatcccgtacaattaattcgggtttcaacaaccgggtcactgtcgggacctcctctttatccccgatgcggcgaatcaacaaaccggcagcgatattccccacccgatacccatctttattcacggtagtcaaagcgggaaaggttacttctgtcgatggttcgttaccatatccgcatacagcaacttcttccggcaccctgcatttcatctgccgaagtacactcaatacatgcacggcaaacgcatcgttagcggcaaaaataccatcgactccggaatgcaacaccaattgccgggtaattctataaacttccgacacatcctcacattcgacgatcagtttttcatcggtgaacaaatgccggtctttcaacgcctgcaaatatcctttttctcttttctgcgcccaaagataacggcggggcaaagcgatatgtgcaatcttccggcatccaccgtcaatcatatgtctgaccaccgtacaggctcctttataatcatcttcgagtacccggtcggtatccagattgggagctatacgatcgaaaaacaccatcggaatcccctcatgctgcaatttcacaaaatgatccaggtcattcgtcgtcctggcaggcgcaactaccaagccatcgatcccggatttctggagaaactgacagatctttacctcttgttcataatcctctccattttcaaacacaatcaccttataccccgatgaatatgcagaacgaatcacactactcacagcacaggcataaaaataatttcctaaaaaaggaactagcatagcgatcgagttagatcttttatttctcagactcaatgccaacgcactaggtttatagtgcaattcctgtgccaaagccctcaccctttcctgagtagcccggctaatatccggatgccccttcagtgcacgcgaaacggtagaaggagccaacccaagtatttcagccaatttttttaaggatacagaaactgccatatcgactttttattttttaacgcctgtaagtatgaaaagtttcagaaagcgatttctgttattttctgaaataaaaacgattataacacaaaagttctcggaagtttaatatagttttgatacgaaataactagctaaatcaagatatatattttacattaaacaaataaaacagtatatgtacgcgtaattatgaatttatgaataaagactaaaagcaaaacaacagtccataaaaatgcagaaataggttacagacgattatttaattcttattttttattatgtttgtcacattccttagagaagggaaatatagaatttagtcgttattttattcttgtcagagaaaccgccaattttgaacaaaagcaagaataaaatgtaatgttcatgcataagcgtgggctgttgtgttttgcttttaggtgcttggcggtacccttctgacagacactcggaacacgctttttttagaactaaactacgattaaaatgaatattagtgcggaagaattccacatccactttatcagctatgcaaatatcccctttaaggcaggaatatatgccagtgatctgtctatagactggggagacggaacaagttcaattctgaaagaaaaacaatacttcaacatcgtccatcactatcagcaagaaggactgtttcatatcaaaatttcaggccaccggatttcaaatctgaatgtcagccggttaaatttagtcgatttacaactcgaacattgtccttctttggaatatctgaactgttcgatcaatgaattgaaggaactggatctttccccatgtccggcattggaagagttgcattgcaattccaataatttacaaaccctggatctcagttccaatccaaagttgatgcaattgaatgtttcctataatcttttggaaaccctcgacctttctttatgccctaagcttcaatctttgtattgttcattcaatcacctgacttccgtttgtttgaaccattgcagggatattctttatatagacttgtgtaataacttattaaataaagaaaaattagatctgttattcagccaattaccccaccggacgaaacgggccatgatctattatctggaaaacccaggcagtgaattttctgattatcatcttctcaaactaaaaaactgggattaacagatactttttagtttttagttttcactttttgaccgaaataatataactttgcgcctcataaatatcaacaaaataaggaattaaataaaatatattatgggaagagcgtttgaataccgcaaagcacgcaaattgaaaagatggggtaatatggcccgtacgtttaccagaatcggaaaagaaatcgatattgccgtaaaagccggtggccccgacccagcaaacaatacccgtcttcgtattctgattcagaatgccaaggctgaaaatatgcctaaagaaaatgtagaacgggctatcaaacgagcaatctctaaagatacttctgattacaaggaaatcacttatgaaggatatgcaccttatggcattgccatcgttgtagaagcagctacagacaacaacacccggaccgtagcgaatgtacgccatgcctttaccaagttcgggggttcgctaggaacgaccggctcactcgactttatgttcgaccggaagtgtgtattcaaaatcaataaaccggaaaatttcgatccggatgaattcgaactggaaatgatcgactacggagtagatgaaatcttcgaagacgaagatggagtaatcaatctctatggctcgttcgatgcttacggaaatatccaaaaatacctggaagaaaataaatacgatatcgtcagcggagaattcacccgtatccctaccgatacgaaagaattgacccctgaacaaagagcagaagttgataaaattctggacaaactggatgaagatgatgacgtaaccaacgtttaccacaacatcaaagaagattaattccgtttattcttgcagaattaaaaatattgttgcatatttgcacccgcaaaacggaatttatccgtatgcgacaaaatgatgacttcgtagctcagctggtagagcaattgactcttaatcaatgggccgagggttcgagcccctccgaggtcactgagaataaaccacctactttcgtaggtggttttctttttatgcttgtttttctactatttaagcaagttgttttaactaacaatcatgtcccggaacgattcaggaaacggccgaattataatgatgactccagccaaccaataacccggatttcttatatccggcactaatgtatcccgaaacccgtagcatacgactaattttaccggacgaggtgatgttgcctcagttaaaattattaatatcatgataataggttatctacgtgtcagcacggaaaaacaacatccggccaaccagcaggatgaaatcaggcgttttgccgaaagtaaacaactcatcgtcaatcattgggtcacagaagttgccagcggcaaaaagagcgaacgcgaccgcaaactgggcgtactgttacgccgacttaaacgagacgacacactgatcgtcacggaaatttcgcgtctgagccggacgctcacggatatcatggcgattatgggcaaatgtctggaaaggggaataaatctttatacgaccaaggaaggctactcgttcgacaacacgatcaacagcaaagttctgtgtttcgctttcggactggtggcggagatcgaacgtaaccttatctctatgcgtacacgcgaagcgttggcactacggcgtgcggagggaatggttttgggacggcgccacggtagctataccaagatgaacgtactgatcaagaatcgacaggtcgttattacgatgcttaataaggggaagtccataagcgatatttgcaaacatttcgatctttcgcgcgatacatttgccaaattcaggatgaaatacccatctgtccagaaggcgctggacaaaaaagaacaacttagaatcagtcgatttaaaaacaaacaaatcaatgcttaagaaatgacggaaattcgggtatatcaccggattcccgctcgatttgacagaaagccgccataactatcctcctttatgtgtttatacgttgattaaaacgttggttttcaactacaaatttatatcgtttttagtatatgtacaagattaatatataatatttttataatcaaagaattatgattgcccatatgtgccgttatatggttttataccatgtattattcgtccgaggcgttcagaggaacgtttaaacaagatagatacaaaggataacatccaagtttatcgttggttagaagtattaatccgatgatatttgaatgtcgaatgaaaaaaatcttattctttctatttacctgtgcattgaccattggaagcgtgcaggcacaggaagcggcggattctataaaaatctattatcgccgcgggtaccgtaatgtcgatccttcattccgggacaatcggtcacagctggagtatttcttaaattcgatcggcgcgacattaaaaaacgaccgtgtagaaaagatcgtcatccgttcatatgcctctcccgacggagcggtgcaggcaaacgaacaattggcggcccggcgggcggaagagctgaaagcctatcttgtccgcgaaggaaacgttcctccccatctgatcgaacatcacgccgaaggtgtcgcatggaacatgctacgggagcaagtcgtagcatccgacatggcaggacgtaacgaagtattggacattctcgaccatactccgctatggatttacgatgacaagggacacatcgtcgacggccgtaaaaagcagttgatggatttgcagaaaggtaaaccgtataattatatgttggagcacttctttcccgatctgtgcaacagcgtcaatatcacgctctatctgcatgtcgtagagaaaaactgcgaaaaacaagctgaagcggctccatcatacaaagccgaaaacaccgagtctttacaaactatcctgtcccaagcacctgcggataaggaaatagcccctcctgcaacatcgacaccgacaaccgtcgatataaagccggtacgttcgtatccggcaaataccgtcggtgtacacgctggatactgtacctcgtggatcacctcttacggactgacctcatcggcaaaaccgggttacgaaatcggcgtaaccgaccgggtcaggctcagccggcaactgccgttctacctgcgaacaggagtgagctttataaacaaaggatacgaagtcaacggattcgacgacagtcgtaccacgatgaattacatacagatccctgtgggtatcgactacaccgtcgcgttaggaaaacactttgcatttataccgttcgcaggattatattacgcagtcggtataggcgggaaacgtgaggttgaagatgaaaaaatctccatctttaaaaaagaaggtggattttcgcgccacgacatgggcgtttcgtgcggggtcgatgctgcgttcggtcgcttcattatcggagcggattaccatacaggacttatcgatatcgacaaaaccgacacgatgtacggggaagacaaccacaaagtaggatacaaacatgtcaggaaccactgtttcatcgttagaatgggaattaatttttaatctggaaatgtcatgaagaagataataacttgtatgatttttggcttattgtcgttgatttcctgtacggagtacgacgaaatcgccatatggaacaagagcgagtatatagattcgcgtctggccgcgctcgaagagttgtgcagccggatgaacaccaatataacctcccttcaactgatcgtagaagcattgcagggcaacgattacgtgaccggtgtaaccccggtagtagaaaacgggaaaacgatcggctacacgatcaccttcatcaaaagcggtcctgtaacgatataccacggaaaagacggccagcaaggtacggcgccggtgatcgggatcaaacaggatggcggcatctattattggacgttcgacggtgaatggctgacggacgaccgtggggatcgggtcatggcacaaggtatggccggcaaatcggcctacgaactggcagtcgagaaaggctaccggggcacgctcgaagcatggcttgcatcgctcaacggaagtaatggcaacgacggcaaatcggcctatgaactggcggtcgaaaatggttatcggggcaccgaagaagaatggctggaatccctcaaaggcgataacggaaacaaaggcgataacggcatcacccctaagttggagatcagggaagacggttattggtatatctcttacgacgggggacaaatgtggacgaaactggatcgggctacgggcgatcccggccagaacggagattcgatgttcagcgatgttgacaattccgatccggattatctcgttctgacactgtctgaaaacggcgaacagataaaactgccttactacaaagacaaattcgaccttttgttcgtctcgggaaccgacaaagtgaaagagatgacggtttactgtagcgcaggtacaacggcagtagtaaactacgaattgacgaatcctttgaacgtacaaatttccatcgcatgcatttcgcacagcggatacaaggttacggtagataaaaccggtaagaaaatctctgtttccgctcccgacgatccggcagcgatcagcgaaccggaaagcgggatactggtattcgcttcagacgacgaacgcaccataatgcgaaaactggttgtcaaacagatgaagtatatcgaatatacggcacaccaacaacttgggtggaataatggtgcatatggccctcgtttcgggggtaaaaactgcacgtttcttgacgagcaatgtacatacgacaaaaataccaaagagggtaaatgggcttataccggaacggtcgaacgggtgaacgacggtgcattcctctatgaagaccaaataataagcattgtcttaccttcagggatcgagataatagagggtgtcgcttttcagcagagcagcatagaaacaattgaattaccgaatactttaaaatcaattggaaatacttgtttcgggtattcaaaactgacccgaattaccataccgaaaagtgttgtctcattggatagggctgtatttagtaaatgcgccgaattgatttcggccgatattcaggccaatattgaagaattaccctccaatacatttgagcaatgctctaaattacaaaatatcaaattgccggaatcactaaaaagaatatctaataatacttttataaattgttctctcttggaagagatcacaattcccgatgcagttaccgtgattgatgataaagctttcagtcaatgttcatcattgaaaaaagtaattctcggaacacaactcgaaagaatcggtacaaatgcattcaatcgatgttctgcattggaaacgatcttatgtccggatgagactccggctaccttggggaaaggtgcttttcccgtagcagacggctggacagtcaccaatgccagctatagaatatatgttcctgacgaacaactcgaaacatacagacaagcttggccggattattgggctgcccccaataatttccaaataacgaaagtcatatatgggataagctcgatgcctacgcaataggtataatgacatttaataaatattcctcggatcgtttgatccgaggaatatttattaggacaggtcttcggtagatctgcaatttttgtaaaacatttcgcttattcccgcttcagggcagatgatcgctgtgatcgctgaactttcccgaatcacccgaacagactgcggcagatgtccgctattctggaaacgaatgccacttcgatatgagtcgctttgcgggtaaatccttttttatttcccaagggcacaaagattcgtttaaaacctagtttttcggcttccgatatccgctgttcgatgcgactgacagcccgaatctcacctgaaagcccgacctctccggcaaaaaccgtatctgccggaagagctgcatcgatattcgacgacaaaacagccatgactacggctaaatccagtgccggatcactcacccggataccaccggcaatattcaagaaaacatctttagcagccaatttaaaaccgacccgtttttcgagcactgccaatagcatattcaagcgacgcgaatcaaagcccgtagcagagcgctgaggaactccgtaagcggctgtcgacaccaaagactgtacttccaataaaatcggtctcacgccctctacagtagcagaaaccgctattccactcaattcctgatcatgattggacaaaagtagttcggaaggattggtgacctgcctcaatcctgattgcaacatttcataaatcccgatttcggaagtcgaaccgaaccggttcttcatcgaacgtaaaatacggtacatatattgctgatcaccttcaaattgcagaacagtatccaccatatgttccaatatcttaggaccggccaattggccgtctttcgtaatatggccgatcaatatagtagaaatcgtattttctttgctaaaacggagtaaggtattggtacattcacgaatctgagacagactaccgggaatagagtctacagcttcggtagctaaagtctgtatcgaatcgataatcaataaatcgggcaaaatagcacgtgcatgctgcaagaccatttccaaagaatttccggaaaggaacagacattcgtcgttttcggctcctaaacgctgagctctcatctttatttgcgaaatactttcttcaccggatacatacaacacttttccacaacggttatgaagagcgaactgcaatactaaagtcgatttaccgatacccggttcaccacctaacagaatcatcgatcccggaaccatacctcctcccaatacccggttcagctcgttatctccggtatccatccgaacatctgcattcactttgatctcagacaaacgcaacgctttggaggaaggattacctattactgcattcccccggcttttcgaagttacctcgacttcttccacaaaactattccattcgccgcaaacattacaacgcccggtccacttagtctctttcgccccgcaattctggcacacatatattgttttcgactttaccatatcaacttataatccgattaataaaattcttcctcatcttcccggataccgttattcatttctttcacttctgcctcggaaatcgtctcatcacaatccagacgcttattgattccggcaggacggtcgaaaggacggtcggacattttcaatcggggatcggcataagctttcagcaaaaatttagcccaaataggtaaggccatactagctccctgtccattagccagattttggaaatggatggaacgatcttctgctccaacccaaacgccaccgaccaagtcgggagtaacacccataaaccaaccatcggcatgcttttgggtggtaccggtctttccccccatcggattcatcagtttatatttataacgcaaacggacacctgtcccgccagtcactacgccttccagcaaattacacatcagataagccgtattctcagtgatgacttcccgggattcgggacggaattcctgaagtacattcccatatttatcttcaatccgatagacaggcagcggagaattgtatacacccttattcgcaaaaatcgagtaagcagccaccatttcttttaccgtaatttcagcagtacctaaaaatacagaaggtaccggatcgataaaactggtaatccccatcttatgggccatttgagcaacagcttcgggagtaaattgtttcaatacccaagccgaaatattattctccgaattggccaatccccaacgtaaagtaaccatttctccctgacgtttcgtacctccccgtgccgaccagggttcacctgtcggaaggataaaggtttggggaatattcggcactttatcacaaggcccgagaccttcctgcatagccagggtatataagatcggtttgatggtggaaccgacctgtcgctttccggcactcaccatatcgtacataaaataacggtaatccggtccgccgacataagctttgatataacctgtctgaggctgcataaccataaatcccgagcggaaaaatgatttataatgtttgatagaatccaaaggtgtcatcactgtatcccggataccgctccaggtaaatacctgcattttcaaaggctggtcaaatgttttccggatttccttgaaactcatcccctgcttgctcagtacccggtaacgctcggactgacggatagaacggtccaacacctcctcaatttcggtgggtgtcatgtcgttagaaaaaggaggacggtgttttttcaccttttctttatcgaataaaggctgtaaatcctgggaaagatgctcgcgtacggcttcttcagcatatttctgcatccgggaatccagagtcgtatagattttcaatccatcggaatacagatcataatgcgaaccgtctacttttacattctttttacaccacccatacaaaggattggtttcccaggcaaccgaatccagcctgaactgtgataaatctctgtaacgttttctatcgggcttattcgcagtcataaacaaacgaagatattcccggaaataagttgctaatccttctttatgatcgacccgtttaaaattcaatcccaaaggtaacttctttaaagaatcacactcttcgcgggtgattttatcgtatttatacatttgagataaaacgacattccggcgatttagagtgagctcaggacgacggaccggattatagtaagaagaattcttagccatcccgatcaacatagccgcctgttcgactttcaacgaatccaagggaacctggaaataaatatctgcagccgaactgattcctacagccagattcagaaaatcatatttgttgagatacatggtcagaatttcttctttcgtatagcttttttccaaacgtactgcaatcacccattcccggaatttacgaatcgccaattcaaacacattcaaatcggattcacggggaaagagcattttcgccaattgctgactgatggtacttccacctccggccgaagtattagccgtaagtaatcccttagctacccggaacaatcccctcacatcgactccgctatgatcgtaaaaacggacatcttcggtagcgatcaacgcatcgatcacagattgtggaatttcccggtattcgatatatttccggttctccttctcaaaataacggttcatgataggcccgtcggcaaaataaacttcggaagcaaaccgattattgggattctccaattcttcaaatgtaggcataaatcctaatttcccggccgatatcaaccaaaagaaaacaaaaactccgataatgcctaccagcactaccgaccaaaagatcacaaagaatttccaatattttttaaacattttacctaatattcaaactatctataaattataataacgcttttatacgtcccaccatacgacacagactatccgaattcctcatagccgattcaatatcccagcactcattgataaagggcagaattgccgtattgtattcccgtcctttacttgctttccctttagccatcaactgttttttcaacgtctggtccgaactttcccgaatcagaatatgggtcagaaaataagaagacttacaactaaactgcatttccatacaggcttttgctcctccttgtttctgcagtccggcacaaggtaactgatcgacatcgacagagatatattttgcaaatccatcccgatcagccattaaccaggcttcagcttcatctacagctacattaaacactaaattctccgcctgttccaaccctccgagtaattttctctttaattcaggtgcacaattatccgcatccaaatccgtcaataagataaccggaaatttcatcgctaattgattgaaattcggaattttattcttaatttctcctccccttgccggtaattccatcaaaacagtaaaccgcccggcaccacaataactcaatatccggtaaatgacatgccgggtgacatcgtcttctcccacaatatacacacctatcatagatcagtctaattttatgtgagacatcgattcgatcgaccagggttttgtcaatggcattaccacatccgccatagagaaaccggctgccaaaatattttttgccttttctacgtttgacaacacttccacttcagttccttccggactattggtcaacaacaatacttcttcgggagctattccttcattcgacaaaatatcataactatgtgtagtgatgaacacctgcctgcctccctttttcactcgctgaatttttgctataaattcagggaattgggccacaatcccaggatgaagatttatttcaggttcttccaacaataacactccgttcgaatcaatcaatgcaaacaaaaaaccgatcagcctcaaagttccatcagaaaattgcatttcctgctgtttactcccccgggccctccaatgtacataacgtgcctccagatgcggaactcctatctcatctttaacaaaagataattcctccagctggggcaccgccaatttcaaaaattcattgattttccgaaaataagagcgacgggtattatcatttaacaaagccagtcttttcaaaaaattacgtccataataatcctccttatccccgctataactagacgaagctgattcccggaccatttgtgggacgacattgagatattcgacattttgcaggaattgctgaatcacccggaaatctttgttggcattcggctgttccaaataagtatatttcaatgtttcttcatcctctcccaaggtttcagccgaacgatccagtacatagcgctgttctctccccgaaaaaactttctcagaaacaatttttacctgattttcccgtattcctcctcccgtatgcttaaagttcaattcatagtgccagcacagctcccgactatccgactcacttaattcgatagccaactttacattcgattgctcacgggctgccaggcaacgtatttttgtaataccgcccctcacccgcacagccgtttgaagtcccccaccttgcttagcaacatcccgcaaaaagcgaagtgcatcgataaaattggattttcctgcagcattcgctcccacaacaaagcaccgctcttgcactccaacctcacatcggtgaaagtttttccagttaaataattcgattttagaaataatcatggtgccctatattttaaaattcagcaaaatcagcttgaatgacaaatataggataatctatgcttcgagacaattaaaaaagaatgattttctctaaaaacatcattttcagaggaaatcattcttttctatcagattgaaccagaagcttttccgcttaacactcaaagtcggagagcgaaaacactttgtcttcgggcacttccgggccgctgccacaggtcggccaccgaaatattgctgcggatcactttgctgtagagatgcagaccgattgagaaataaaaacaacaaaaaaatatcaaatcttctattttgtttgaggtatacatatcgtaaatagtcgggacaaaatattaataccggaacaaagatctttgagtaataacaaatcccaggcttaggaaagtctgggatttgtgcataaaaaatcccctgagtttttcagaggatttagtaatttcagaaatcttacattcacgatacattaaataatgcctcatcaaaagtaaactttaagaggtattatttttaaattttttacgaactctacaaaatcttaacttcctgtaaaatagtacataacgacccaaaattattcatctcccaaaatttctttcaattctttcaaaaaaatatccgtatcccgtgctccctgcaatttacccacaatatttccttcagcatccaaaataaacattgtcggaaatgcatttacatcaaactttttgcgtaaagcaatcccttcacctttttccatatctactttcaaaggaataaaatgttttttaaaatagtcaccgacaaccttttgtgtaaatacccgttcattcatcatcttacaagggccacaccaaacggtataacaatccataaacaccattttcccctctttgcccgctttcttcaaggcttcttcataaatcaaatcctgaaattggacaccttcccggttttccagattggaaatagcctgttcataatagctcaaaggaggtctttgcaaatctttggaacgttctttcaagtatccgatcaacaaatcccgctcttgattgggtaatcctttgatatcccccaaacacacatccagattcatggccaattccttatgacatcccggaattccagcccgcatggcttcaatcattttatcgtacttcttttctccccgatacttggttatattatacaaagcaaaaaccccgtttgtatcgggtagattacatttgtgcaattccaatgccagatctaccatcagattaccatcataaggagtcgttccgcaggcataagggaacaatttggcaaagtaaatcccggaaataaatctatccactttctcctgccctatatttttcacaaactcagctttccgggtaatcagctttttaaacaattcatcttcattggtccgtattttctgcataaaatatttccagttctcttccttcggcaattgtttatcctttaaacgggcaaaaatatcttctatcacttttttagctttctcatcctcagaggctgtatttaaaacatcggcataagcacgtaaaaatttcaggttacgttctcctttttcataacgccggttcatttccggcagtgtagttttcggatccagggccttcgcaagcaattcctgaaattccggtaactgatgcccgccaacaatccggtaaatcaaatttccgtcctgatccaatacaatataatgggccatttggagtgtattgtatttggtagctaacggacgtccctcattcgtagttatatcgataaaaaggtttacgaaatgccggtccatccagtcggcaaactgctggtcactgaaaaccagttggttcatcccgtggcaaggcacagcccaatcagcaaaacaattcacaaaaataggcttattcacctcccgggctttttttaaagcctcttcaaatgaataaatatatttcatttttacatctgtttttactttatctccatatatactctgtgcttttacactcactactacacctaaaagcagcacaaaagccaacatcaattttttcataaaatcttcttttaaattaattaacaatcccaaattattcctgtaacatatctgaataactccatactaccggcttattcttttatacaacgcacgctataagccgccgtcaaattggaggttccccgcagaatcccttcatacacttttgaaacagcacgaataatacctgtctgaacggaatcactctgcacaatcttggaagatgaccaaaaataagcattcatatctttattcatataaggagttccataggcaaaagttccataggcccgggtacctccatacaatattctgaaaccggtaccttcttccttcaatagcataccggcctgtttcccgcgccattgttccaataatccgagttcatcgccgtccatataaagttctgtttccaattttttccagtcttcatcggtcggcaaacgccatccatctggcaaagcctttagagctgcatcataagtatacaacaaaccgtacttttctgcatatccgtcattctcttcctccgcattcaaaaaatattcctctgccgtcaaaccgatagtctttgttttagtttctgccaggatttgatttaatgtttccaccgtggattgcatggaaggataccacgttaccgtattagcaattaaatttacaatactcactgccgaaccagggtagtcaagatacatcataacaaaagatgccggggaaaaaaaaggtacttccggtaaaggatcgctactgatcttcccgtcatttatagcattctgtacaacctcatcgaacagggcccgagcaggttcaatgcggtttgtatccaaattctcctcccgataagtataacaaccgtctacacttcctaaaggcagacggtaggccaaattttccgccatccaggtctggtctccgatagtcacacaacggtagatctttccatcccttgaatcagtatattccgaaaagactccttccggtccgatcaaagaattttcatcttcacaagaccaccacgccaacattccgaataatatatatatgatctttttcataatacccgttttacaattcaacacccaatttttcagtaataatctcatacaacacctcatatttttccatgaccaggggataagtaccccattgttcacggaaaacctcatccgaaccagtagccagtataacttttacaaaacactccagatctctctgggtatcataaggagtaaacaatccacctccccactcatctcccataacgaaaccgaaacggcctgtaacagcccgcgcctctacccgttgctcttccaaagcctccccggtcagactacccgtataatccggattcaagacatcacaattccagtaagtagtaatggtattatccacctccgaccaatactttgtcccgtaccagttcgcatcggaaactttgttgaaatatgccaagtcttctgaataatttttgattttttgagtcaccatattccttttcatattcaacagaatatccccgggattttctccttcccaatttcccataatcatagttaacgtacggaaacctatcataaactgttgatcgacttctgtcacctccctgttatccaaatttttagttgtcaccgattccgggacaaaaaaacaaaaagggaataaagctttgtcagcatctctcaggtattgcccgatccaggtcagtacttccaattgtttttccggatcagttatatactgataatgatattccagttttttataactatcgtatccccaagccaaatccagtttttcatattgataaaccggttgcccatggacgtctgttttcaaaaatatcctcccgatcgtatcattgaaatataccggtatcccataagtttcataaatttcataaatccgatgctttacaggatcgtcaggatcatcctgtataacatacaattcatccagatttatccgggattccaatgtactttccttactgcacgctatcattagcaggcagaaacatatatatataaaccttctcataatcaatcaaaatttgcattaattacctctgttaatcttcgcatcggtctgacattatcaggcatatcggtatcaaattccaatactgatttaggaatagaaaatacataagccggatcatcgatttccagacggaaaacttctccacgcatgaatttcattttactatcccaatcgtatacagcaaaaacacgctctattgctttccgtaaaggagctttccgacacacagcatacctccgcagatcaaaccacctgtgcccttcaaaacacaattccctgcgacgttctttccgtacttcctctatcacagtgttctgatcataacttacatcctgccaaccttcaatcctgtttctccggaaaatattcaaccaatccgacgcccctgagggatcgtcaagcatcgcacatgcctcagcaatattcaggtaagcttctgaaatccgtaataaaaataaatccgaaacatatgactgatgtaaaccacgtttatatttacgtcccaatgctatgctgtcactggaagaagccggagtaaaaaacaattctttccggtaatcattatctgcatataaccgatacaatccgttagcaatacaaaaatcaccgccattaccggtaaaagcattttgtacgtttaatgagccctgagaaaacaatatttccggattggtcctggaaataacctcatcttcatccttcacaacagcataatctttcagtgaagatttgatttttaacagatcatctgcagcctgccaggcgtttttccaatcctgcatgtaaagatatacacggcttaacagtaatagcgaagcttccccggaagccctgtaaaataaacgtgtctgcggactttgggtaaaataatccactgctgctttcagatctttcacgatttgttcatatactttcgcaaccggtacacgttcaaactgagaagccttgtctttatcgtgctctacatatcctgtcagtttcaaaggaattcccagggttgtctctgcattttccggatcgtaggcctgagcataaatgtttacaagcaggaaataaaactgtgcacgtaaaaaatgcgtttcccctctgactctcaaagcatccagccgttcttcttcggtagccggatttaaatcttcgatttcatccaaaataatattagtgacattgatccggcgataaagatcatcccaaagggcattatctgcagccagctcatctcctttatagctccttcccacctccatttgccaggtggtataaccgaaataagccgaattcatagctgaattccatattctgttttcagcctgatcagtaattacggtattgatatcgtcgtccagtatatgcagccaccaaccaatatctccccaagctaaatcttgtacttcttccttgctgggtatatatacacttccaagtaatacctcatccagatccgataccgatttcaccacgaccatatcctgggagtagtcatccagatagccacagcgaaccaatatcatcacagccaatacaagtaatatattctttttcattctactgtttttttaaaaagttacattcaattggaaagtatacgaaggccttaccgacaaattaggttttgcaaaaccagcctgcgacggatcctgtcccttcagagcttttgcagaaactgtaaaaagattcatactgttgaggctcaattgcacatttgaaaacggagtcttcctcaaccattcggtattcagcgtataacgcaacgacaaagaagaacatttcaaataattaccgctcactacacgtatatcggatttatcgtacatatcccacacactattagcaaattgctgaatgtgagaaatatctgaactcgtcacagaagaaaaatgaacaagagaactgaaataatctggatccgaaggacttaaaatcaccggaacattggtattcaattcatctcccggagccatccaacgattaacaaattcctttcttatatttttttcagcacttactccattcaaaatcggttcataaagactgaataaacgcactttcgatcccagactataagacatattcacagaaagtgaaagacttttataggttagtgaagtcgacaaactacctgtaaaaatcggatcccgttgcccgcttttttccatagtcatcagaacaatatcttccaattcccggtcttccagtaaatgcatacgatctgcataatcattaaatacagggatgccgttcgcaggattaaggcccaggaaacgataagaataaaaactactgaccgcctctccatctaccaatgcagttccgtttaaataagaatctatcgtatatttttctactgtctgagaacgcactttattcaggttacctgaaaaataagtatacagattccattgccagtcacgggttttcaccggaactccggacaaaccgacagaataaccattattttccaggttccccccattcatgacataagaatggcccggtaccccgttcacagaagagacctgcacggtcgtaaaacaatcttccgtctttttcaggtataatgttccgtttatccctatgcggttgtccagaaaggaaagatccaattccacattgaactgacgggtttcttcccatttcagattcggattcggataacgggctacagttgaaatattttcattatacatcggattaattgtcccttgtctcagtatcaggttcggactctggtcttccaacatatttccctgtattccgtaagaagtccttaaacgcatatttgaaataaaatctgcatgcttcataaatgtttctttcagattccacattcccgaaaccgaccagatagggaggaatttttcattactacggcttccgaatttattggaagcgtcaaaacgtccgttggcatttaaggtgaaataatctttatagctgtaacttaatgtcaggtaacccgaaatctcatggttgataccatgtaacaatgaccggtgatttttattgatccaggtctggtagtgcggataatcctccagattcacattgtcaatgaactgcaatccccgttctttcacaaatcctctgttctcatccgcaatactcctggaagtacttccgttcaattcaaaacctcccatcacagatgccaaatgttgctgattttccccgaacatcttccggtattccacctgagttcggaaagtataagaatcttgttccgaattattggtgttcagtatacctccataaggtaaaatacaattccctgcatctcccgtttttccaagttcttcatattcggcatttttcaagcgggctatataatggcttttttctccccaccattgctcctgtaaagtgctgctgtgcatataatttccagcaacggaaagctccaggtcttccaggatgttgtaacgcaaagtcagattcgcccctaaagtacttccccggtaatcattagaactatttctgatttcattcagaatattatatctgaactgtttatgacttacattacttcctccataaccaatagcatcataataaaataaagaaccgtcttcatcataacacggaatagcccgggaagtattataagcataatccatcgcatcaatatcaggcatcaggtgatttttccgctgaatattcccgtttaaagaaaaattagcccttattttcggtgaaaaattaatatccaggtttaccattgccgtataccgttccgtttttgttgttttcgataccccatcctcgaagttggctcctaatgaaacgtaataacgcatactttccgatcctccggacaccccgaaggtatggtcatgggaataggcatcctgagtcaaaatatcgaaccaatcggtattgactgtctcataacgcaacacttcctgtttaaaaccagcataatcagtcagaccggaataataacggtacaaagctccttcatatccgactttaggcatattcgacggaaactgataatgtaaatcgctcaattcttttccgaactgtacccgttcccgggaatccatcagatttatgctccggtccgaataccggggacggcgggtcaatttcgatgtatggttataggaaaaacgggcaggtccaatagaacctttttttgttgttacgacaatcacgccattggcagccttagttccgtaaagtgctgtcgccgaagcatccttcaacacatcgatccggtctatgtcctgaggatttattccggcaatcgcatttccgacaatattgatataatccggattattcaaatcctccacactgacattcaccggatcatgcataataaaaccatccagtacccacaaaggttcacggttaccaatcagagttgaagttccgcgtacccgtatcctgggagttgcacccacttcaccggaattggtaattaacatcagttcgggaatccttccttccaaagcctggtcaatactactcattccggggaccaatacatccgaagccttcaccgaggtaatagcactggtagaacgccgcttatcgactttctgatagccggttaccacaacttcttccatccctacaatcaactcttccatcacaatccgaagtgtatctgtcgttcgttctgtaaaattcactttctgtgaaacatatcctataaaagaaaactcaagtgttccccgctccaacggaagttgaatggaaaaataacctttatgattggtagaagtccccaacatcatatctgccaattttaccgttactcccggtaacggatgtttctggcgatcagtaacaaatcccttcaataaaatcgattttgatttttctgacggagaatttaccttctttttaattaccactgttttttgttcaatcacatattccataccggaaccttccaacagggcatccaatgcctgttgtaaagtaacctctttcagggaaagggtaatgttgttcaaagagcggacatcctctgaattaaatacaaattcataaggaatttgctgccggatattctctatgaccttgaaaaacggagcccgttgaaaattgaatgttattttcggattatctctttgtccaaataactgtccgaaataaaagacactcaaaatcaagaaaataaatggtttgagtttaaaaattctatacttcggcagattaccgaagtataatcttcgtttttttttcatagttttgtagaattaatacaacttgttaatattattagcaggttttacacgaaaagtggggtcaacacttttcgtgttttttatctctgtataatgattttctttccattaacccggtattttacctggtttgtcaaagctattttctgcagcacttcttcgaggttttcacttcgctccacataaaggtaaaaccgcatttttttcaaatcttccgtttcatagtccacttgcatatcataccaacgggctagttcatccattatagtttccaaagcaacatccttaaaaatgaattccccgtttttccaagctaaaacagtcatcaaatccgcattatgcaacaacatcttctcttctcttacttcacactgctgaccaggttccaactgcaaaacctgatttttatgcactattttcacacaaccggaaaccaatgtcgtgaaagaagggcccgtcggatatgctcttacattaaattgcgttcccaacaccttaacgcaggctccttcaaattccaccaaaaagggacgcagactatcctgtgtaacttcaaaataggcttctcccgtcaaatatacttttcgttcatccccaaaaacatccggaaaacgaagggacgattcggcattcaggtatatccgtgtcccatcggacagaaccaatcgatattctccacaacgcggaacaataatttcatggaaacgctccgtcatttctttcttctgaatgacagtaccgagttgcaatccctctgaaatttcattcttaaaaccaacttttaaagaatctttcaatgtacctttattcagatcatgctgaataccgtctgaggttatcaaccgtacaggaatcgttcttgaaaaagttttctccatttttaccccggagaaaaaatgatctccccaaaatattccaatcccaagaatcacactggcggcaaccaaactcatctgcctcatccgacgtcttctcatctgcctgtaaggatccaattttctccaaacacgtttcatattttccggagaaggattctctaccatactttcttcacaataatagttataagtatcttcgagaaaattccggttttcttctcccatctccccccatctctccacttcttgtttttctttttctgaagcttctcccaaagcccaattccttataattttccaatcaattttcataatttttcacactctctttatataaagacgagtattttttaaatcagggtacaaaaacgaaatttttttagaaaaaaaaataaaaattctataattgctcccaatatttcaggaaacaatagagcaaaggcaaagaactccgtataaatttatatgctctctttatgtgggtgtggactgtcaattctgaaatattcaatgtttctgctatctcacgataactcatatcgcggaatacttttaattccaatacccgtctttgttgctcaggtaatttatccagacatgctttcaccttttccaataaatcctcattatcttcatattctattgtcccggaaaaaatcaaagcttctgtcaatttatcctgattgatgtctatcacctgtaaatgtttaaaataatccagacaagcatgttttacagaagcataaagataacttttcagatgggtactttcgggaattgaaagcgaagaagtccagagcgaacaaaacacttcctgaaccacatcttccgctaattcacgattcatcagataagccaaagcaaaacgatataatcccgcataataacgattaaaaaccacttcaaaagccctatacgacttaagtttcagttgtttcatcaagcaatcatccgaaatttctatctttttaccaggcataatcaaatttaaaccgcctaaaaatatcaaattatttagaatcgtgacataatcgtatcgattttttccatgctggtttatatctacagcctggtattctaaaaaaaagctttaaattcgcatatagcgatgcggaaacaacgttatgccgtgtcaaggacaaaccatgaaaagatggttgaaataaaccaatacaaagcgaaggatctcctttggccctctgccatccgaaaatccttcgctacgatcgggatagaggtcccgataccctttacaatattatttgtattcgtcccaactcttgatcgccatgtcttgccggtcgactttacagatggcataaatgaaagcactggccagacgagcattggtaatcagagggatattataatccacggcagcccggcggattttataaccgttatccaattcccgttttgtatgattcttcggaatgttaatcaccatatctatttttttattccgcaggtagtccataatattcggttctttctcttcgtcgggccaatgaaggatggtgacacgaataccgttttcctcaaagaacttagccgtgcctgctgttgcaaaaatatgatatcctttggcaatgagcatttttgtagaattgagtaattccacttttgaacggctggggcccgaagaaatcagaatattcttttcaggaatccggttacctacagaaatcatactctttaagatagcttcgtaatagttttcaccgatacatcccacctctccggtagacgacatatccactcctaacaccggatcggcctttaacaaacgggcaaacgaaaattgagaagctttgactccgacataatccaaatcgaaaaccgatttattcaattcggctacatgttcacccaacataatccgggttgccatttcgataaagttatatttcaaaactttcgatacgaacggaaaactccgcgaagcacgcaggttacattcgatcactttgatatcgttgtctttggccagaaattgcatattgaaaggcccggaaatattcagttctttcgcaatagcacgggcaatccttttaatccgccgcatggtttccacgtatagtttttgtgccggaaagacaatcgtagcatctccggaatgtacgccggcaaactctacgtgttcactaatggcataggcttttatttctccatgctgagctacagcgtctatctctacttctttagcctgttcgataaattcggtcaccacaaccggatgatctttagatacttcagcagctagttcgagaaaatgaaccaattcttccctattggatacaacattcattgcagctcccgaaaggacatatgaaggacgaatcaacaaaggaaatccgacctcatcgacaaacgtataaatatcctccagactggtcaattctttccagcggggttgatcgatacccaagtgatcacacatcgtagaaaatttctgacggtcttcggcccggtcgatggattctgccgatgtacctaaaatattgacatgctgaccgttcagacgcatcgccaggttattcggaatttgtccaccggtagaaacaatcactcccctcggttcttccagctctacaatatccatcacacgctcgaaagacaattcgtcgaaataaagacgatcgcaggtatcgtaatccgtactcaccgtctccggattataattaatcatcacagaacggtatcccatcttattgatcgtattcaaagcactgaccccacaccagtcgaattctacgctactaccgatccgataggctccggaacccagtacaatgaccgaccggccgtcatgttcatactgaatat

SEQ ID NO: 5855 - DNA, 5810 bp, Unknown
  gut microbiota DNA sequence
ttaataatgaacgtaccagcagaattaaagtacaccaaagaacacgaatggattcgtgtagaaggtgaggaagcagttgtaggaatcacagactatgctcaaagtcaattgggcgatatcgttttcgttgaatgtgaaacagtcggagatgcattggaagcaggtgaaactttcggtaccatcgaggctgtgaaaactgtttctgatctttatttaccggtggcaggtgaagtgctcgaatttaatgaagagctcgaaggtgaacctgaattagtgaataaggatccatatggaaaaggatggattgtaaaaattaaaatcagtgatgagactgaattggatggactgttgaatgctgatgcatacaaagcgataatttaagtccttggaatgagataattaaggctgtattacgtgtaagtaatacagctttttttatgtatattaggcagactaactgattttttataattttgaatttctattgaaatgaaatctaaaatttaaagatatgactttgataaaatcaatttcgggtatccggggaactgtcggtggttgtcccggagataatcttaccccgctggatatcgtgaagtttgtttctgcctatgcaacctggctgaagacaggtgccgggaaaaaaaaggctaaaatagttctgggtagggatgcccgggtgtcgggcgatatgtatgccaaattggtggctgcaacattgacgggtttgggacacgatgtggtcaatatcggtttagccacgacgccgacaacagagattgctgtgactgccgagaaagcggatggaggtatcattctgacagccagtcataacccaaagcaatggaatgcgctgaaattattgaatagccggggagaatttttatcggcagccgatggggaacaagtcttgaaattggcggcaaaagaagagttcgagtatgctgaggtggatgaattgggtactgttgtagaaaaggattataccccatatcatatcgatcaggtgctggcgttaaaattagtgaatcgggatgcgatagctcaggctgatcttaaagttgtcgtggatgcggtaaattcggtaggaggtgttgtcattccggctttattgcgggccttgggggtaaaagagatcattgaattgaactgtgaacctaccggacatttcgctcataatccggaaccgatacctgaaaacctgactcagattgctgctaaaatgaaagaatcccgtgcagacctgggaatcgtggtcgatccggatgtcgatcggctggctttgatctccgagaacggtgaaatgttcggagaagagtataccttagtggcagtagctgattacgtattgaaacacaccccaggcaataccgtgtctaatttatcttcttccagggctttgaaagatgtgacagaagcttatggacaacaatatcatgctgctgcagtgggagaagtgaatgtggttgccgagatgaaacgaacgcattcggtgatcggtggagaagggaatggtggtgtgatctacccggaaagtcattacgggcgggatgctttggtcggagttggattattcttgtcccattacgttgcccagagcaagaagatgaccgaattgaaaagtacctatccgccatattttatctcgaagaataagatgaccctttcccccgatatggatgtagataaaattctggaaggactgaaagagagatatgccacagaaaaagtgacagatatcgacggggtaaaaatcgattttgcacaaggatgggtgcatttacggaaatcgaatactgaaccgatcatccgtatttactcggaagctaaagacgaggctgctgccaatcaactggctgaggaagtgattgctgcagctaaaagtacgctttagaacgtgagaaattgaactgtaagctgtgaccgtaaggcttatttatcgtttcccggttttatccgggaaacgataggctgtatattattcgacatataataccaagcctttcaggtattcgccttccgggtggtatatgcttaccggatgatctgccggttgggttaactggtggaggatacgtactttccttcctgtgttggctgctgctgtgaatacggtctgacggaacagttccttagtcatgacttgtgagcaggagaaggtgaaaatgatcccaccgggtttgacgacttcaatgcctttccggttcagttttttatatccctggatggcattgttgagtacattctgatgtttcgcgaatgccggagggtctagaatgatcaagtcgtatttattgtgagattgttccagaaatctgaaagcttcttctgcaaatgcttcatgccgcctgtctccgggaaaattgagtgctacgttttgtttggccaattcgatcgcccgggtggagacatctacggaatgtactgatcgggctcctccccgcatggcataaaaagagaaacctccggtgtaacaaaacatgtttaagacctgtttattaccggcatatttttcgagcagatgtcggttttcccgttggtcgataaaaaaaccggttttctggccttctaaccagtcgacattgaattttaacccattttcctgtgctacaaaatgatccgctttcccatataaataaccgttatgtggatcgatcgccgctttgtagggaagggtagattccgatttgtcgtaaatggcggttaatctgtctcctaaagtttcaagtagggcccgggtgatatttccccgttccaggtacatacctacggagtggaattgaacgacagcaacaccggcataataatcgacgactaatccgggaagattgtcgccttctccatggatcaaccggaaagtatcgttgtctgctctgtcggtcaaaccgatagctcggcgcatgtgataggctgctgtaattcgttgtagccaaaaagaataaccgatttcttcatcttcaaaagtgagaattcggactgcgatagaaccgatctggtaatgccctgtcgccagatattgattgtccgaactatagactctgaccaggtctccttcctgtaatttcccctctgttttggcgattgcccctgagaatatccaaggatgataacgaaataccgaacggtcttttcctggttttagtatgattttattcataagatgaagcataactgattactggactgcaaaaatagataaaaaactttgatctgtttctttaaaagtcgatattataaccctaaaccgaacgattgcgtaatacacaaagaaaatttgagagatagtttcttgttttttgttggaaaagttcttaaaaattcataaattgcgaatattgtcggggtatgtaattttgagctgaagtaccccctaagaagtttaatacgataaatataaatagatgagacttaaagtattgggttctgctgaagatgctttgcgtgcaatgacagaacaattgatagaaaagatgaatatgcggggaatctctccgttccatttggcattgtcgggtgccggtacggcccaacaaatgttcgggctttggattcgggaataccgggagaaaataaaatgggagcaattgaggttttattgggtggatgagcgatgtgtttctcctgatgatgaggagagtaatttcaaacatgcggatgaattattattccggcctttggatattccacatgcccatgtccatcgtattcatggcgaacgggagcctgaagtagaggccgaacattattcggaattggtgaaatgggaactacccggatatgcctcttgtcctcgttttgacgcaatcattctgggaattggagaggatggacatactgcttctatttttccttcaacgccggaattactaacggcaaaatgttgctataaagtatcccaacatccggaaagtggacagaaaagaattacaatgacaggtagtttgatattgaatgcgaaactacttcttatccctgtattgggaaatgcaaagacaagcattttacaaagagtgatcaatgcagaagaaaactcggtcctccctgcggcttatattatcaatcatgcgccggaagcgatgatctttacagatttgcaagtaagtctggagtaaaaaagcattttgtattctgaaagtcatatacctcgggtcaggataccgctggggtggagatattgatatcttcaaaacgatagactatcgtatgtatttatctgccggaggtatatgtgctgacttttaaaagaatacaaaatgctcttttatttaacattcaagcatttctttggctttttccaggatcgtagtatcgtctaattttactatgcccccattcggaccttgctcgatatgtaaaccgacagccttgccctcatcataatggtctccaccgaaataattacgtactgtttctacgtcgagtcccagttcgtccgcaattttttgcatactccctgagggcaacatgtctttgatttgtctcaactcattgaaggtaatcattgtagtcatatctcaaaagttttatggtttatcagtggaataaatataggactaaatctctgaataaacaagtaaaacgtttgcgaatttcacataaaaaaattaataaaatcaattatttgtgtaatctattgatattaagtgtatttctgtaatactcagaatgtctgtgaaaattgtttccttaccggataactttttgtacttttgtagagaaaaaacaggatcggtcggatcttatccggccgatgaattgaatttctaatgcattgtatacatgacttttaatgaattgaatattagcaaacagatcttgatggctttggaagatgccggatttgaacaaccgacaccgattcaggaacgggctttccctgtcattcgttccggaaaggatgtgattggaatagcccagacggggaccggtaaaactttggcttatctgattcctttgctgatgaaacttcattatgcgcagggaaattacccacgtgcattagtgattgtacctacccgtgagttagtggtgcaggtatgtgagagtgtagagttgctgacggagtatatggatatccgttgtgtcggcatttacggaggaacgaatatccggacacagcaagctgcggtatacgagggagtcgatttgttggtaacgactccgggacgttttatggatatttatatgaatggcattatccgtacccctcagattaagactgtggttgtcgatgaggctgaccgattgatggatatggggtttatgcctcagctcagaagtattcttgaggtagtacccgagaagcatcagactttactgttttccgcgaccttttcaactacaattgctgaattggcagcagaatttttggctccggaaccggtccggatagagacaggtaacccgacgactccggtagaattggttacccagctgcgctatgatcttcctaatattcagactaaaatcaacttattgaagttacttctcacggataaagaagaatttcgcagggtcatgatatttaccgaaacaaagaaaaatgccgatcggattgtggagagactgggcgaccactggaagggggaactgagtgtactgcattcgaataaggcccagaattcccgattaaatgctttgaaagtatttaaagaaggaaagactcggatcatggtttcttcagatgttgcggcacgtggaatcgatgtgcaggatgtcagccatgtcatcaatttcgatataccttctattcctgaggagtatatccaccgcatcggacgtactgcccgtgccggaaaggaaggaacggc

SEQ ID NO: 5856 - DNA, 521 bp, Unknown
  gut microbiota DNA sequence
caaacaacgcctttccgctttacagcggtaggttttcgcttacctgcccccgaaccgtacttacacgtttccatgtatacggctctccatctgtaacatcattttacttatcacagctctggatttttgcattacactccgcacatacgaccaaagtctttctgtgcatatagagcattttgcgttcccagtcatttttaccttttaactctttgagagtgcggacatggtgcattgtcacttctccgtgcttgccacatagttcgcacgtctttgttgtaagcctttctatcagactcaacgatggtgttttgaacatatacggcagattgtcacttggggctgtttcacagtccgttttacgggcgtaaccctcattgtagaataccctgtatttggtttctcctcccttgtttacaaaaggaacggcaaagagattgtccttgcggtatgtttcaatgacttttctcactgacatattcagcttttgagcaagagttttgtacatggagaacttcata

SEQ ID NO: 5857 - DNA, 1276 bp, Unknown
  gut microbiota DNA sequence
tggattcataatagatttccttctgtatctttaaggaaatctattatattaatgattgatatgccatctgtattcacatgagaaggggtcaaacctcccacaatgactattttagggaatccatctttgatatgacgaagggaattggtttcctggtcaattttttcttgagtgggcatatcaagtgctgattgtatgtacacacgtttatccccactattgcaaatgaaatcaacttccagtagttttcgcattttctttccatcatcatttgttattctcacttccacttgccctacatcaatcgaataccctctgatacgcagttcgttatatatgatattttccataagatgacccccatcaatttgacggtaattcagacgggcattacgtagtccgacatcttcaaaataatattttgaaggcgtgttgatgtaatgctttcctttgatgtcatatcgaatggctttttccaacataaaggcatcttgtaacattccaagataactctgtatggttgtatctgaaatactatgaccttttacggacttgaatgtattttcaaggtttgtcggattggtcaggcagcctatattggaagcaataatatctataagttcactcaaatcatcatcgtttctaatattgtaacgctcttttatatcgcgtatataagttccttgaaacaaggattttagataattttctttttctgttttctttgaaaaagatacgacttgtggcattcctccataaatcatataatcctgtagggcagaaagttcatttgtgtactgtcctgccttgagaaattccgaaaaactcagtggatggactctgatttcataccctcgaccacgaaattctgtttttacatcactggacaacattcggctattgcttcctgtcacatatacgtctgtatttttaattttcagatagctgttgagtacatcttcaaactcaggaacaagttgtatttcatccaatagtatgtaatacatatcgttatctgtgatatgtccatcgatgtgatccaataatctgtccggctctctgaggtgtttattacgtcggtcttccaaatcaacttgaataatgtgctcttcattcacaccgttttcaagtaatgattgtttgaataattcaaatagaagataagattttccacaacggcgtacaccggtaataatcttaatcattccgttgtgcattacacttcttagctcttgcaaatatttatcccttggtataatcatgttgcaaaagtagt

SEQ ID NO: 5858 - DNA, 28777 bp, Unknown
  gut microbiota DNA sequence
acagcctccacaactttagtatcttctttctttgcgttcaccgttgaagttgttgttacggtggaaaccgccacgatttcctgcaggacgttctgttctaggacgagctacagttacgttgattacttttccatcatattcagcctgattcagttcgtcgatagctttttgtccttgtgcatcgtcagccatttctacgaaaccaaagccacgtgatctaccggtttcacgatcagtaattacctttgcagaggaaatttctccatattccccaaataaatcttttaagtcgccatcatttacggcataacttaaatttgaaatgtaaatgttcattaagtataaaactttattgtctaaaaataaattcgaaatgaggttgatagctgaaggaaagtctacttaacgatacattatacatgaaggcaagtcgctttaaatacaaactgattcaattctcaaatacctcgcaaagataagctattattttaaatacaacgaattattatccgtgaaaaatccataactttacccaatatgaatttattggaaattttttgttagttaaaatcgaaatttatgctcattatcctttcgccggccaaaactatggatatgaaaactttgggagatacttatccgtttacttggcctttatttcagcaagatgccgatctgttggttggaaaaatgcaacaatatggtgttgaagaattgcagaaattactgaaagtcagcaaatctctggcagaggaaaattacaaccgttatcaaaaattcgatcaggcggacacgccaatgaaacaagccctttttgcctataacgggagtgtgttcaaaaccatgcaaaccgacacgattccagtggccgatctcggctacattcaggaccacctgcggattgtttctgtgctgtatggtttactccgcccgttggatctgataaaagcttaccggcttgcatatacgttaaaattgaaagggctgaacctgaaaaatttgtatgaatattggcttcccaaactaacagctcccctgatcggcgatgtgaagcgttcgggtggaatattgatcaatctggccagtttggatgtatggggagctttcgatgagaaagaactccgggcacaagtgagagtgataactccggaatttcaggaatggcggaatggaaaatatgaaacgattcgtacttatgccaaacaagccaggggagcgatgacccgttatattttgcttcatcgtctcgaaactccggaagaaataatccggttcgagtgggagggatttcagtttaataaagagatctcggatacagaaagatatatttttacccgagccagataagaaaaagccgattttagattttaaacaaacggctatcgaagcttagcagttatttaaaacctaaaatcggaactaaaatcaggcgtaagtttttgcctgcatttctccgcgtaacaccatcaggccattcatagccaaagcccgcatttcatcctctcccggataaaccttcacgggggcgataaagccgaccatacgggtaatataatcggtgatgggtttgccataagcaatacctccggtcagtaaaatagcatcaactttccctttcaacacagctgccatagctccgatttctttcccgatctggtaacacatggcatcctgaatcataccatattctgcatctaccggtgctttctcttccaccagccgcatatcgttcgttcccaaataagcaacgactccgccgttccctttcagcattttcttgacttcggcctttgattttccactaaaacacaattcgaccaaagcacctgtcggaagacctcccgagcgttcaggggagaagggaccgtctccgtccagggcattattgacatcgacgacacgtccgcaacaatgtgcaccgaccgagactccacctcccatatgggcgacgatcaggttcatttcttcgtattttttcccgacttcccgtgcataggttcgtgcaatgactttctgattcaaagcatggaaaatagataccctggaaagggcagggtgaccggaaagccgggcgatcggatccagttcatccacaacaaccgggtctgcgatataggctttagttccgttatgcatttcacgtacgatatcccgggcgatcaatcctcccagattcgaagcatgctctcccattaccggatactccagatcatgagccaaggcatcatttacctcatagattcccgattcgatcggtttaactaaaccgcctctgccaacgattgcatgaaagccgtgaatgtcccaacctgcttgctgcaattcggataaaatgatattcttccggaattggaattgtgaagcgacggttgcataaggactcagttcctcggctgtatgacggagtgttttggaaaagatctctttttcatcttcaaaaatcgcaatttttgtagaggtcgatcccggattgatggttaaaatttgaaatgacatactttcactgttgagtttagattattaattattttactacaaaagttgtaaaatgaaatcaaaactcaaagaaaagcagcaattttatattaattttaggatattagcgaataaccagaagtttttcatgatcgaatcgttgcatttcaaacaaatcgcgttcgggccatgaatggacagaagccatagcttgtcttaccgcattgtcgatgtaatgagggaaacgcgagcccttccagctgctggtgttggtcaggaatacccacgaataaccgtctttttgctttttcatcaatgcactggtacctgctaatgtaccgctacgaaaccattctccccggctagtcgtctctatccaaccgatggggtaggcactgggaacttcctgggtcatgtagtcgatcgacgcatcactcagcaggtcggggatacccggatctttatcgatgactgccaggaaacgtaaaagttcggctggagaagcgacccaaccacctgcaccgtagagttcttcaatattattgccaccgttactacgtgcaaccaattttccgcttccatcacaagcctgaatctgttctgcattggaaacttcataatattttacctcattaggcaatttatcatcatacagatttttacctaaatgcatgtcgaaacaaccggcaggacgcaagatatgtctttttacataaagttcgtaatcttcacccgagaccttttctatcactttagataagatgccgtaaccgatattggaatagcgggctccggaaccgggagtaaatcccaatcttcgggaaagcacgaatcgtatcatcgtattcagatcggcaggaggaggtacctgcattttcctggcaatctcaaccggacaaaacatggggtcaccgtaggcaatagaaaatcctccctgatgacgtaataaattttcgacggtgattttagtcgtacgggggtcttttatatctgaaaaaatggtatcgtttaaaattccctcgggaccgaaaacccgatcctgtaaagtcagtttaccttcttcctgcaacttcatgatagccacggcagtaattaacttggagatagaagctatccggaaaacatgcatgacatccatggggacgttttcttcttcatcggcaaagccatatcctttactataaatcaaacgatcgttcttcatcaaagcaaaagaagctcccttaatttcccatttttgcataaattttcggattatccgatcgaatttcaaggtgatgtccaattcagagtcattgttattaataacttgatttgcagggaaaagcataagcgaatcggaggaaagggttgaagataacaaggtcgtatcttcagccggggaaaatatactctcttccagactcattctccagggctttacaaaaataatcaatccggcgaccagtatcaatataatatatttcattacttattttaatgttgtaatgagcggatctcatacacaagatgctcatcgaacgagttttaataccattattttgcaatattataaaaaagatgacttttataaaacttttggggaataaaaacttcttaatattacctaaaagtggctttaacactcttcaagcaatctgaaataatatttcatcagttcttgtaataatggtaatccgggatcgaaacgaagttcatcgattcggttgattggcaaaattagaggagaagtcccggacagaaaagcagcatcataccgggctaattcagagacaggaatacgcttttcaatgatcggaaaccgatgtttatggcaaatatcgaatactcttttccggcttgtgccgggaagaacatactctaaaggggcagtaaagatgacattgtccccgataaagaacacattggaacgggaaccttctgtgatatatccttctttatcgaccaataagacctcgtacacctgtttttgttttatcagtcggttcgtacgtgtccgtaaatccgtattgatgtattttacaccgggattttcacgcatggcggaataagtcagggtcggaactccttgtttataatcttcggaagtgggataagcatgcggaatttggaaaatatattcatccggtttgcccgatgtaaaatgcagtacgtatttcagattaccttcggtcatgttttccagccggataaaatgctgcaatttatccggtaggtttaaatcttccacatgaatatcgatgtttgatttttttagtgaattatccaatcttaagagattatcttttaagaagatgggattccctttaaaaatccggatcacttcgtatatgctcaggcccttttcaaatattttttctgaaaatccggcctctgatgtaacaaggttattctgtaaaatcatggctttacaatattcaaatcgtttattcgtataagtttttacaaagatacaaaatacctatttccgtttctcaataatttggcgtaattttgggcacatttatggagaatagcttacaaatacaacagatcgagctgttcctggaagaggtgattatccgggagctgggtaaaatgcaggaaatagaaatttcttatatgccatttgtattgatgggacaggcgatcgaggtattgggcggctttctggacaataaaccgatgaaagcgaaaggacagtcttcccgtcggttttcaaatagtgtaaaccggttgttcggaggaagatatcgtttgttgaacgataagctttatttatatgataaattgcgcaaccaaatgacacatacatttattccaggaggggatttgttgcttttaaaccatgcagatcctgccggtcgttatcagcatttacagtattccggaggaaaattagttttaatagccgacgtgttttatcaggatatttgtcaggcttgccggcgtttggtgaatcatttgaaggaaggccggataaaaccgaaaaatatagcatttgagaatgaaggataaacggatcatattgatcggagcagggaatgtcgctcatcatttagctcctgccttattgaaagcagggttgaatttgtgtcagatttatagccggagtatcgaatcggcccgggaattaggcaggaaaaccggtattacttatactgctgatcttttcggtatctatccggatggggatatttatattttttgtgtaagtgacgatgcattactctcactgttcaagagtatccggatcaataaagaggctataatcctgcatacgtccggcagtttgcccatggatatttttaagccctatgtcacttattacggagttttgtatcctttacagacttttaccaaaaagagggatctggattttaaagagatccccttgtgtatcgaggcttcgaatccggaggttctggaagtgctccggggattgacaagactcttgtcggtgagagtagaggaaatttcttcagagaaaaggaaaactttgcacttggctgcagtctttgccaataatttcgtcaatcatttatacggtattgccgggcagattttggaacaggaaggattggatttcagtttattacgccctttgatttttgaaacggctcacaaagtcatgctgatgactcccgaaaatgcccagacaggtcctgcccgccggggagatgagtcgatcctgggtatgcataaggcgatgctgaaagataaccggaaattattaaatttgtatacccaactttctgattctatccgtgcttccgtattgaagtctgccgaacagaaagcggagagcgataataaacctttaatgttaactttgtggtaatcaaaatagaaaatgaaattttttaaagacgaacttaaaaaaatacgggcttttgtattcgatgtcgacggagtattgtcacatcaatcccaaaatctcacaccggacggagaattgataagaacttcctgtacgaaagacggatatgccattatgtacgctatccggaaagggtatatcattgccgttatttcgggaggtggggcaccgggcgtacgcgaacgtttggagaaattaggagtcagaccggaggatatttatctcaaagtcgctaataaaacagaggctttagcagaaatcgaacaacgttattcgctggacaaagaagccattatgtatatgggcgacgacattccggattataaagtgatgacccaagtcggattaccggtttgcccgctggatgcttgcgaggaaatcaaatcggttgccaggtatatttctgatatcactggaggagacggatgtgtaagagatgttatttcccaggtgctgaaagcgaagggagattggatggataccaactgttatgtaaaaagcatgtaaattgaagaaaaagtttatttatataataataagtaagtatgtatgagatacttcggttaatacggattcgtacaattgcttttgcagctctgacgatgtatgccatgcgttatctggtcattcggccgatgctggatatcaatggattggctttacaaatgaccgggtgggcgttttttctgctcgttgttgccgtatgctgtctgatatcgggggcttatgtgatcaacgattatttcgataccaaaagcgatcggatttcaggaattaaaaaggtcgttgtaggaaaaagcattagccggagagtggccatatcgttacatactgtacttaacctgtttgccgtttctatcgccttttatctgggatttgccgtgggagtctggaaaatcggaatcctgttcctgttggtatccggaatcctttggttctattcttctacttacaagaaatattttttgacgggaaatttgttggtgggtatactggcttctttgattccaatcagtgctatcgtttacgaaattccgttattgaatatggcttatgcagaactcctcatcgaaaccggaacgaattttttatacatgttcgattgggtatttggattcgcctggtttatctttttgaatactttgatgtatgagatcaataaggatatatacacggtagaaggagaccgggaaaacgggaatcataccattcctgtaaagttgggaatcagggcggcagaaggaattattaccgctttagcaggtgtagctatgatttcggctgtgctggcctatttcgtcgaattctcagcttctttagccatactgatttacatcatcttcgctttgttgcttccttatgggatatatatcatctccatcttgagcggtaagcggaaaagacgcttccaattgtggctgattcgtctgattatggtattgtgtttgggtgtcagtgtatttttaagacatttctttctccttatttttgcagattgaacgatcggataataaaaataagatctatggaatataaattaatattggcttcggcttctccaagacggcatcagttgatgtgtgatgccggatttaagtttgaagtaagactaaaacatacggaagaaatctggcctgagggattggccgtagaggaggttccggaatatctggctggtttgaaagccaaagcgttcgacggggaactgaaagaaggtgagttattgattacagccgataccgtggtctgcttggatgcgaagatactcggcaagcctgaaaaccgggaacatgcaatcgaaatgctacatcgattatcgggaagaaaacatcaggttatcaccggagtgtgtctgaccacgcttcaggaacaccgttccttttctgcctatacggacgtctatttcaaaactttgtcggatcaggaaattacctgttatgtagatacctataaacctttcgataaggcaggtgcttatggaatacaggaatggatcggttacatcgggattgaaagaatagaaggttctttttataatgtcatgggactaccggttcaacaactgtacgaagctttgagacgttttccgaagaaatcataacataaattataaacaataaaaccaaatctatgaagaaaaaagctctgtttttagttctggctttatggatgagctggataggttgttatgccgacgaaggcatgtggattcccatgttgttgaagaaatacaatatcgaagacatgcaaaaagaggggttcaaactgaccgcagaagatatttacgatattaataaagcctctttaaaagatgccgttatcggtctgggtcgggaagggcagcctttttttcatttttgtaccggtgaaatcatcagcaacgaaggactggtagtaaccaatcaccattgttccttcgacatgattcagaaccacagtagtttggaacacaactatctgagagatggtttttgggctaagaccaaagcagaggaattggctaatccgggagtgacagcttctattttagtccgcatggaggatgtgactgaaaaagtgaaggcacaattatctccggaaatgaccgaacaagaaaagaatgcaaagattacctccatttgtaaacaattggaagcagaagcagtcaaagggactaacctaatggcgaatattaagccatattttaatgggaatcaatattttatgtcggtatttaaaatttacaaagacgttcgtttagtaggcgcaccaccatcggctatcggtaaattcggaggagataccgacaactggatgtggccgagacataccggagatttttcggtattgcgtatctatgccgatgcgaataatgaacctgcggcttattcggccgacaacaaaccctaccgtccggcgactttcttcaaaatttccaataaaggggtacaggaaggagattttacgatggttttcggatatcccgggactactaatgaatacctgacttcttatgcgatagaacagcttcagaacatagaaaatccgcataagatagctatccgtacggcaaaattgaatatcatcaacgacgccatggaatcggatgaattgctgcggatcaaatatgcttccaaagctgccagtgttgcgaatgcctggaaaaagtggcagggagaaaccaaagggctgaaaagattcaatacgattgccttgaaacaacagcaggaaaaagaatttctacaatgggctgcagataaaaaagaatacaatagcttactgaatcagtacaaggaactctatcagaagagaaaagacctgatactggccgcttcttatcttaatgaagccggtaaacgaggtgccgagatcgttggctgggcagccgatatttataaaaaactgaacgtttctgccgaaaagctagaggaagccaaagagcaactgaaagcaggagctgaggagttttataaggattatgatgcagctaccgatcagaaaatcctggtggagatgttgcggctttataatcagaacctgactccggactggattccggaagaagtgcaactggctaaccggaaaaaaggcatcgaagcttatgtacagacgcttttctctaaatctatacttgcagatcaggaaaatacgatggaactcatcgcgcaagctactccggatacctataaaaagttagagaaagatccggcttaccgcctatcgctttcgatgaatactttttatgcgcaaaatatatttcccgaattagctaaaatagaaaaagaaattacccgcttaaatcaaatttggcttgccggtttgatggaaatgcagccggataaaaccttttatgcagacgccaactctacactgagggtcgcttacggaaaagtacagggctattcgccatgtgatgcggtttattacaaacattatacgactttaaatgggattatggaaaaagataatcctgaaatctatgattataatgttccgcaacggttgagagagatttatcagaatcaagatttcggaaattatacccaaaacggagaaattccggtttgttttatagccaccaatcatactaccggtggaaattccggtagtccggttttaaatgccgaaggccacttgatcggtctgaacttcgaccgggcttgggatggcgtgatgtcggatatgcaatatgacgctgaaatatgccggaacatttcggtggatatccgctatgtcctttttatcatcgataaattagccggagccagtcatctgatcgacgagatggtcattgttaccgattaaaaaaaacgctcatctgtctaagctttggggcagatgagcgtttttttagttctgttttttattttactcttttctctacaacttcccagttgactatttgccagaaattttcaatgtattttgctcttgcattttgtgtgtcgaggtagtaagcatgctcccagacatccatggttaacaagggatatttaccgtttttcaatggattttcggcattcggagccggccaaatctctaatttatcatcttcctgtaccaaccatacccagcctgatccgaagagagccgttccggcttgggtgaatttttccttgaaatcctcgaaactgccgaaatttttttccagcagattgcttaatttgcctcggggagcctgtactccggaatggtgcagggcttcgaaataaaaataatgattaaaaacctgagctgcattattgaataaaccgccggacgctttcttgatgatttcatggatcggctgatcgtcgaattgagttccggccttcaatttgttggtattgtcgatataagcagccaaatgtttaccataatggaatttgaccgtcttttcgctgatgtaaggttccagactattttctgcgtagggcagaggttgaagggtaaacttattgtctttatctctggtgttaacttctttgcatgaaagcaaaccgcaatgacaagattctgtattcataataaataagatttgatagttgatattagtattaatacgtaacgataaaattcaatgtttctaaagtaatacaaaaaaaacggttgaaatactcattcaaccgttttttttgtatttgtaatcatctgttatgcataatccaactcatccaacataagtacaaagccgatttctattttacggatttgtgtcaaaatttctcccagctgattttttacctctttcataatcatggcttccatgccttccggcatctggctgaaatctatttccatcatatcgacgatcatagcggcaatctgattttccatcatggaataaatcacctgaaggtaaactttatcgaaatacatcgtcatctgttttccccggatatcgtacctgaaactgatagcaggaatattggccgctttatctcccatcagatgcgccatgacctctttgtctaaagtaatctgcaaataattacccgataactcgtaggttccggggagattgtacacgtcaccatctttcatccgggctgaaatgatcagctgcttattttctttaaactggattcccttgaaataggctcccattttttcggttgccatggcattgaacatagctttaaactctgtcacagcgattttcttttcataatacggtttcatgccgatacgaatggtatcgctggcatactcgaatgcaaaatggggtttttcgtatgccccgtatctattggccagatcgggtgtatccttatcgtcgtcgttacaggatatcgtgcaaaacgcaacaaagcttatcaggaataaagagattaatgttttcatattcaaagttttaataattaaattttaaaagtaacagaagcaccgaagcgggcaggggctccggattgtcccatatcgttatagatcggtaatttttgaccgacaggattgttcagcatataagtaaagaaagctttatccagtatgttcttcccccatatcctaaaatcggcgtatttacccgaaatagaaagatccagattccacaaaaaataaggtttttgtttcagcagattggcttcatcgaaatattgtgtcccgaatccagtcacagtcgttgaagcggcaaatgaacgaaaacaggaagttttaaccgctttctggtaaatgaaacccgtattgcctgtaaactcaggagccatgacgatccgattgccttcatgggatttatccagattgtggtaatattcagcatggctatatccggccgatagtatataagtgagattaggcaaaaattcccagcgcaaatccatttcacctcccagactatgagcatcaccggcattctttatgccaggtcccatcattcccatgacgaagatctgctggtctttccaatcgatgtagaacagagcagcattcagattgaatttataatcggaactgaaatatttcataccgatctcataattccaaagtttctcttcatcatagcggagatcgaccacctgtgagctcatctcattgacgataatgttgtagcccccggctttatagcctttagaaacactcaaatataaagacaggttatcgttccatctctgtaaaagtgaaaacttgggcaaccaggctttaaaacctttatcttccttcgaatcgtggtaacttgtatattgttgttgtccactgaacaacaaactatcccggtagttcaattccgatttttcgtaatcataccgcaaacctgccgtcagggacatacccggccatatttcctttagggttacctgaccgtatccggctattccccaggttaccgtattattatggtacttagcgttatccaaagccatgggcaataaataagccttgtcttccccaaaggtcgccagataacgattcgtcagatctttataaaaaccgaaagccccggcagtccaatcgacatgccggttttcattcgactggatattgaactcctgagtcagtaagttctgcctggattttttaccgttatcgaatacatccagataagtaaaatctgcatcgagcatctgtctgtcctgcgtccgggaataagaagtgaccgtattaaaagcaagtctttgccatttctttttcaaattcagataggaagaaagcaggtcgcgcttataagaagaaggtatattgtaatttaccgtatagcgatgtactttcaacgaatcgatcgcagcataggcataacctccgtcgaaggaatggttgaagtttataccgaagccaattttccagttatttttcgtaaatacattcccctgataacgaatattataggagtccgaaggattggatttccggtcttgttcatagtgatttttgaaatagccttcagacttattgtacgagaaagacaatttattatataaacgtttccagggaaggttcaggactaaattataattttgtgaccggtaactggaatatcctatttttacctgtgcagcgaatacatccgacgggggattggtgtttatattgatcaaaccgttgatactattacgcccgtacaaggtcgtttgaggtccgcgcagcacttcgatttgccggatgtcgtataaatcgaagacaaaggcgttcttatcgaatacgggtacaccgtctacataaagtccgacaggtggggtacccgaaacagtaccgataccgcggatatagaggggagttgataattttaaccctccttcctgcatataaaaattaggaactattccggaaatattccgtaaatccggattgttctctccgggaatagaacggggggtaatgaccgttaaagcggtcggaatatcacctggattcagttctctcttttcggcggtaacgactacttcttgtaattctcttactatattgtaggtggaatccgtcgataaaacggacatttgttgcgcagaaagtccactatatagtaatacaccaataatgcaaaaaataaaacgcatattgaattttttttaattaaaaaacgatgttggtaaaattcgggcagccgaataaataagtttaaacagttgcaggaggtgcccgtaaaagcaggtgggtaagggcaggagagaggtaaaaaacggattgaaataacggaagatccggcttgcagtcacagaatacctctgccttggaataagtttcttgttcttgtttttcaacctgataaaagtaagccttttcaaaagaagatgttccggtttgttgatacacaacagcttccgggagtattggatcgacttccggactacctgcagcgcctctgaaataaaaacacacgatcaaaaaggccggaaccagcaggtaaataaataggtgtgctgacattcccagaaaaaacatgttacaaaactacaaataaaatggaaggatagagtaaaaatagcagattaattttttcctctaaaaaacattgaaatttttgttttttataaaaaagttgtaattttgtattcgttataaatttgtaatgattacaatttaacaatgaatacaaatatcaatgcacgggattatttggaaaagtgtgggattaaaccttctttgcaacggatagctattgtagaatatctgatggaaaaccgtattcatcctactgccgacgatatatatcatgcattgtgtatccaagtacctactttgtctaaaacgacggtatacaatacgatgcgtctgtttgccgagcaaggagcggtacttccactggttatcgacgataaaaatgttcggttcgacatcgatacttcctgtcatgctcatttccagtgttgtgcgtgtaatcgggtgttcgatattccggttgaaaaaataggattattaaataccaaacagatcggggatttgtatgtcacggaaacccatctttattataaaggatattgtaaagcttgtagaaataaaacggcagggtagtaacccctttaaattatattaatcaataaaatcaagacgttatgaaaaagtttatctgtacggtatgtggttatgtttatgaaggtgaagaagctcctgaattctgtcctcagtgtaaagttccaagaagtaaattcaaagaattggttgaaaccgaaggtgctttaacttttgcagacgaacatgtgatcggtgtagctaaaggagtagatgctgaagttttagaaggactgaaagctcatttcactggagaatgtaccgaagtagggatgtatttggctatgagtcgtcaggcagaccgggaaggttatccggaagtggcggaagctttcaagcgttatgcctgggaagaagcagaacatgcagctaaattttgtgagttgctcggcgaatgtgtctgggataccgagaccaacctgaaaaaaagaatggaagctgaagccggtgcttgtgaagacaagaagagaatcgctacgctggctaaaaaactcaacctggatgctatccacgataccgttcatgaaatgtgtaaagacgaagcccgtcatggaaaagggtttgaaggtctgtacaacagatatttcaaaaaataatcccacatcccgcgggtaagctttacctgcgggatataaaactctgacgggccttgcatcgtatgatttagaaacattaaatcgaaataggatgaaaaggatcgttttattacgccacggagaaagtctgtggaatcaggaaaataaatttaccggctggacggatgtcgatttatctcccaaagggattcaagaagccatcaaagccggagatttactgaaagaaaagggatttgtattcgacaaagcctatacttcttatctgaaaagagccattaaaacacagaattatgtactcgaccgtttagaccaggattggattccggtagagaaaaactggcggctgaacgaaaaacattacggggctctgcaaggactcaataaaagtacgactgctgcccgatacggtgacgaacaagtattgatctggcggcgaagttatgatattccggccccggctttatcaccggaagatccacggaatccccgattcgatcccagatataaagatgtaccgccagccttattgcctgaaacagaatctttgaaagatactgtcgaacgtatcttaccttattggaaagaagaaatatttccttcattgacacatatcgatcaaattttggttactgcgcacggaaacagcttgagaggaatcattaaatacctgaaaaatatttccgatgaagatatcgtcggtttgaaccttcctacagccgtaccttatgtttttgatttcgacaatgaccttcgcctgatcaacgactattttctgggagatcccgaagaaattaagaaattgatggaagcagtagccaaacaaggacaaaaaaagtgaatcttttttgtttaaagttcctcaattccctggaccctatagacgtgtctctacggtcgctggtgtgaccgatcggaaataaagtgccagtcctgtaggatccaaggaatttataaattgaaaatctgtccatttctaatatttaagccagtttaatatgggaatccagatagacatcctgtatggcatgtaataattgaactccttcagccattggtttttggaaggcttttcggcctgaaatcaagcccataccgccggctcttttattgactacagcggtgatgacagcttcttttaagtcactttccccgtgggattccccgcccgaattgatcaggccgatacgtcccatataacaattagccacttgatagcggcatagatcgatcggatgttcggaggttaattcagtgtacatccgttgatcggatttagaataattcaaggcagaaaaaccaccgttgttctcgggaagtttctgttttatgatatctgcttctatactcacgcccagatgatttgcctgcccggtcagatcggctgcaacatgataatccttaccgaattttttgaatgccggattccgcagataacaccataaaatggtaaacatacctaattcatgcgcctgaccgaatattttcgcaatttcgaccagttgtctgcgactttccggtgaaccgaaataaatagtcgcaccgattccgatggctcccatatcccaggcttctttgacctgaccgaataaaatctggtcgtatgaattgggataactaagaagttcgttgtgattgatttttactacaaacggtattttatgggcatacttccgggcgacactccccaaaactccgaaagtagaaacaacggcattacatcctccttcaatagctagtttaacgatgttttccggatcgaaatacagcggattaggagcgaaagaagcccctgccgtgtgttcgaccccctgatctaccggcaaaatggatacatatccggtattggccaatcttccctgcatcaacaatctccgcatattattcagggtcgggagattccggtcgctattcatccaaaccttttcaataacatcaggccctggagtgtagagaagtgatttgtcgatcgttttacaagaatgtcctaaataatattcttgcttatcgccaagaatctgggcgattctgatagatttttccataaacgaaatattttagttcatattcggtttacggtattttttgcaggttgtttccggtcagcgggttttaattccggtagaagcatagatcagaaagatcgccggccgtttattgatatccggtttctgtttcttccaatcctgaatagacattgttctgatatattcattttcagtagtaatatcacaagctatcgaaagtaaagtttgaggatgtaatacttgaagcatttcttcaaaaagcttcagattccggtaaggggtttcgataaaaatctgggttcggttttcagcttgtgactggcgttcaaaattttttaaggctttatttctttcggggctctttacgggcagataaccgttaaatgaaaaatgctggccgttacagcccgaagcgattaaagccaacaaaatcgacgatggaccgaccagcggcacaacttgaatcgctttccgatgggctaaagcgaccaattctgctccgggatctgcgattcccggacaaccggcctctgaaataataccgacatcctctttctccaggtaaggcaaacaagcttcgactgctttgcgatccgaatgttcgtttaattccaaaaaagtcaattcctccaaaacaatcgatttatcgatctgtttcaagaaacgacgggtatttttgggattttcgctggcgaatatttttatatttttaatgcgggcgatcacttcggaaggtaacaccccatggatatttgaatctcccaacgtattgggaatcagaaataattttcccatattaaaattcagaaatcgatagacattttaggaattaaaatctgttcaaaggtaacaccaattttgtaatatatgttatctttgtggagacaatttaagactgtatgaaattaactattctgggaagtggaacatcacagggtattcccgtgattgcttgtgattgtccggtatgccgttcagccgatccacatgataaacggctgagagcttctgccatgctggatataaaaggaaagaaaattattatagatgcaggacccgatttccggtatcaaatgctccggagtcaggtgaaagacctgcgggcgatattactgacccatggccataaagaccatatcggtggcttggatgatgtgcgggctttcaattgggtgaaacaaggagctgtcgacgtatacggtaacgagggaacccgggaagttgtatacaaagatttctcttatgccttcgcagctttccgttatcccggtgtgcctgaaatcaactatcatgtgatcgacgaccggcctttttacatagatgatattcaagtggttcctattccggttttgcattataaaatgcccgtactgggatttcggatcggtaattttgcttatatcaccgatgcaaaaacaatcccggcctcttccatggaacggctgaagggggtagaatatctggtaataaatgcacttcgcaaggaattgcatatgtctcacttcaatttagaagaagcacttaccatgatagcccgtatccagcctaaaagtgcttttttgacccatatcggtcatcaaatgggactttcggcagaggtatcgaaagagttgcctgttcaggtaaaattagcatacgataccctggaaattgaaattcctgatcgggagattttcgaaaatcgatcgtaaaaagaagaggtaaatttcttttataatgtctgaatttattacatttgtgtgatttttacagaattagggaaaaacagtgtggttttcccttttatttctttgattaacagtaatttaaatatagatggaaaacggcggagaaaaaattattaaaatcaacattgaagaggaaatgaaatcatcttacattgactattcaatgtcggtgattgtttcgcgggctttaccagatgtacgtgatggtctgaaacccgttcatagacgagtcttgttcggtatggatgaattgggattgacctcgggtaaaccatacaagaagtcagctagaattgtaggagaggtgttgggtaagtatcatcctcacggcgatagatccgtgtacatggctatggtccggatggcacaggaatggtcattgcgctatccgttggtggacggtcagggaaacttcggctcggtagacggggatagtcctgctgcaatgcgttatacggaagcacgtatggcgaaaattactgaagatatgttggtcgatatcgacaaggataccgtcgatatgatggataacttcgacggttcgttgaaagaaccgacagttcttccgacccgtataccttatttattagtgaacggagcctcggggattgccgtcggtatggctaccaatatgccgcctcacaacatcaaagacgctatagatgctatttgtgcttatatcgataataacgatatcgacatcgaagagctgatcaaaattattaaagctccggattttcctaccggtggaacgatctacggatacagtggagtacgtgaatcctatctgaccgggaggggacgtgtcgtcattcgtccgaaaacttcggtagaggtgatgccgaacggtagggaaaagttgatcgttcacgaaatcccctatatggtcaacaaagccgagttgatttcccggattgccgacctgatcaacgaaaagaaaatcgacggtatctcgaatatcaatgacgaatccgaccgggaaggaatgcgtatcgttatcgatatcaagaaagatgcgatttcgaatgtggtattgaatactttattgaagcataccgccctccagtcttctttcggagtaaataacgtcgctttggttcacggacgtccgagattacttaatctgaaagatatcatccgttacttcgtagaacaccggcacgatgtggtcgttcgtcgtactcaattcgaattgagaaaagcggaagaacgggcacatatcctggaaggtctgatcattgcttccgaccacatcgatgaagtgattcgtttgatccgggcttcaaaaacgcctcaggacgctcagactgccttgatggatgcgttcagtctgacagacaaacaagcagcagcaatcgtcgctatgcgtctggggcaattgacagggctggaacaagataaattaagagccgaatatgaagacatcgaaaaactgatcgctcatttgaacgacgttctggcccatgtcgaactgagaatggagattattaagaacgagttgttggctgtaaaagcacagtatggggacgaccgccggacagatatcgtttatgcttccgaagaattcaatccggaagatttttatgcagatgaagaaatggtgatcacgatttctcatatgggttatattaaacgtactccgttgtccgaatataaagtgcagaaccggggaggagtcggatcgaaaggttcggctacacgggatgaagacttcctggaacatatgattatggccaccatgcacaataccatgcttttctttacagaaaagggaaaatgtttctggctgaaagtatacgaaatacccgaaggtacgaaacaatccaaaggacgggcaatccagaatctattgaatatagaaccggacgataaagtgaaagcttatatcaatctgctggatttaaaagattatgactatatcaacagcaattatatcgtattgtgtaccaaaaaaggtatcattaagaaaacaacactggaggcttattcacgtccccgtcagaatggagtgaatgccattaccatcaaagagggcgaccagttgctggaagctaagctgaccaatggagagaatgacatcatgattgccgtaaaatccggtaaagccattcgttttcccgagtctaaggtgcggccgatgggacgtaccgcttcgggagtcagaggaatctggatggacgacgacgacgaagcgatcggtatggtttgtgtcgagcctaataatgccaatattctggttgtatccgaaaatggcttcggcaaacgctcggcgatcgaagattatcggatcaccaatcggggcggtaaaggggtcaagactatcaatatgactgaaaaaacaggtaatctgattgcgttgatcgatgtaacggatgaagataacctgatgattatcaatcgctcgggattgactatccggcttgaagtttcttctttgcgagtgatgggacggaatacccagggagtgaaactgatcaacttaagaaatgaggattcgattgctgccgtagcgaaagtttctgccgcgaaagaggaagagaatagtgaggtagttgccgaggaagaaaggggagaagcagagccgaacggacagtctgaagaaaatgtgtaaccaagatcacgtaaaatacgtggaatagaaacataaattaatgtaaaatttatacttatgagaaaattatcctttattatgattttacttttttgtgcgacttttacgtatgcacaaaaaggaaaagtaactcaggcaatcagttatctgacttcgggtaaattggatcaggccaaaaaattaatcgatgaagcgatgggacatgaatcctgtgtcgcctgggataaggcttatttcactaaaggccagatttatcaggccctatatgaaagtcctgtcgcagattacaaaaaattagattccgaagctgtagaaaaagcctgggaagcttatcaaaaagtaatcgaattggatgtgaagaaaaaatatcccaaaaagctggcaattcaatatcggaatttagcgatcgatttcaccaacagagctgctgaactttacaatgcaaaagagtttaaaaaggccttggcgtctttcaaaagagtacttgaaataaaaagttcgccgatactgacagcaaacggagaagtttccatcgacaccgccgttatttataatgccggtctatgtgctcagcaagccgaagaatatgccgatgctgaaaaattcctgaaagaatctataaaattgaattacgaaccggctcagagttatgcgatgttgagtaatgttttgaaacaacaaggcaaaaccgatgaagcactggaatatctgcacaaaggatacgaacaatatcccgataatgcgtatatgttagtggaattgatcaatcattatttattggggggtgaacctgaaaaagctgaagtttatctggatgcggctatcaaacaagatccgaaaaatgcatctttttacagagctaaaggtacattatacgaaaaaaccgagcggccggcacaagcagaggaaatgtatgtaaaagcgttggaattggatccgaaagactttttggctcaatacaatctgggaaatattaaattgacagaagcgatcaatttccataaaaaagttcaggatatagtcgatgtcaacgaatataataaagaattggaaaaagtttacatcgcttatgaatctgtcattccgtattttgaaaaagcattggaactcagtccggatgaaaaaaataccctggtaactttgagagaactttatttcaaactgagaaatcaaaaacctgaatatcagcagagatatgatgagataaaacaaaaactcgaagcacagtaaaaataaaggggattttctactcccctttattttaaaatgttattattaacataatataaattataggacaaatattccagacggagtttaccccaattcttattatagattttaaatatttgctcaaaaagatgtcaacaaaaattattatctttgtccacattgttttaacacacatcatactatgcgggataaagtcgttattattactggtgcgtcgtccggaattggtaaagctttagcatacgaattggcacatcaaggagctaaagttgtcttagcagcaagaaatattgaggaattacttcatatcgaacaagatttaagacagcaaggagctgaggtgttgtcggtacgtaccgatgtgacgaaagaattggcttgtaaagaattgatcgaacaagcttatgcccgtttcggacggatcgatgctttgatcaacaatgccggaatttctatgcgcgctttgttggaagatctggaaccggcagtactccgcaaagtaatggatgtcaatttctggggaaccgtatattgttcgaaatatgccttaccttatttattggaatccaaaggaagtttggtcggagtgatttctattgcaggatttataggtctgccgggacgtacaggctatgcggccagtaaatttgccgttcgtggatttttgaataccgtccggatcgaaaatatgaaaaaaggacttcatgtgatggtggcagcccccggttttacagcttccaacatacggaaaactgctttgaatgccaatggacggcaacaaggagaaagtccccggaacgaaaacaaaatgatgactgccgagaaatgtgctgcaatcatcgtgaaaggaatcagaaaaagaaaaagagaaattataatgacttttgtagaaggtaaattagccgtattcttaagtaaatggttgccgggtttagtggatcggctcagttattcactgatggcaaaagaaccggattctccttttaaataagtgtgttatgagaaatatatttcttttgtttctgtttatatgtataaccggaagtggttgggcccagttgttatatccggaagtcatggagccccggacaccactgaacggccctgtggtaaataaactgacggggctctccttccctccttttctctacaaagtaagacaggaaaaccggactattgaaaacccgggagtccggtatgccatacaaaatctgaagaaggaacgttatccggaaccacaggtcaatgaagccatcaataccctgattcgctatgctgaagatgaaagattaaagcatgtggtggagtatctgaaaagatatgcccaaacgatgggaaaaaaggaacaagccctggaaacactcgaacaaaagattacctatgatagtatcgaattttataaaaatactgagtatttactgaccggagattttgaagaatatatcaataccgatttacagacctttgtcaactatattcatcaggattccaattatatatggcttagggatgccagccgggattctgtcctgctggaaatcatgagtgtggccgataactctgttcgcttttgggtcaataacgggcggatgcaatatcatcgtttttgggcttccaataaaatatgcgacacgatcggcacctggattcaggtgatgccacaaggtaaccggctgaaaatctatgttgacgaagatgtataccagactcccgccatagagaaaaaacatgctgaaaccaatgaagccggcatttccaatcgcttcgacgatgaatatttcaagctcaatccgatgcaggtcgggcagttacatcggagatactggacctattattccgaagtcgagttggccatgagtcagggtaaactggccaactggaccagtgggggggaaaattccttatccctgttgagtaatatccgttatttctggaattacaaccggaataataccagctgggaaaactgggtacactatcgcttcggtttcatgaaaaatggggatgaagatatccggaagaatgaagatcgctttgagttgaactcgaaattgggacaaagggcctttaaacattggtattataccgcccagttcaatgtcattacccagcttttcaactcctacgagtatccgcaggatcaggacaagaaactggttgccaattttatgagcccgggagatttcaccctgtcattgggtcttgattttaagcctaacgatcgtttttcgttgtttatctcccctattgccggtaaatggaattttgtccgggatacggcgaaaatcgacgtcggacgttatggagtggaacaaggtaaacgggccagaagggaggccggtgcaagaatagacctgaggagcacgcaaaacaatatctttaaaatcatgaacatcaggaacgaattgacctggtttatgagttatgaaaaaaaagaccattatctgaattttgaatccgataacgaagaaaaaaagaaaattccttttacagtaaactggaaactcaatatagactttaatatcaactatttcatgagggcttcgatttatacggaaactatttataatgagaacaattccaaaaagttacaattcaaggaaaatttgaatctgggtgtaaatttcagattctgacataggaatatttaccttaactattttatcgtcatgatcaattttgaaaatagcgacatcagtaatattgtgattcatcatgtaggcaataaattcgaaggcggtgggctcactttgtccgacggttgtttcctacccgaagatcctgatgtggtaaatttattgaaaagttatttcttgtccgccttcaagaaggatgcttattacaactttttgccctatgaagaagagttgatgaataacccggtctatgcgtcggtttcccagatcttcgacaatgactctgaattttatcagcaatctgtccaaatagccgaacatctgttcgaacaatccaacaacccgaatatcaaatccggagaattatatatcgttcattttcgaaattgtaatgttgaagaaggtgtctgtgatgctgtcggcattttcaaatcagaaaccaaagacacttttctgaaaatagtgatgaatcagaatacttaccaactggtgggagaatcggggatcaatatcaaaaaactggacaaggcttgcatcgtcttcaatgtcaaccgggacaatggatacaaagtttgtatcctggataaaacgaataccaaagaggcgatctactggacaaccgatttcctaggactggaaccggctgaggccagttatttccagacctctaattatctgaacctgtgtaaggattttgtaaaagatatttacaatcaggagaatgatgtaccacgggcagaccaaatagacatgctcaaccgatcgattaatttctttaaggatgcggacgtcttttcggaagaacgtttcaaacaagaagtcgtacaagaacccgaagtaatcaatgctttcgagaacttcaaatgccagtacgaaacggataataatgtcgaactcaccgaccagttcgccatatcggattttgctgtgaaggatgagaaaaaatattttaaacatgtccttaaattagacaagaattttcacgtctatattcacggagaaaaaaaatatatccgcaaaggttacgatcctgaccgagatatgaattattacgtactctattttcggaatgaagagtaaaaaatgaaaaatgtcaacggatgaaaaagacaggaataatcgtcggcttgattgttttactcggcttgggaggtattgcaggaggttattattactttgtgcagcgtcctaacatcactgtcggcgatgatgggattattttcattcagccgggagattcctttgaaacggtcatgacaacactgatcagtagcggatatgtaaaaaacgaatacacccttcgcaagcttgcagaactgaaaaaatatccttctgcagtaaaaaccggccggtatcgcctggtcgacaagatgaacaataatcaattgatcaatatgttacgtgccggtcgtcaggaaccggttcacctgacttttaacaatatccgtactttagaggactttgctgcgattttatcccgtcagttgggtatcgattcgaccgaatttctgcaattggcccgtaacgccgaatatgtaaagaaattaagttttacgccggaaaatttcatcggtatgtttatccctaacacctaccaggtgtattggcatacgccggttgaagattttattcagcggatgtataaagaataccggaaattctggacagaagagcggctagtgaaagcccggaaagccgacctctctcctatggatattctgatattggcctcgattgtagaagaagagaccaatattgccgacgaataccctgtcatcgcaggggtttacatcaatcgcttgaataaaggctggaagttagaagcttgtccgaccctgaaatttgcctggggagatttctccatcagacgggtgctggataaacatatggaaatagactctccttacaatacctataaaaatacaggccttcctcccggaccggtacgtatgccctctatccgggtaatcgatgcggtattgaattatcagcaccacgattatatgtttttctgtgccaaaagtgatttttccggtagtcactatttttcccgtaccctgcgggaacacaaccggcatgccaacgaatatcaccgtgccctgaatataaaaagaatttattaaaagaggcagttatatacatatttaccatcggtcgcctcagtgatcctaaaaaaagtacccgcagggaacatcgattttataaactttacggactttataaactttataactcaaaagccccctgtttgtttggcagtttcagttgaaaatactacctttgcggccgataaattatttttatactaataatcaaatcattatgttgaatcattacgagaccgttttcattacaactcccgttttatctgaacaacagataaaggaagcggtagaaaaattcaagaataccatcaccgataatggtggtacgattgaacatgaggaagcttggggacttcgcaagctggcttatccgatccagaaaaagacgaccggattctatcatttgttgcagtttgaagcagaaggtgcactggttgacaaactggaaaccgcttacagacgtgacgagagagttattcgttttttaacgtttagattagacaagtatgcttatgagtatactttaaaaagaagaagtaaatacgcagctaaacaagaggagaaataagctatggcacagaacgaaagtgaaatcagatatctgaccccc

SEQ ID NO: 5859 - DNA, 958 bp, Unknown
  gut microbiota DNA sequence
tactgccgtttcagaaaagcaagaatcaaattcatcgattacaaagatcctgaatttttaaagaaatttttgaacgaacaaggtaaaatccttcccagaagaattaccggtacttctgtgaaattccagagaaaagttgcaactgctgtaaaaagagcaagacaccttgctttgttgccctacgtaaccgatttgatgaaataattaaaaggaggacacgaaatgcagattatattattgacagatatcgcaaatctgggacataaagacgatgtgatcaacgtaaaacccggatatggccgtaactacctgattcctcagggatatgccattttagctaccgaagctgcaaagaaaatcgttgcagaaaataccaaacaacgggcacataaggaagctaaattgaaagcagaagctgaagaattggctgcaaaactggctgaattgaaactgactgtaggtgctaaaaccagcagtaccggtaagattttcggttccgtaaacaatatcatgatttcagaagctttattggctcagggattcgatatcgaccggaagaaaatcatgctgaaagaaattaaagaagtaggaacttataccgctgtcatcaaacttcatcgtgaagtgaaagtcgatgttcagttcgaagtagtttctgaataattaaccaaagtcataaacggactataaacgtatttccaaacatattccaaacgcttaaaagcacccttcgccgggtgcttttatttttcgcaacattttcattatctttgtatgctaaatgtgaaagataatatgaataaaccatatattgatttgaagggtgtacgggtgcacaatctgaaaaatatcgatctgaaaatcgaactcaataaactgattgtcatcacgggagtatcaggtagcggcaaatcttctttggctttcgacacgctatatgccgaaggtcagcgccggt

SEQ ID NO: 5860 - DNA, 805 bp, Unknown
  gut microbiota DNA sequence
actcagatatacacaggattatcagaaacgcctttccataatcagaaaggttcttgtacaggagaaggaactgtttgaaggcaggaaggtcaatgaccgcatcgtcagcatcgaccgtcattacgtacgtcctatcgtaagaggcaaggaaacaaagtctgttgaattcggtgcaaaggttaacaacatacagatagacggtatatcgtttatcgaacacctctcgttcaagtcattcaatgagggaatacgactgaaggactgtatccgtatgcaacagaaactcatgaatgtcagggttagatgtgcggctggagattccatatatgccaataatgcaaatagaaggttctgtacaaaatatggtatatccacttcctttgtacgcaagggaagggcggcaaaggatgaacccttgagaaaggttctcagaagtgaactttcaaagcagagagctaccaggcttgaaggaagcttcggtactcaaaagcaacactactcactcgcaagaataaaggccaggaacaggaagactgaaatcctttggattttcttcggaatacatacggcaaatgccgtactgatgatagacaaggtcaccagcagaacagctaaagcggcatgagatgaatttacagacaggagcagaagagggcatcagacttcttccggaacatcatgtccaacagataggattatatgaaaaaacacagaaaaagggcaataataatggcatataaagtgattatactctatcgactttatatgccatcttacgttttagggacatttactgaatatccct

SEQ ID NO: 5861 - DNA, 36202 bp, Unknown
  gut microbiota DNA sequence
agtgggaaacctgtaattgccggatgatgggtagctatgatcatatatgggcaaaaagtgaaatgcggggggctgtttccttggctatgcatctgagacaaacggctatctgtgcggtgtatattgccggatggatgggtttggatccgaggattgcgcggttgggggcattattgcacgatattgggaaagcaagcatcttgtttcaaaactttctacggcaaaatgcaacctatccttttcctttcagattccggcatgagattgcctctttgtttttcctttcgctggtggagaaagcagaatgtccgtttgtgctggagatggttattgcccatcataaatcgctttccggggataagcggaatttgggcttattggatatggaagattgggaagacaataattttgagctacatgcccggggattcgaacagtggagtgaagatgctttgggtattttgcaggagttaggtcttgtcgttcataagatcgggcttgaagaagccaggagaaattatgaagaggcggttgcttattgccggaaacggaagttgggatgttctgaatggaaagggcttatgctggcagccgactggctgggttcggcttatggtgaagacgtggaagccgttttacccagactgtttgtgatccccgatttatcgtgctatgataaccctgatccactttatccgttgtctttaagggatgcgcgggatggacgccggcatacgatggttgtagcatccaccggatcaggaaagacctctttccttttcagacgttgcaggggaagggtattttatattttgcctttccaggcttccatcaatgcgatgtatgagcgggtaaggcaggatttgcaggggacagatgcttttgtcactttgttgcatgctgtgtcttgtataaaatgggcggggcaggaaccggaagaaagaattctgcaacggatgaccggagcttctgtgaaggtaatgactcctcatcagatcgcgtctgttgtattcggaggaaaggggtatgaagcgatggtcatcgatctgaaaggttgtgatgtcatattggatgaaatacatacttattcggacgtgatgcaggctatcgtactgaaactggtggaagtgctggtacatttgggatgccgggtgcatatcgggacagcaacaatgcctacggtattatatcagaaaattatccaacttttaggtggggaaaaggaagtgtatgaggtaagattgtccccggaggaactggatagttttgatcgtcatgtaatttataaggtaaagagctttgaagaaacgggggaggcgataaacgaagccattgcaaaaggtcggaaggttttgattgtatgcaatcaggtgaaaagggctcaggcattgtatggaaggattgccgaaaaatatgcaggagtgagtaaaatgctgatacatggccggtttaaacgcgggtgcagggcattgttggaagcaaaattattgaaggagatgaacgttggcaaagaagcctgtattgtggtgtctacccaggttgtagaagtcagtctcgacatcaattttgacctgatggttacggaatgtgcggcactggatgcactgcttcagcgcttgggaagaatcaaccggttaagggttgaaccggcttgcaggacttataaaccgatttatgtcatacaaccgctaatagggaagaaggacgtttttccatatgatgcggacattctgaaaaagagttatgccgtattgccggatggaaaattgttgaaagaaagacagatacaggagttgttggatgaagtttatcccccaaatggttgtcattttgtagatatagaaatgaatgttgcattccgggaaggagcgtggaagatttttgagctggatcattattcgaaatcggtattgctggaaaggctggagatcgattctgttgcttgtatatgtgaatctgattgcatggtttatgaacagggaaactctgagaaacggttggaactggaaatcccggtcagttttcggagtatccgttcaaaaggattgcggcaattagcagttggggtacatccgtttgtgattcccgaccgggcctattcggaagaattgggattgttgagtgacagaatgaggagcgggtacaggaaataaactgtaatttaaagagattggtttgtcggctgatttatttgtttatacgaaatgtgaaattaatcaggaaggattattaaaatgatagctgcgactataggtagaaaatttcttctggcatataaccggaagtttggaactcattacgatgcaaaaactttttttacggaacagtatttccctttgtttttcgatcatgaaaagtatatgcaatgggtgaccaattcaccttttgtacaggggataaagaaaggaaaatgtcttacggctgttgaaagacgggaaaagttaaggattttgcaggaaaagattgaaagggatgaggcagatgccagtattgctatcggtttcccctctttggattcgactgcgactacttccggacagatcacgaatctgaaattacccgtatcccgcgaagatgtttatttgtcctggattggaagtggttttggggtgggagttcagggaggcttgtctattctttttgagcaggaacagattttaatggccctctttgaagggtggcggatttaccgggaatatctggaacgaatgcagggattaaggggaaaccagatcaatacctggaacggacagtggttggctcattattttagtgatcattttatagaggatgaacctttgatcggtttccagccttttgctgcaaaagaggacggttatgaagtggttacccggagctggaccgatgttctgatggcaattgcacgggagatcaaggatgtacggatgatggggtatgtgtatagtttgggacaaaccaacatcacggtcggttttattccttttgtgttgactgaaatccgaaggaccgtggagctttatatcaaattattcggtatgaggaatgcaaaaaaagcagagcatttgttcggtacagcctatggatttttacgttcatgccagatggggatgattggagtgtcggcattagaacccaaaggcctgaaagaatatatgatgaaaggaaagattccggtatatgacgctgaaaatgaagaaaaacgaattaatttttatacttacataatttggatattagctatgttgaataatgaagatttgtgggaaaaatcccgggaaattgctcaaatgttacatacctatgtacttggggataaaaaaagtaacatgacaaggaggaatcaagtgaataagatattggaaactaattcccgaatgatttttctgaatgaattgcagcaaattattcctcaaattcctgatataaaatttgcagaggatatcggaaaactcattcattcgatgccagtggataatattccttattttttgactttagtccggtttaattatgcgatagtttgtaatcaataaaattgtaatccaatgaaaccatacatttacatcagaacactgaaacatgcagaacatactgtattctgtgtgcaggaaggacagaaagcctattttgatcctttatttaaccggatggtgccttattcaagcgggcagcaaataaaacgttgtatcctgacaactttgaccgatgatctgaacgtaccgatggctccaattacttttaattataatataacgaaaaaagatggtctggaaaataaagaaacctgggctccctgtgatcccaggtatatcgaccagttgattggaggctggatgcgggctggaaaggatatggttgctttaaaacgccggagtcctttgtcggtatctgcgatgcgtcccattcatcctttattgggaggcctcgaacgggataaagagaatatcacctttgaccgtagtgaccggcctgagtggcatccggttaatgtacggatagagggtagtgaccgtttaatgacaaaggaagaaatagaggcatatttgcagaataataaccgtactttaaccaaacggatttggattcctgacaatacccgggcaacaggtttgtttgttgctgacatggctattgatttgagggctttattttgcgttaccaccaatcagcatgaaccggaattgtccccggagatgattactgccctggaagctgaagggtgggtgaaatcgaaaaatgttttcggagaatgtctggtcatgccgaaggctgaaagagaaaagatcattcctgtattggcaaatgctttgatcaattggcggattacttccaatcaggcccgtacttttagtctgatggagacattagcgcttgctgtaagtgataatgcaaaccatattgccggggccatccggaccaaactgattgaagaaggcgacaagcccaaagcgaaattaatcattgacgagacagcaggggccgaagtgtttgtgacgttgccctgtgcgagttatgtggttacggtgaatgaaagggcaactgctttggaagaagcggagaagaagctgacggatatgatgatggcgtttgattatgagaatcaataaggcgcatagaaacagttcctgccaggtgattttggttacctgccaggtgattttagttgcctggcaggggattaatgagaactggtagaattgaaataagccgcggctaacaggttttcctcctaagccatattttaaattgaacttgatagaattgaaattgtagttggtcatgtaccccccttgtcaagcgtttttttaataggactttgggaatatctatttaaaaaagaaatccagcattttcctgaaaaatctctgtttgccgggaacggcttgatcggcatccgggctttcgtctgtaaattgctgaagtaacttttgcagccattcataagtctgctgtgcagtccatacatctcctgtttcgatggcttttctgcttccggtatcgggtatttcccataaaatgcataattgatcatcggggaataaaaatgaatcttcgtttttgatagaattagctggtaaaagacggaactttatattgttttgtgctgaaatggctaaaagatgatgatcattggaattgaaacaatattctgatgttgttccttgctctgtatcgaatttcctggcgtattggattaacttacgccaattctcccggcttgtttccaataacatataatcattggtatctttgtaaaaagaaaaattttctgccccgatatacttttggaatttgctgtattcttccgaatacacttttaaataatcctgaagaatatcgagcaattcttcataaactgcattttctaaatggactgcattgttacctagtactacgaatgtcttcgtattctgataggaatgtccccgaagtataatatcattcagagaatatgtttccagtttgtttatgagttgaagaatgctcttatgatccagggtgatcatgattgtccggttacaaaaagaaataacacaacttccctcttccttcaatttcgagggcaggaaaccattaagtgctatattttctgttgaccgccagaaatgattatgtattgaaagcgagtttgtaactttcctgcttgccttgtatacctccggaggtaataaattgaattccacaagttgagcttcagcaaatactttcaattttgaaagttcaaattgttttttcaagattttatattctcgttcgattttccattttccacgttgtgcatattccaaaaaaaatcgttcggcaggttcactgaacggatgtcggtttttctgactgttattatgcaaagatttggttggtaaaatattttccagactatcaatagtgaaatcgtctgctaaatgatatttccgtattttttcctgaagtacttcaggggcagtattctgtggtataatatgatcaagatgcatggatgagtaatcataaagaaatttacctgtgtatgcacatcgatatttgtatgctttataaatagcatatcgcagaaggggatcgttttctttatataatatggcttctgctgtcattttttgataaggtattatatcggttttcattacaacgggaatggctgttttataattatttttaaatagcttattttcagtttacctttaattgattgctgaatagaaagcgcaactatcggattcgcatttaccgatgcaaaaataatgtaatttctgctttaagataaaacttcgtttatattggtttataatcttagtgaattgtgataagaaaacattgtattgactaagatgaggtatgaaagctgtatatctgatgaggattgaaaactgaaaactagctgtgaatgcgaaaagacgcaaagtttcatgtctgggagctattggtcggaatatacggaaactgatggtcgtttgaaatgcagtctttccgagggggaaggcagcatcatccgttccgggaggtctttttttgaaggatgggcagcagattgtaaagtgttttgcgggtgatgatccggcggttgaggaaagtgacgatgtagccggtgatacaggcggcgatgagcgatccttcgcgtatgccctcgatgcgttggctgaggaggaaggagaggactgcggccagggtgactaaagtgacgtcgaagcagactttgaattttccgaattcccggttgtaacgctgggaagcatattttacgaaggcttcggcactcatcatagccacccggggcttgatttcgagcacgacgccgatggattgcacgacacatccggtcaggagcagggcgaccgacagtccataactgccaggatgtaactgtccggtgaacatcatattaaagtcgatgaaggctgcaaacaggaaagagaaaggaatctgcagcaggatttcgaggatgtcccggcggctgtagcggtcccggatgagccagaattgcccggcgatcagcagcaggttgaaaagaaaggtccacgtgcccagcgaaagcgcactgttgatgctgaggacatagtttatactggaaatgggggtagtccccagtgcagaacgtacgatcagcacaatacccagggacaggaaatacagcccgaggatgaagaccgggtatctttttagaatagtctttagttccatattgcttctctgaaaaaacagtgcaaagatcgcaattttttcttttgtatgttatgtctgtttattacagcccgattgttttttagtccggccaatggcgatgtccgggacttttttccggtaaatacggatatactttaaaatgaaaacttcatcttcttaatgtttccgggcgatgatacagagtgggggatacttttgttgttattgtgggttttaaatagtaaatttacagacgataatttttattttttgtaggatgaaatttaatttgaacgataggccgggatttttcccgatgttgatgtatggactgcaatggtggattgtttctattccttgtgtggtgattatcgggattattgtagcccgtttgcattacacggatcaggtcgaacagattttttatatgcagaagctgttcggaatcatgggattggctatgattgtccagatgttgtggggacatcggctgcctttagtcatcggaccggcttcggtgttactgatcgggattctttcgacggtttcgataggggtcgaaggtatctatagttcgctgatgatcggaggtggaatactcactttgctggctttttccggtttattgtcccgtttacaagccgtatttactccccggatcattgttgtgattctgtgtctgattgcttttactctgtccccggtgatcctccgtttgatttttgcaggaaattcgtctgtcttgttccatttgttttttgctttgttattggctttggcaatgattttggccaataaattattgaaaggaatttggaaatccattgtggttttgggtgggattctggttggaagtatggtgtattatagtgtgatgggattccccgaaacaggagggatacaagccgggcatgaggggtatttcggattatggccatggaaattcgatttgggagcggtattgtctttctttttttgttttattgcgctgattgtaaacgaattgggttctattcaggccgtaggccggatgatcggtgccgatcatatggaacgccgtactacccgcggtgtgggcatcacgggtttggctaatgtggtatcgggggcattagggattgtcggaccggtagattattctatgagtccggggattatcgctgcaacaggttgtgcttcccgtttcccgctgataccggccggtatcggattggttgtctgtgcattttttccgggttttatcgaatgtctgaatgccattcccggagtggttatgggggcggttttgctttatctgatggcttcgcagttgtcggccggtatgcaaatgatgatccgggaaaaggcggtcgacggtttcgacggagggcttgtggtcgggttttcattgatggtcgctttattattatcttttgctcccgacgaagcattgaatagtattcctgctctgatccggcctatcgtgggaaatggatttgtcatgggggtcattacggtattgatattggaacacctgatattccggtcgggaaaaaaagctaagaaggaatagacaaccagagatgccgtttcagatcaacacgaccattcggttgaaaagtgattccttcggcggcaagtaagcttttttgtccgggccagtgaggagctgtccgtccttggctgttgaccacccgatgacaaggtagggccgctgtgcccggatggtgtgacaggattttacccacccaacgggaataatttgaaaatcccgccagacgggcaatctgaccataggtcagtaccttgccggcgggaatttgtcggataatatcacagacttcaacactgaattgatgaagccggaattcgttgttatttaacccagacattcagaatttctccgatatacattttgtgtaattgcgttccccatttttctttggcctgggaatcgtgtaatgcttcagggatcagcgattgagaaaccattttacggcattcgataatcatccaggcttctgagaatgccttactgcccgaaggggttgtgataggtgtcaggccggcttctttcactttgtctttgtctcttccactgtttgtaccgcaatagttgaggatgtcccgatacgtttcggtgtagaaactcaaggtgtaagtgtcgttgttttccatcagctgataggtgtaccgcgtcgggttgataaagcagaaagcaaccggtttgttgtacatatgtcccaggccgccccagctggcagtcatcatattgtattgggcgtcattaccggctgtgatcagcatccagttttccgacaacattttatagatatttccggggattttatcgggactgatctgacggtaaccttccaggttggccggcgtaatggtattgtccggtgcttgtacggtagtcgaagtgacaggaacccggggtacggccggtgtttgggtggcgacgggagcacttacctgtgtcgctccgacagccgctgctgcatcggcaaataatttatctaccagatcgatggtatggatccggaatttcccggtagacttgatcagtttagtctgcgttttattcagtgtatgctgatcggtaatctgctcttcggccggaattatttcctgaccggcagtgccccggttatactgataacggatagcggtaacttttaattcgcatttccccggtttgcaggtgatgaacatttggtaattgattacagcccggtcgagcgatagagctttattggtgaataccaggtattcctgtcccatacaggcgatttgtcctttatcctggtcggagtaaagtatccggctttgcagctcttcggtggttataaaacgggtagtcgcccattgtaacaaagtggcgaatatgtcattttgagaacgtcccgggaggttcagttcttcggtgaaaacaactctgtcatcgacaacaggcacagcaccggctaaatattttttgtcgacctgtgcaaaaagtgtcacagggatcaaaagaaataatagaaataaatgtttcatgatgtgtttttttgtgatttgaacaaagataatggctgattttggatttttgataagaatgagtgtaaaaatatacaaaacaactgtaaaatatctcagtagttcggagattccggccataaagaaaggtcgagcgctccttcgatttgcagcaaaccgatttttatgttcagtcctccggtatatccggtcagcttaccgctacttccgatcacccggtggcagggaatcaggattggcaggggattacggctgttggccatacctaccgcccggctggcttttatatctccgcttctgcgtgccagttcaccataggtgatcgtggtgccataaggaatctcctgtaataatttccagattttgagttgaaaaggtgttccttccggcgcaataggaaggtcgaattgtttttgttcccgggcaaaataggcggttagctgtcggtgggcctcttttaatagaggggtttcacttatttcggtctctccgggaagcaaggccatccggtcgccgagccataggcgggtaagtaatccgttttgctcttccagggcgtatgtgcctaatggtccgtcgtatttgtaaattgctttcatctttttttctttaggtaggtgaacaaagatagtattaaaatcattttttgcttcttatcggctataaatttatgtttggatattatatacggtttaccctaactgtacgtttataagtgtaaatatgtatataactgcctatgtttttattcccggtcggtgtgtttcaggggcatttgctgagagaggcggaaacaactcacgacagcggctattaaggcgaatatcgctccggcccacaggcacaccgtagttcctttgtcgtgcatagcgaaactgaacaatagggccacaagggttgctcccagggtttgccctaaaagccgggccgtaccgatcatcccgcttgcccctccactgcgctggatgggggcggaggccatgattgtactgttattgggagtctgaaaaagtccgaaaccgattccacaaacgatcatacgccagatgatcgccccatcggtaggaatagccggcaatacagtcagcaggaaaaggccggtagcaaaaatcagcatcccgatacttcctaaaattccggcatgtatgcgttctaccagataccctgccagaggagccgtgaacaaagtcgctacgggccagggagtcagcaataacccggtagctacctctgtgcgtcctaacgtattttgtaagaagaacgggagagataccaaagccagcatctgggcagtgaacgagcaaatcgatgtacataccgatagggaaaaaataggtattttcaacaaatctaccggtaataacggaaagtcctggtgtaattgacggcggatataataataaccgacgataaataacaagaagatttgggctgcaagtaaataggcattttcatgatgtgcgaatccttccatcgagtaaatgagcagtccgaaagtaagggcattggcgagggcactggttttatcgaatttccggttttgcttcttctcgcggtgggggagatagatcaggcccataatcaaagccagcaggccgagggggatattgatcgcaaaaagccattgccagctacctaacgaaaggatgatactcgcaacagaagggcctgcgacagccgatacggcaacgaccatcgcactgatccccaagccgcgtcctaagtatttccggggataaatagtccggagttgtgccgtattcacacttgtgatggccgacgctccgaacccctggagcacccgggctacagtcagcatccaaaaagaagtcgataagacacagatcagcgatgtgacacaaaaaacggcgactcccgaaagaaaaactttatgatagccgtagatatctcctggcgaagaaaaagacaataaggacaccgtaatagccagctgataagcattcatcacccaaatcgtggtcgagggagaagtcccgaattcacgcgaaagagtcggaagtactacattgacaatattagcatccaacaccgacatgattaacgccagcgaagctgctatcactgcccatatccgccggggattgggcaatccgtctgtcgtatcggtgatcgcaatattttttgaaaacatcttccaatgaatttacatgcaaaaatagtaaatctgtcagggattgtcagaacagaaggattttttgtttctttttttactccctctcccagtaccacaataacccttcaattcagtgaatcagccacttttcaacttcttttcttttgtcgtaacaattttgtaacaattttgaaataaacctgtaacaactcccttctatttttgcggctgtaagtaaaacctaaagaatggaatcaatttatctgggaattgttattttcctttttctcctcgcgatcttcgacttaactgtaggggtcagtaatgacgccgtaaacttcttgaattcggctatcggtgccaaggctgcctcgtttaaaacgattatcctgattgctgctgtcggtattttttgtggagcaaccatgagtaacgggatgatggaaattgcccgtcacggtatattccggccggaagcttttcatttcaatgaactgatgtgtatctttctggcggtcatggtgaccgatgtggtgttgctggatatcttcaataccttggggatgccgacatcgacgactgtctcgatggtatttgagctgctgggaggtacttttgctttggctatgctgaaaattgctgccggtcccgagtctctgacttttgccgaattgctgaataccgagaaagcattgaccgttattttaggtattttcctatcggtggctatcgctttctttttcggaacgctggtgcaatacctgtcgcggattatctttacctttaattatactactaaactaaaatggacgattggcttgttcggcgggattgctgtgacggccattatttattttatgctgatcaaaggaataaaagatgcttcttttatgacagatgctcataagttgtgggtaaaagacaatactttgactattgtcggtgggtgttttgttttcttcaccgtgctcatgcaaattctgcattggtgtaaagtgaatgtcttcaaggtgatcgttttgttgggtacttttgctttggccatggcttttgcaggtaacgacctggttaattttgtgggtgttcctttagccggtttttccagttataccgattttatggcaaatggaaacggggtggctaatgactaccttatgggagctttaaatgagcctgcgaaaacaccgtttatctttttatttttatccggagtgattatggttatttctctgattacttccaaaaaagcccaaaatgtaatcaagacttctgtcgatctttcgcgtcaggatgatggaaacgagatgttcggttcttcggctattgcgcggagtctggtacgttcgatgactactttagggaataacatttcgaagattattccggagaaggtcaaggtatggttggatagccggtttaacaaagatgaggcgatcctggctaacggagcggctttcgatttggtcagggcttcggtaaacctggtattggccggtttgttgatcgcattaggtacttccttaaaattgcctttgtcaacgacttatgtcgcttttatggtggctatgggtagttcgctggccgatcgggcctggggaagggagagtgccgtattccgggtgaccggtgtgctctcggtgatcggtggttggtttattactgcaggagctgcatttatcatctgcttttttgtaactatgatcatgtattttggtggcatgacggccatggttattatgatcggggtggcggcttttatcttgatccgcagtaataacaaataccggaaaaagatgaagagtgaaaaacaggacgatgtttttcaacagatgctttcctctaaagataaggcggtcgtttggaatttgctccgtcagcatgtgagggaaaatctggtgaaagtactggattttgccgccaatacttatggacagatgacggatggatttatacgggaagatctgaaaagcctgcgaaaggccgtttcttctaccaatgacgaaaaagatattttgaagaaaatacggcggaaagaaacactcggtatgcggcggatcgataggaatgtggccattgaaaagaatacctggttccacttgggaagcaatagtagcgagcagatgatgtattgccttaaacggatgtgtgagccctgtaaagaacatgtggataacaattttaatcccttaccggcagagtgtgccgaagaattcgtaccgatccgggatatgctgaaaagtttgctcgaacggacaaaagatattattgacaaaggaaattatgaagaggccgatttggtacttgccgaaggggaagagttgaaaacctgtttatcccgtttgcataaaatgcgtatcgaaagaatgcaggaagagaacagtagtgttaaattgtctttggtatacctgaatttgttgcaggagtcacaggagttagtcagcattatgcggcatatgctccgtgccagccggaaatttcagcatgtctgattctgacttatttcctgaataaaattatttatctttgttttatacaaatttaaataaagaaggatggaaatgaaattttgccagagttgtggtatgcccctgcaggccgaagaccaatggggtacgaatgccgacgggagtttgaacgaagaatattgttgttattgttatcaaaaaggtgcttttacccaggattacaccatggaggaaatgatcgggcactgcctgcagtttttggacgaattcaaccgggaggccgatgttcccaggaccagggaacaagccttggcagaaatgagacaatttttccccgcactgaaacgttggcaacaaaaatagacggagagcggatgagaaatgttggatgtttgtttctattatcgctggtgtgcctgtttgcctgtaaggatgagacccgggaaaatcctcccttaaaaggggatgctttttggttggctaatccctggaaattttattttgtagatgcggaagggaaaagcgtactccgtttaaaggcgggggctgtcctgcccctgacgggaatggaggtacccggcgaccccgaagtgattccggcggattttgttcctgaccgatcgggagaatacaattataaacacaatagcgtaggctatgatcatgaaaaaggattgtactattggcgaacttccgtcccgggaaacatttgggtcactcccagtcggttttatgtcaggttcgaccggaacgatgtagataccgtccgggtacttttcaaatttacttccggtgcagctgtcgggggagacgggatcgaggtttccgtccgggaaatgtattataacgaccgtctgatcattaaaaatagcgattacagccgggaagaagggattgttataatgaaaaggtaaaaggtaaaaggctaaaagctataggctataagctataggctataagctataagctaggagcaaaaggcgagaagcgaaaggtcataaactaagaggaaacttatattatatcgttctttactttttacctttagcctttagcttatagcttttagccttttacctttaaaattcctccatctcgttcatcatctggttattttcgtcgtgatcgggacgttgggttttgttttttccggctttcatatttccgaagctgtaggtcagggtaaagcctatcgtgcatcctgtccgccagtttgaagcatattggcggaaaccggtccctgaagtttcggttttccatttccgggaattgaacagatcacgtccattgatgctcagactcaatttccggttgagaaaagctttgcggattcctgcatccagactgtaattcgattttctatatccctgtgcgatcaattgacgggaattataattaccggtcagttggagagagaaagaagccgggaggataaggttagcgattatcttggcattccatgaaaaatcttcattgctcttaccggtcaccggttgatccgcacccgccggcagataagagaaaccgtcgagtttgttgtaatataagttaactgtcgtggtcagatccaatatagagaacaaatggttttttcctacgatttctacacctgcagattgggtttcagccacattttcgaacgtacttttcatgatattgtcttccaggtaactgatacgctggatgacatcgtcggtattgcggtaataggcagaaacggagagcgtgtgtgcctcccagtttttgatataattcagttccatcgaattggaatattgcggagtcagataagggttaccgaaagagatattggtagagtcggtgatattcaggaaggggttcagctgatgcccccagggacggttgatccgtcggctgtaattcaactggatttcattttgggcaggcagggtgtaagttaagaacacactggggaaaatgctgaaatagtcgtctttatagggagagacctcgcctttttcctgtccataggccagggaacgcgtatcggtatgggaatattcgccccgtaatccggcttggtagccgaaattaccgaaacgtcccgaataagtcgcataaagggcatggatattctgatcgtaatagaaacggttgtaaagttgttcgtcgggccgggcgtcttcggccgtttcgccgctcttggtctctaccgggctttcctggcgggaaaaagtacctttatatccagcttcgatcttgttgaattcgttgaatgcattgacataatcggcctgtaactcccaattgtgggattgcattttattcttttgccactgataactgtgtgtggtttcttcattttcaaaaacagagctttggagataggtactcttttgatccatattccaggtgttccacgaagctactacatccagattactggttttactgaaatcgtgtttataaccgagttcgacattgcctcctttcatcggattgtccgaatcggaaatacgctcactggagagaaaagaattagggatatcgcttaaatagttgattgtattggtttgtttacgggttccgaacattccgaaagcgccgagattcagatggtcggactgggtcagatgccaggtcaggccggcacggacgaaagtttgtccgccatggccgtcattgtcggaagtctgattgaggaaagagaccggattacccgaagcatccgtattggtccgattggagaaaccaccgccgtctcttttccgttcccggtagcccactccggcatacatctccgttttattactgctgtagttgacattgccactggcattccagccgccgcgggtgtcgactccggcttgcaggctaccgtagtaacctgctctgcggtcttctttcaatacgatattaatgataccggaagttccttcgggactgaatttggccgagggattggtgattacttcgatccgttcgatactttctgccggtaattgttccaggatttgtgcccggttgtcggccgaaagcccggaagcccggccgttgatccatacggtgacatcactgcttccccgtaaggatacttcgccttcgttatcgacttcgacagagggaatattggtcagaacatcactggccgttcctcccgtagaagagatattttgatcgacattgaatacttttttatcgatatcgaatttcatttgggaacgttggccggtgaccttgacttcgccgagcaattggctgtcctcttgcaatagcaggttccggaaattgactcccggtatctgtttggagagggtaaagggcttttcgattgttttataaccgataaaagagatcgaaagtgtataactcccttccggcaactgggcgatatggaaagtgccggtttcatcggtcaccatgcctttcaggggtacggtggtgccggctttccgcacactgatattgacaaattgcatcggttcacgggttttagcatcgattactttcccccggataacaccggcctctaccggtaacgattcggtcggttctgcctggagcttcactccataacctatcagcaaaaaacaaagcattgctgagatcaggattcttacattcatagtttatctattgtattttgtgtttttcaactttgccctaactaaaacctcagaccagattttataaaaagagtttagtgttgaatggattatttaacagatttgacttttccttcacaaaatagcgatagattctttcagaaatatttaagtattgggttgaatatcgtcccaggctgcccccttgttggctcctgttatccagttgaaggtataatggcgttccatgacgattccgccgtccagcaggtccgcatgggcgaccggagtaaattcagtcagttcactttccccttcccgtgaaaataccagcttgccttctccatcgtacaagtgcatattgggataaagcagatatcccttcacctgatgggccaggtcgaaaagggtattgatgagataacgggtgcggtcgttgttatcgtcggtttcgaatacgatccctacaacacaattgaaacagcggatctggcgcagcacgttttctttcaatgccgggttactggttgctgcctgggcgaaataattggccattccttcgatgtgcatctctataaatccggccttttcccggacatgggaaaggtggaatacgagtaggctgtcatcctgaagagttactctgatctggtctgcttcggtatcgaccgactggattaccggtgcaaataaagactgtattccagtcaaaatatgctgaggggatccgattaccgtataaagtgtcaaatgtgctttttccataataaaccgctttttctgtttttttaatttctctccttttccggtttctcctttccctttcgcttttcgcctctagcctttcgcctctggcttttgccttttaccaataaatcaccaaccccgccactcctgcgaggcagatcatgaggataggatgtattttatatttccaggtaagtagaaaagcgccggcgaagatcaggatacttttataatcgataaagttttctttattcatcaataagagggcagcagctccgatcagcccgacagtcatggggcgtaaaccggtaaaggcggcggcgacatatttgttgtttttgaatttggcatagaaaaatgaaatcaacaataccagtaaaaaagagggcagacagacggcaaaggtggcgatcaccgacccccagacacttccagtggcggtgtagccgatataagtagcgctattgattccgatcgggccgggggtcatttgtgagatagccactacatctgtaaactcttgtaaagtcaaccagtgatatttatctaccacttcatattggatcagggagagcatggcatatcctccgccgaatccaaagattccgatttttaaataaacaccgagcaattgccaataaatcatgtgtcgtatttcatttagagtactgtatactatttttccttgatttctccgtcctctttctcactctctactctccgttcccctgtttcatttttcctttgatccagaaggtataaatcaatcctccgataataccggccaaaacaatatatgccggagatactccgcatttccatatcaatacggctccgatagccggtaaaatcaattctacccattttaaatgaagcgaccgggctgctgagatgcagggaaccaggatcagggcaacgacagccggccggataccgttgaatattttcatcacccagatattgtcctgaaaatgattgaaaaacagagcgatggccaatatgatacaaaaggaggggagtatggttccgccggcacaaacgatactacccgttactttcttgagtttgtagcctacaaaaatagagatattgacagcaaagatacctggtaaagactgtgtcatggcgaataaatccataaaatcctgcttgtctagccaaccgcggttaacgacttcacgttcaatcaaggggatcatggcatatccaccgccgatggtgaacatcccgatttttacaaatgtcagaaaaagtgtccaatacatacctgattatctctatccgatgtgcaaaggtacactttattcaggagttttctatgattggaaagccgtttctctcactttctccacgatgatgttgggggcgtggtataccgtgtggccgaattgaggaataaagtccataaagccagcggccgctggctttatggactttatttgttgtttttaattatgctttaaatagcatctttctttgcgtattccgagaattcacagccgaaagtatcggccagatagttgtccatttcatcggctttgaaagccatatcggtgatattcttttgaatttcttctgcaaaatcagagaagatatccgagatatgaatgcggtaagaaaggtaaatctgattcccgtccagtccgagttgataaggtttgatatcttctgcactcaacagataagtcagtaccggctccaggtttttcttcggtaggttgttcagcggagaagtacagaacagatacgaacgctggtatacgaacatccggatctcggagctgcctttatggaaagtccagctttcatagccgatacgtgccaacaccggattgatacccatgttttcgatggctttttcacaaaatgctgccagttcggtaaggcctcgctgctggaaaatattttccggtaatttctccccgcatgaggggcaatattcgtcttcttcggatataaattcctcacaactgttacattgtatattgaaattattgcggtcgagttctgaaatctgttcgagtaaggtacacaaggaggctatgggaatgccgaatcccatattatcggcattggtcagtttgctggttgtgattgccactacttcgccattttggttgaacatcggaccaccgctattacccggattgacagctgcatccgtttggatataataactgtcgtccatcagttgtttgggagacgagacggttccttcggtcgctgtaaacggcatcccgaagggataaccggctacgttgattttttggcccagcgtgacttcggtacaggccaggctgatttccggtaaagcggtaaaatcgccctctgccgataataaagcgatgtcgagtatcggattgaccagcacaatattcgctaaataacggttcttttggttatcttccagggctacctgacgaaatccttctacgacatgataattggtgacgaaaagatcgtgttttttcaggtaaaaacagctgcctgatcccccggcatgattgactttatatacggtttgaaatatattttgatccataatgttttgtttttgagttgattagttaccgaaattctgggctgccaattgttgtactttggcggtatattcttctgcactgatctggccactggccaattgttgctgtaatacttgcacttgttgcagatagttttgcataccgttgccctgcatcatttgttgcatgttttgcatcatttgttgctgcatggcctgcacgtttttcatatattcgttcatgtcgacggtgccttcctcttcctcctcctcttcgtcaagttcatcttccatgatcgcttccatcgctttatagagtacaggagcagcctcatcccacggttgggcggaactcttttgcaaagcttttacaaccacttggttgacatcctcctgcaaattgttatagtaatacatctcgtagaatttataaagcatcatgacacaagcggtcatataatcacccgattccatataaccggaaatctttttgtaactgtcctcgaaattttcctgaatgttttgtaggttggaacgacgtttgttcgggataaaagtctcgacaaaataaagatcttccgccagttcttcttgggtcattttttgtagtttttcgatgactgcttttccctgggctgtgatttcgggcagcggtatatcttcgcggtccatttcccggattgccttttgcatatcgttgagcagctgaccctgaggttgggcgaaatacatgaatttcatcagggtcgtgtcgataatgttccagatataaccgtatttgcgtgaaggctcgaaatattttacggcatccaggcactctttgcaactgatttgcacggcttggtatatattctccaggcttgctgtatcgtaaggggtcgttttaggctcatagatacgttgtgccccgaatttagtctcgaattcatcgtcgtatttgtctcccgtacagcatatttcctgcaggatataatagattttgtaagggttgatcaattggatcggacagctgtattcaaacgaaaggcggttatcccgcaaatagatcgttgccagatccatggcgttgaaattgagtcctgccacctgacggagtaagggtatccgccctttttcaggaagagcgacaaaaggagcggtgatactgagtttttcttcgtccaatttgatgtttacgataatagaaccgtggggaatatgaaattcgtttccctgtacattgccgtatttcgtccggaaatctccgttgatataatccaataaggcataaaatgatttcagatactcgtgattttcaaaagcttccacgctcgcatcgaaagcttccacgttcaatttactctcggttgacgagaggataggaggagtaaaagttaaggcttgtttcatcgtataatatttttaaaagatgtctttttttgaccacactgacaaatgtaaaaaggaaataaaattatacaagagaagaccttctttttttgcaggtattgacattttttgtttattgttgatactttttgggtatatgttttataaactgcttaaattttgccgactttcaacttatttattctatttttgtttgactgataaaatacaaagacgatgaaaaaatgtagtgtgtttttgtttcttctggttacgttggctgccgtcggacaaaaagaatacagaattgaaggaaaagtgcggaatgcagccggaaatacggtggtgcaactgttagtgtgggctgggaatatggggaaggttatcgggagcgataccctgaaagacggacggttttcatttcggggaaagctggaagaggtgccgttacggatgtcggtttttgttgagggggattcggcattatatggtaatctctcattttgggtcggtgaaccgctgactaaaatagaaggggatgaaccttgtgtcgccctttggaaagtcaaaagtaagttgaggcaacagcaggaagagaatcggtttgtgaaaaactccgcccgcatcacccgcgaatatgagcgggtaaggttcgataaagaggatgaatatgtggcggaatataaggatcagcatagtaagcatccgaagatgaaggattatcccgtgacccgtttgttcgactctttgtctgcccttaaagcggaagccgacctgaaaattttggaagaacaggccgttttgtcggaagtcggactggaaagattgtatgagcatgcgcgaaaactgcgttcaccccaatgtccgccaggacttcgggaaagggttgaaaagctttatttgcgcctggatccggcactcaaaactactgcccgggggaatgaaatccacatttatctttatccggtgaaaatctgtgaggtgggagagcggttggcagacggcctcctcttcgatcgcgaaggcggagagcatcacttgtcggactatctgggaaaatatattttattggatttctggagccggggatgtggtccttgtttgatggcacaacccgaattggaagagttggcggaaaaattccgggatagtttgcacgtgatcagcataagcctggaggtttcggaaaaagggtggaaagaggctatccgggatctgaaaggaatacagttgtgtgattttaagggagaaggaggattgatcgcttcgtatggttttgacgggatcccgaaatttgtggttatcggtcctgacgggaagatcctggacaaatggactggatatgggaaaggaatttttgaggctcgcttgaaaaaactgtgtaaaatatatgacggcgaaaataaataagaccaatgctgcccgtttgctcgataaagcaaagatcgcttacgagctggtaccttatgaagtagacgaaaataatctggcagccacccatgtggcggaacaactgggagaaaatatcgcccaggtatttaaaacactggtattgcgcggagataaaaacggcttgttcgtttgtgttgtccccggagatgccgaagtcgatttgaaactggcggcaaaagtttccggcaataaaagtgcggcgatgatccatatgaaagaactgttaccggcaaccgggtatatccggggaggatgctctccggtcggaatgaaaaaggctttgcccacttttattcatactacttgcatggatttcgggtatatctacatcagtgcagggatgcggggattacagatcaggattgcgccggccgatctggtggaatttacccgggcagaggttaccgatcttattctcacctgactagacttccctgattccggagtaacttgataaacagtataaaattggaatggtggatatagcagcgactttaattcattggtatgcagaaaataaaagggaattaccctggcgggaaaccaccgatccttatcggatatggatttcggagattatccttcagcagacgcgggtggtgcagggattggagtatttcaaccgtttcatgttgcgttttcccgatgtacgggcattagcggaagcacccggagatgaggtgatgaaatattggcagggcctgggatattacagccgtgcccgtaatcttcatgcagcggcaaaggaaattgtggaaaaattcggcggggagtttccccgcaactattccgatgtacttaccctgaaagggatcggggaatatacggcggcggctatttgctcgtttgcctggaaattgccctatgctgtcgtggatgggaatgtttaccgggtattggcccggatcttcggtatcgatacccctatcgacagtaacgcagggaagaaagtgttttccgggttggctgccgaactgctcgaccggcgtcatccggacctttacaatcaggcgattatggatttcggagccatacaatgtacgccgaaagtccccgtttgtttatattgtccgttacgggaaaattgtgtggcactggcttccggtcaagttgaaaaattaccggtgaaagcaggaaaatcagtcgttaagccccgttatttcaattatttgcatatccattgcaggggtgtgaatttgctggcccgtcgcgaagcgaaagatatttggcaaaatttgtacgaatatccgttgatcgaaaccgggcaggaaaccgaattggaggtattgcaacaaaccccggcctatctggaattgatgcaagaggcaggagaaatacagatactccgaagtttcatcatgcccaaacatgtactttcacaccgcattatttacgcccgtttttatgagatcgaagtagaacgtttttctccggcgatgcaacgctttttacaggtaccggaagaggaactggaacaatatgccgtttcccgtttgatcgcgctgtaccgggaaaaatgattaagaagaaacggctttgtccggccggggcaggaatacggcaaaagtttgtaataataccgacaagacaatgaggcccaaaccgatgtaaaaagccccgttcaactcccgggcttcgtggaagaaaagcatagccaggataatgctgtatacgggttcgagattatatgtcaggttgaccgtaaaggccgatactacttttaagacctgtatttgcagtaggtataaaccgatggtacaaacggaagccaataggatcagatagatcaggtcggagacgtccgggaagatcgtttctaccggaaaatagcggagataaaaaggtaaaagacagctcagaccgacaaatccgccggacatttcatacaagagcatcgtgctggcatcgtggccggcagctactttcttattcgtaatcgtaaacaaggcggccaggaccgaagaggtgatccctaagaggataccctgacggtaacgggtgtccagatggaaaatcaaagctatacccagtagggtaagcaggctgaaaagtacttctttgacagagatgcggtgacgattgatccagggttccagaaaagccgtgaaaaaactgaccagtgaaaagcagactacaccgatggagatgttggaggctttgatactcccataaaagaatacccaatgcagtcctaataatatcccgatgccaccgatcttgaaaacttctttccagcctatccggggaaagcgtctccggactgccgatagtagggcgaacagcagacctgccagcaacatccggtaccagaccaataaaccttcattgagcgaaatcagccgcccgaaaatgcccgtagcccccgcgagcagaacggatagatggagtttaaaaaaagcttctttcatgtttgtcatttcacctgaactgaaccgggcacaaatgtacaaggaaaatacgatttttcaatgattaaaaacggtgacaagaggtaaaacggttgaaacggctggccagaattggcggttatcggtgggctgccgtttcaaccattgtcctcgtggaatttttacctgctttccagggcttgctggcgtttgacctcttccagtattttcttgagatcggtctgggttttccgggccatttctttaccgcaatgttcatctgcctgataaaaacgggcgatagcccggatccggatcggttcgggaacatcggctgttgcggcagtgaaattagaagtcaggcggtctttttcgtctgccggcaacaggcggtataaatctcccggttgggtgtagaaatcgttgtcctggggataatggccggcagcgttttccagttccagggggggataattgtatttcgtgtcggataccggaccgttgaaactattcggttcgtagttgacgctggcacctgcattgccgtcgacacgcatatgcccgtcccggtgataattatgcaccggacaatgagagcgattgaccgggatactatcggcatttacacccaaacggtagcggtgggcatcgccatatgcgaataaccggccctggagcatccggtcgggagagaagcctattccgggaactgcattggccggattgaaagccgattgttctacatcggcaaaatagttttccggattccggttcagttctatcaggcctacttcgattaacggataatctttgtggctccatactttggtcagatcgaaaggattgaaacgataggttttggcttcttcttcgggcataatctgaacacacattttccatttaggaaaatctcctttttcgatatgctcgaataaatcccgttgtgaatgttcccggtctttggccacgatctgttcggcttcttcattggtataattagcgattccctgttgtgagatcatatgaaatttcacccacacccgtttgtctccggcattgtaaaaactgtaggtatggcttccgaaaccgtgttgctgccgcatattccgggggataccacggtcgctcatcaggatcatcacctgatgaagggattccggggtcaggctccaaaagtcccacattgctgtgttgctgcgtaggttggtcttagggtcccgtttttgggtatggataaaatccggaaatttcaggggatcccggacaaaaaataccggcgtattatttcccaccagatcccaattgccttcgtcggtatagaatttcagtgcaaatccgcgtacatcacgctctgtatcggctgctccccgctcccctgcaaccgtcgaaaagcgggcgaacagatcggtctttttccctactttagaaaaaatagccgctttggtgtaacgggtaatatcgttcgtgacggtgaaagtaccgaaagcaccacatcctttggcatgcacgatacgttccggtattcgttcacggttgaaatgggccagtttttcgagtagccacacattttcgagtagttcagggccccggggaccggctgtgcggctgttctgattgtctccggcaggtatcccggcttcgtttgtcaactgagtttttttgtcttccataatgataacatttgagttagatatgtcggttttacggaaagacagggttttacgatacaccttacgaagatatttcgtttatataatcgtatactgcttttgaaatttgggcgattatggcggcattggttttgtcgtcttccatcgaatcggttataaaaacggcaattgtataatgatcgccgccatggggaagatagacaaatcccatatcgttgtctccggctttcatgcctgtactgtcccggtcggagctcccggttttatggccgataatcgtttcggccggtaaaagaccttttagtttgtcgctgccggtggaagtcgctatcatcgtattttcgagaaatttttgataaacaggcgataacagttcctgctgtatgaatttttccagcaaacggacagccgaagagggacgggtatgattcaggtaggggtcgccggacttatgcatccggtcctcggtagctgtgattttcatttgtttgataccctgacggcggacatatttttgtagggcacttgtgcctcccagataatcgatcaggatgtcacaagcattgttgtcactcagggcgacactgtatttcagcagttccccgatagttatcttaaaattgccttccgggcgggcttcccggagcggactgtaggtatccggatgcaagtccggtttactgataaataactcggtctccaacggaagcccttgcttatccagacgttccagcacggctaatgccaggggaaacttgaacgtactcatcatcggatatccggctttgtcgtttacggttaccaggattttaccgttgtataatacggcgattccgacggtggcttttttattttcaataatagattttagctgttgggcgagtggttcctggctgtaaagcggtgtcagcgcagtgaggaagatcaggcaaaaaaatagtttggaaaacatcgtaaataatcgttttgaggttaagcatgaagatcgattgtgccatggacagatttcaggctacccggaatcagttcgtggaccataaaatagggcgctaattcttccggcagaccggcttgccggataccgtattctccgatcgctttgaaaccgaaacgtccgtagtaggccggattgccgcaaagaaaagctgcccggtaaccctactttgggcaagtcgtaagccttctttgagcaaggccgatccgacaccctgattacggtagtccaaaacgacggataagggcgctatcatcaaagcttcgtatggagtgccgtcatcttgggtgactacggtccgggtcagcataatatggccgattaatttcccttggcattccgcgaccagggctagttcgggaatataattcccatggatgcgcagacggtttgcaaaatcctgctcgtctccgtcgctgacttctgctgttgcgaaagctgtccggataagctcgtaaatagccgggaactctgcttcgcgttcctgccggacggtaaatgaagatttatttttcatccctatttcgttttgggaccaatataatgcgtatatttgacataaacaataaaacggcaaaaatggaaattgaaaagtttatagaaaattatcgggaagctttcggcgaagcggccggactgccggttgtattttggtattccgacgaagagaccgggcataccgaaaagatcggcgggtgtttttttaaaggtatgcaagaggttcgtgccggcaatacgattagtttgaatgcggaagtcatcggatgtgggggaggaaagttttataccggatttgctccgatgcccgaacatgttccgggttttgtgtcgttaaaggagaaatacaagaaaactcccggaatggtaaaggaatttgtcgatgagttggggattccccgcgcagagaaaaaatatttgcattttgcccggatcgatcgggtagagcatttcgacggcttggaaggcatcttgtttttagctacaccggatatattgtcgggtttgactacctgggcttatttcgataataatagtccggatacggtaatggctatgttcggatcgggttgttgttctgtcgtgacccaggccgttctggaaaaccggatgggagggaaacgaacttttctggggttcttcgatccttcggtacggccttggtttgaagcggatatcctgagctttaccattcctatgtcacggtttagggtaatgtacgacacgatgcgtgaaagctgcctcttcggtacaccggcctgggcaaaagtaagggaacggataaaccgggtgaagaatgcggaataaaggatgaaaaagaccggacagattttatatctttggcggaaatatcaagcacatcattatgggaacatcggataacgggcaggaagtactccggcaaaacctggaggaaaaaggaacatttcaggcattgtatcaaatgcatttgttatttcgggaaaaggggaaacggccggaagggaaaaaaatcctcggtaggttgcagaaagaattcgggcaggtcgatctggtagcggatgtcgatcattcgttggccacttttgccatcgctgattttccggtagaatacaaaaaagataaaaaggttattccggctcaggtattgatggccgattttactcctttcgatccggcttctgtcgaccggatgcaacgttcccagttgtgggattgtccggatggggaaaaattgctggacagttgtaagtataaactgatgctttccgatttcctggctgccggattggaatacaagcttcgttgccgtatgctcgcccgctggctggaaattgctttggagctattcgatgattgtgtgggagtatggatcccggctagcggtaaactgcttacccggcaacagttgctgaataatccgtaccggggagatgaccgttttctgtattttggagtgaatatccgttttttcaatatccagggtacggaggatatgatggtagattccttagggctatatgctgtcggtttacccgatgtacaatatcatttccacggcctcgatcccaacgatgtggtagatcatgcttatcgtgccgtcggctatctcttcgggcacgatgctcccgtaaaaccgggggagaccatcggtggactcaaagacgggcaattgagtgccgaagtacactggccttgtcgctatgagaaggctttgctgcaacccgaacgggaagtgatggatatctgccccggagaatatgcttccggcaatcgtccggagtaaaccggggatcggtttcattatcctaatccgaactccatgatagaaatacccgaatctaccattatcggccggcaggctacatgagattatccgcgaaacatatctcggcggtacggtatactattgtcccgtatgtcaaaaactgtgatagttcggcagggggctaaactttataaataacacgtgatggaattgacattaaaaatcgatcaggaaaaatgtatccgttgtggcaaatgcgtcagggtttgtccttcgatgattctgcagcaagcaaaggctgccggggaagtggaagtgaaagaatggcaaaattgtatcgtatgcggacactgtgtggccgtttgccctaccggtgcagtagaacattccggatttcctgccgggaaggtacacgaattcgattactccgattacccggtacctgctcagatgatgctgttgtgtaaagccaggcgctccaaccgggccttcaccgctcagtctgtccccgaagagttgctacaacagatcctggaggctgctcaccgtgctcctaccgcaagcaatgcccagcagatcggttttacagtagttaccgatccggtccggttacgggaaatcaccggatttactttaggagtattcaaaaatgcactcaaaaagatgcagaatcctttattgactcctttggtaaaatggtttatgcccgatgctttccggtatatccctgtattcgaacgcttgttgcgggaggataccaaaggaaacgatctcatcctgcgaaaagccaaagcggttgtgttcatccatgctccccggaccagccgtttcggttatcaggatgccaatctggcttatcagaatgcctcgctgatggctgagtgtctgggagtaagccagttttataccggatttgtctgctcggccatagagcaggataaaaaagggacattggaaaagaaattggggatcgatggaaaaatatatgccggaatggctttgggaatgcccgctttccgttataaaaattatatagaccggaaggatttgaaagtaaatagattatagctgcaacttttgtatcctatcgaatagtttcaaataaattactccatattttataaaatcacggtggtcccgggaggtcgtgcaataaattgtagtgaagcctgcgatttttcagatttgttttttatatttatcgacaagtgtttatctgggacggcaggataggtgctggttatacaaaatattaaaaacaagctgaagagttgtggcggccgaatttcctgtaaaacttttgccggggtgattcgatatttccgactgttttggcatgatacacggaacgatatggataaaaaatttttgaagcaattggcccggtggcacgaagacgatgaatttcagaaaatagtagatgccatactggctcttcctgaagaagaacgtgattacgatttgaccgggcaattggccagggctttgaacaacctggaagattacgagacggctgctgaagtgttattgaccgtggaagcggaagggcagcacgatcccttgtggcattaccgtctggggtatgcatattactatagtgatcggttcgggcaggctaaagaaaggttcgaacaggtattgcggctcacccctgacgatcaggatgcccgtatgtttttgggatggtgtgacgaagagctgacacccgggggaaaagtaaagaaactgaatgcccgtctgacgacccctgaagcgatgaccgggggcaagaccttccggcagcgtacggctgaattctggcaatggtttacggacaatgaaccccggttggctgctatgattgaaaaacggggagaggaggacgtggataaaatggtggattttatttccggaggagtacagctgatctccggcgagctgaattttaatctcggtggtgattatgaatttacctttaccatcgaagggaagaactatctcttttatctgttgccctggttggtggagcagatgccggagcagttccgcggaaaatggcatttctttccttgtatgcagggcactcatggggagagtttcggatttcagatgtacggtaaagacgtacagttggatgaggtgatggtaggattgaaatataaggaagaccagaattatttcgatatccgtttttatgatgaacaactttgttctctcgacgataattcttgttacaatgctttttatatcatgatggagctgacgatcggtgaggcgctgtcgcatatctatatcggtaatgtcgacaaggcggatgggatggaagcaggcatgtttccccttaccaggctggaagcttgtatgaccgtagcgctcgaagaagctaaaaaagagattcttacccgtcctgacgagcgttatagtgtttatagaatggaattcgataccgttaaggatttacgttatgatatggtcatcgggaccacctgtttttccgatcttctgcaggattatttcaatggagagacggagaatgccgataagttggctgcatgcgggagcaaggcggtatttttggtgatgccggtgggagaagccgatcgttccgggatgttgaaactccgctatgagatcgaagaccggttgacggcagaagtactcggtaaaaagggatccggccgtgagatcggaatcttattgggaggaactatggggcgcgataatttatacatcgatttgctgctttacgatgcccctgcttttatggagcaggcaagcagtctgctggggcaatattcctatcctttctatttggccgaatttcggccggagagtcgtttggtagccctggcaaatgtcggttgatcctatgccggagatcccgttgtccccggcgaatcggtccgccgtatcgtagaatttgcggattgtcgtgccgatggggattccggtatccggtgcaaatctttaacaaggcctgtttcgaagtcctggggaaaataaaagaaggattcggaggtaaaaggaggagttttaatatgtttttgaaactttgtggggggcggttacgatatattatcggttaatacccctttgagaaaggaagatgatgaagaatacgatgatgatttgtctagccttatttgcagctttcggatgtacaggtcagagtaaggcaggtaagggtaaaacgcaggaattgacgactatggaaaatcagaaagaaatttatctggcagggggatgcttttggggaacagagcattttatgaaacagatccggggagtggaagccactcaggtcggttatgcaaacagtaccgttgccgatccggattaccggcaggtatgtagcggacggaccggggctgccgaggctgtgaaggtggtttacgatccggccgaagtgggattacctctgttgctcggcctttattttaaaaccatagaccccactagcctgaataaacaaggcaacgatcgcgggactcaataccgtaccgggatttattatacggaccttgctgaccgtgaggtgatcgtccgggccgtggacgaactgtcgaaacgatacgatcgtcctttggcgatagaagtaaaacctttggacaatttttatccggccgaaggttatcaccaggattatctggacaagaatcccggtggatattgtcatatcgatccggctctgttcgggcttgcccgtcaggccaatctccggccggccggtgaagggatgaaacccccgcagacggtttaccgccgtcaggacgatgcgaccctgaaaaaaacattatcccccgaacaatatgccgttacccggaaaaatgctacggaaccgccctttcaaaatgcctattggaacgaataccgggaagggatttatgtagatatcacaacgggtgaaccgctttttatatcggccgataagttcgattcgggttgcggatggccgagtttttccaaacctatcgaccaggggctgatcgatgaaaagaccgacacttcccatggtatgcgccggactgaagtacgcagcaagactggtgatgctcatctcggacatgtgtttaacgacggtccgaaagaccggggcggattacgctattgtatcaacagcgcttctctgcgttttattcccaaagaggacatggaagtccaggggtatggggcatatttacccttgttggacaaaaaataagatcgtgtttccctaagtgtgtaaatttacttctgtacaacaggcgtttacaagccatgattgctaaggactgaaaatcggagagtttcaaccggagaattatttccgggatttgttcctgtgtaaattccataataattcatttttgaaattcgtcattacaaaaataaaaattactgggatttacacactttggggtacactatccgggcgagcccagattttacctcaaaataccttttccccttcaatttgccacaaataaaaaagagtcagttttagctaactctttgattttcagcggagagacag

SEQ ID NO: 5862 - DNA, 759 bp, Unknown
  gut microbiota DNA sequence
atacaaacgatccatcccaactgtttgaacaaaataccggtcattccggtcaccagcgtcaacgggaagaacacggccacggttaccaacgtcgtaacgattacggacaaccaaacctcgtttgtaccgtatttagcggcctctcgcggacggctaccccggtcgatatgtttcgtgatgttctccaataccacgatggcatcgtccaccaccataccgattgcgatggacagggacgacagtgatatgatattaagcgattccccggttgcaaacaggtaaatgaaggcaacaatcaaggagatcgggattgtcaacgcgatgatgaaggttgctctccaacgtcccaagaataagaacacgatcaaaattacgaagatcaaagcgtacatcaaagactcctgcaagttattaatagacttgatgatgaagtccgagttgtccgaaatgatttggaatttaatatccgtgggtaattccttttgtgctttttcaatttcaccttttgcctgttttgcaacggccacggcgtttgcgtcagtttgtttggttaccatcaaaacaccaccccggcctctgttaatcgtttgttccagcgtaatatctttcaacgtatctcgtacgtttgcaacatctcgcaagtaaatgattttatcattctgggtacctagcacgatatttttaatctggtcactttcttcgaattctccttccacacgcaaagtataatccatctgtcccattttcacgttaccggaa

SEQ ID NO: 5863 - DNA, 1168 bp, Unknown
  gut microbiota DNA sequence
acatctttactcaatccggttcggtaagccaaatcgcgccaatcggttgtcttcgtcagatcgaaattattccgtagcactcccagcgtatcctgtacaaaagtttcccggtctgcatacatctccctcaaattctcgttggtatcccaccaattccgtaatgtcatttccccgaattccaacaattcggatgaattcatatacttcagcccgccgaaaacaggagtactgattcccattttcacatccagtgaaacggtcattttatcctttatccctttccgggtcgtcaccacgatcacgcccgtcgcagccctcgaaccgtaaatagccgtagaagctgcatctttcaataccgtaatatccgcgatatccgaaggcgaaatgaccccactgatactggtataatccgtaatcaccccatcgatcacaatcaaaggagtcgaactgctgccactaccgtcatcattcccgtaaaacgttcccagtcctctcagcaacaaagccccgtcctttcccggcgtcccgtcactacccgtaatctgtaaaccggttgtatggcctttcaaggcattcatcagatttccgccggtcgccgactgtacgatatccttcccccggaattgctgtaccgccccggtcatttcactcactttacgggtagaataaccggttacaatcacttcttccatttcggcaatctcttcttttaatatcacatccaacactttctgatcccggacaaccctttcctgctcctgcatacctacgaatgaaaaaaggatgcgaatctctttatctgcaggaagttccaaacgataaccaccgttctggtccgtcgccacccccagggtcgttccttttatcctgaccgtaaccccgggcaagggccttcctccgcaatccttcaccgtcccttgcagcacccgaacatgccgaggaatttcaggcgcatacacagccgcccctttacggatgaccaccacctggtcgactatttcataatcgtatcccctggatttgagcaaagcatccaaaacctgctctgccgttgcttctttcaattccaaagtcaccttttcaccggtatttaaaacacctttacgatacacaaattcataaccggtttgagtagtcagaaaacccatatctattccttgacaatgac

SEQ ID NO: 5864 - DNA, 208 bp, Unknown
  gut microbiota DNA sequence
ttgaaaacgccgagtacctcggcgacctccgcgtcatcaaggagaagggcatcaccttcggccccgtcgcggagcaagacgccgtccccgacttctacccgtactggtttgcatgggctgagttctccgtcgaggagaccctgacccgcaacccgaaaagctaccaacacctgctttaagggcagccgctcggctgctctaatttcat

SEQ ID NO: 5865 - DNA, 4877 bp, Unknown
  gut microbiota DNA sequence
gaatttttttaaatggcgggaagacaccaactgtttctgcaatgatttcgaagccaagaccattacggtgacacacaacggtcaggatacgaccttggccatgggcacccaggtcaatcaatctcatatatatcaacgtctgtcttatgacctgcgcgacaccaccaactggagtattgacagtctgctctccgcttaccggaagtattccgccaaccgtctgccggtggtattccggcgcatcgacgctgcgggccggacgaccgaccgagccgggacagagcaacaggcattatttctcccggtagagtgttcgctaccgctcggttatgtcgaaggccaccggttagaagtacagtttgcttatccctggctgcggttgttcagccgttacggattcgggctcttcctggccttagcgggactgtcggtgaccatccggttcaaccggatcgccacggacatggcccggcgccagcaagctttcgtacgcttccagcgtgaagaggtgcagctttttatccgcagcctgcaaccccggctccgggacatccggtatccgcaaaccgccgatccggaaatactcggcgcaaccctcaggaagaatctcggcgtttacagggaattactggatcaaatcaatctgctgctcgaaaaattcaaaacgatcgaatgggaatgaaaagttggtatattcaattaaaatttctaatttcccctcgtcaaactcattactatggactgcaaaccgaaactactttatgccgaagacaaccgcctcaccgcaaaggaaatgaccgaaattctggaagaagaaggttatgaggtggtgacgacatacagcggcgacgaagcctgggagactttcgaacgtatttctcccgatctggtactgctggacttccggatgcccggactcaacggcttggaagtattcgagcgtatccggcaggtggatgcggaaattccggtgctcatcctgagttcgtacaacgaatattgcgtcccgtcgctgaaaagcggcaccgccgactttatccggaaagaagccgatatcgaagaaatctgtgcccgcatcgctgccgtatggcaacgccatgcctccggcaaaactaatgattccgccggagaaaccgtcctccggctctcggagctcaccacattccacaccgacagttttacgctgcgtatcggtcccaacatcattcccctgaccggcgcattaggagaagtgctggtactcttatgccgtccgccccggcaatgccgtgcagccaccgatatctgccggcaactctggcacaacgacagcaaaagcaaaatcactttactacaaaactatatctctcaattgcggaaactgctcactgccgaccctgccctgcacatcgtcagcctctacaataaaggatattatttgcaaatcaacggagaataacccgcacttttccttattgaatatacagactaccattggaaagttccagtaaaacctctccggtatatttcggattgcctacgaatttcgagctgacggtcatattcctttcagatgcagacttttgttccaattccattccatccggcaaccccattttcaacgatttgttatgcttgatttccaaatgataaccggcatctttttcaaaagtcagcccgactttagtaaaagaacctttcaaacggatctcggaaaacaacagttgtatattgcgtatattcatttcccccattttcatatccatatccacataactacctaaatcctgtacctcatatttggtaaaagacgagctaccggtcaattcttccacatccccgattttcattgtcccgccggaagagcgcaagttcagcttacccatcgattccaactctccgtcacaagcattggtttctaaccgaacatcatcaccggaagcaatccgaatggtacaattccgaaactctcctttcatcaaagccacctcttctacattgaaaattcctttctcttgcttgatgtacaattctcctccgctcaaagcagtcgctttaaaatccccgacacgaatatccgcatttacctcacctgaaaaattagtcaggtatacattgccgtttgtactgatcaatctcaacttgattcctttcggaacagatactttatagtcgacatttaatgtcgtgttggtcagaaactgcttcaatcccatgtctttcccgaattcggtcttaaaattgagatattgcccggtaatcgtttctactatctgaatcaattcgagtgtttcatccgctttcacccccgatttagcagtcaccttcatagctacagctactttgatctcatctccatccacctgaacaatttccatttttccatattggttggacaacaccaactcttcgattccggctttaggataagttttttcatattttttctcactggtttcggctttcgattgaattcccgcaaccaacaggcacaacactgcaattagcactttcatattctatcagattaaaattttgaattttcagcttcttcttccatttgtttgtaacgggcagccagataagcgatcattttactgaacgattccatagccgctaccgtttccggatgaatctcccgtttttgtaatttcagcatcagctgtccatacaaaccgtttaaagccaattccacatccgagaccgtatcgtccacaccggctttcctacgaaactccaccaaatttccggccgcctgggtcaccaattgccgatatctcccgtcatgagcctggtgcaacaagaaaaaatgtaattcggtcagttcatccactgtatttttcagggcctgaatatgccctttctcttccactttttctttttgcataatagcgatcaggttatcataccaatcatgaatttccttcgaagtccgttcatccgcctggaaaccggccaccagataacgatccacctgctccatatccagcttcaaagcccggagcatatcttcaagctgccacatatacaaaatatattcggcaatattattcttttttttctctctggctattaacacaatacgatctggttttaatttataggttacaagtcgtaatcatctccttctttcattttatcgatcatccggcgatcacgtttcgtgggacgccctaacccccggggacgcgattcaaagccataaacttttaccgcattcaacaaagccaaattttcaggtggagtcacctcttccacaaaatcaaccgccaattgtgccgacatccgcttcgccgtaagtgccttcacccgataatgccgttcaataggcggaatccttactttcacaatctcacctcccttcagttcacgggaagccttgacatgtacatctccgatggtaacatgtcctttgccacattcttcagcagccagagaacgagttttaaatatccggactgcccaaagccatttatctattcttactttctcctccacgatttcactaattaagcctttcccctttaattttttactttctgtctgtattaaaagtattcattgtccttataataccttgtaatacaaaactagtaataatttctccaccccgttccaacaaagccggtaatttttcagcttcttcgccctgccatgttcccagcacataatcgatctgctgtcctttcaggaaatcattaccgataccgaatctcaaacgggcataagcagaggtgcctaataaggcattgatatttttcaagccgttatgtcctccgtcacttccttgtgctcttaaacgcatcttcccgaaaggtaaggccaggtcgtcgacaataaccaacaaatcttccagagcgatcttttctttttgcatccaataactgacagctttaccactcaggttcatgtatgtattgggtttcagcaagaccagggtccgacctttcaatttcatttcgcaaacagccccataacgcatatcttcaaaaacagcattggacgctttagcaaaagcgtccaatacattaaatccgatattatgtcgcgtatcctgatattccgggccgatatttcctaacccaacaataagatacttcataatttatctgttattttccttcctgagcagcagcacgggcagcacgagtcagtttaatttgtgcaacaacaacctctttcgcatttacaatctcaaagttttcaaaagacaggtctttcactttaatagattttcctaagcccagattcgttacatccaatacaatttctcccggcagattagcaggaatagctttcactttcaattttctaactaccaaagaaagtttaccaccagcctgtacaccttcagcaaatccctgtaatttaacaggcacttccattaccaccggtttatcttcggagatctgatagaaatccatgtgcaatacacggtcgcttacgggatggaactggatttcacgcataacagcttcgtagctctgtcctgctacatttacttttacgatgtatacaaccggagtgtaaagcaatttttgcaaatctttttcaaccactgaaaaatgtacattttctttaccaccataaagaacacaaggtactttcccttcagctctcagcagattagtcgcttttttacccagatcagttctcaattctccctgtaattcaaacacttgcataataaatctttttttgtgctactcagaaacagatttcaactccgggggtataagccagtctgtctccccattacacgatttcaattattccccgtaaaatcagggggcaaagataggaaataaatttaaatatgaggtctctaacggatttgaaaatataaaaaacaaataaaaacttttttctttcaaataatgattatacttttgcccatt

SEQ ID NO: 5866 - DNA, 3162 bp, Unknown
  gut microbiota DNA sequence
aaaaataattagaggtattcattttgcaatgataaactttttagaggaattttggtgcggtcgccctgaagccgctcccggatacatgaaaaataccaaagttttattaactttgccagttgacattataaatttaaacccaaccttatgatcaccaaaaactatatagcgaaaggagaaggcgccaaccgtttcgagaaagtgccggtccgtatttatgaaaaaccttccgaagccgttaaagcggtagcccgggaaattgccgatctgatccgtacgaatgcggataaaagcgaaaaatgtgtcctcggattagcgaccggttcatcgccgatcaaactctatgaagaactggtccgcatgcaccgtgaggaaggcctgtcgttcaaaaatgtagtcagtttcaatctggacgaatacctgcctatgcctaaagaatcggagcaaagctaccattatttcatgcaccatcacttattcgaccatatcgatatcgacccgaaaaatattcatattccggacggaaccttaaaagcggaagagatagaaaacttttgtaaggaatacgaacggcagatcgaggccgccggaggtatcgacattcaagtgctcggaatcggccgcacaggccacatcggtttcaacgaacccggttcgccgctgacttcgaaaacccggatggtatatttagacgatctgacgatcaaggatgctgcaggagatttcggcggcatggaaaatgtgccgtcccgcgccattaccatgggagtgggtacgattatgaaagcccggaaagtaatactcctggcttggggtgagaaaaaagcttctatcatcaaagctacggtcgaaggtagtgtttcggatgctgtccctgccacttttctgcaagtacatccgaacgtacagttcgtcatcgacgaaagtgcagccgaagaactgacgcgtgccaatcaaccctggttggtcagcaaagtacaatggaacgacaagctgatccgaaaagccgtcatctggctgtgccagaaagtgaaaaagccgatcctgaaagtagaaaacaaagactacatcgacaatgggatgaccgatctgatcaagactttcggttcggccaataaagtaaatatccaggtattcaacgacctgcaacacaccattacaggttggccgggaggcaaacccaatgcagatgattctacccgtcccgaaagagcctatccttatcctaaacgaatcctgatcttcagtccccatccagacgacgacgtcatctctatgggaggtactttcgcccggttggtagaacaaggtcacgaagtgcatgtcgcttaccaaacctcgggcagcatcgctgttttcgacgattatatctatcagcaaatggatatcgccacctcttttactaaactggtggacggggatttaccggccatggaaaacgcatttttacaaataaaacaagctatcgctaaccgcaaaccgggagacgaggaagcacggtatctgttgcaattcaaggccgcccttcgccgggcagaagcccgcggagcctgccgttttatcggtgtccctgaagaacgggtacacttcctgaacctccccttctatgaaaccgggaaagtgaaaaagaacccgctatcgcaagccgatgtcgatattatcgtcgatcttttacggaaagtacaaccccatcagatctatgctgcgggtgacttagccgatccgcacgggacgcacggagtctgtctggatgcgattctccgtgcctacaacatcatcgaccgggacgagtggtttaaagattgtaacacctggtggtatcgcggcgcgtggatggaatgggaagtagaaaaagtagacatggcggttccgatcagtccggcagaattgtctatcaaacggaaagcgatctacaaacacggttcacaaaacaacggaccggcatttccgggagatgatccgcgtgaattctggcaacgggcggaagaccgtaaccggaatacagcggatttgtacaaccgtttgggtatggccgaatatgaagcaatggaggtttttacccggtataagcacgaccacggagactctctgaaataaaatttaccagaccggaacggcagattcgtaaatgaattttaggttaaatctttaatctttttataactttgtcggctcacaacactgacacttataaaaatagtataatcatgaaaagaaaaactacactcttagtgatggcagccggcatgggttcccgtttcggaagtctgaaacagattactcctctcggaccgcaccagaaggctttgctgcactataccatttatgacgcagttcatgcgggattcgataagatcgttttcgttatccgcgaaagtttcgccaaagaatttatcgattttgtagggaaatatgccgaaggattggtagaaaccgcttattgctatcaaagtatggataaactaccgggaggaatgccgcccatcgagcgcgagaagccgtggggtacggcacatgccatctggagtgccaaagaagtaatcgatgaaccttttgccgccctgaatgccgatgatttttacggtagcgatgcttttgtaaaagcccacgatttcctggccaacgaagcaacggaccaagagttcggcctggtcggttaccgtctggcttctaccctatcggaaaacggcactgtttcacgagggatctgtgaaaccgacagccatcaccacctgactgccgttacggaatgtacgaaaatcggcagacaggcagacggaagcatcaaagacgaagagaccggaaaaacactgaatgccgacgatctggtatctatgaatttctgggcctttactcctaaaattttcgaagaaatcgaaagacagttcgtcgaattttacccggctaacaaagataatctgagatcagaattttatattcccaaagtagtggataaaatgatcaaggatcaaattgccgatgtaagggtactgaaaacaacggctaaatggttcggagtcacttataaagaagataccccttctgtaaatgcagcccttgccgcttttgacaaggaaggaaaatatctggatatctaagttccggattgagttattacgaaaggagggtgtccaaaaaggcaaaatacccccttgtagaatc

SEQ ID NO: 5867 - DNA, 580 bp, Unknown
  gut microbiota DNA sequence
agttttcatgagagtgagcttggcaggcttcattcggtatttccatttgagcatatagcaaagactgtgggcttgtcggaccagcatctggggcgcaggaatatattcagtccctgcgcaaagattgcccttatggtcctgaaggcatacaccggattctctgacaggcagctggtggaacatctgaacgggaacatacactaccagatgttctgctggattatgataaatccgtccttccccataaccaactacaagatagtcagtgctatccgcaatgagatagcgtcccgtcttgatattgattccctccaggaagtgctggcttcacactggaaaccctatcttgacagccttcacatctgtatgaccgatgccacatgctatgaaagccatatgcgttatcctactgacatgaaactcctttgggaaagccttgaatggctctatagatatatctgcaggcattgtgtggaacctggcataagacgtccccgcaacaaatacaggaatgtagcggagtcctatctgtcctactgcaagaaaagaaaaaggaaggcttcgaggacaagaatgctca

SEQ ID NO: 5868 - DNA, 7417 bp, Unknown
  gut microbiota DNA sequence
gtccccgtgattgcccgtgattggtccgaagaatagcaagcaaaaccatcctccagtcccgtacatataataatgtccgtcggaagccaacaaaaaaacataagaatctcctaaggctatatccaaaggattccgaaaaacagtcttctatccgcttttacatgaggacaggagaatccaattactataatataccatccaaatctcaccttgcaggctctattattcggatacggcagggaaagcagaaatccgcaaacgggcagctcccatcggtatcaaggttatattttcaatctgcggggatttcggtgcatctgtttcaggcaacacagcacacaatccatacttatcgatcttccacgaaggaatccggcggccctgtgctttcacttccaaggggacattaccgggagtaaacgggaaattcacattttctttcgtatccaccgtaaaagcaatggtttcttcgaacggatagtgagtggtttctttcaaaacgatctctttaccattccccactttagctttaacctgacaagctccgtaaagagcggccaccagaccgttatccggagtagccatcaccaaatgttcggtataataaggccatccctgtgcgtgattatgctggcaacaccggctgctaaaaggattcatcgccaggaaaggccctccgttatcaatcccgggattatgattttgagcatcactcaacacctgattgggggaagttatataacgcaaagccctgaaatcaggcatcaccgctgcgggataagaattgaaggccacgttctcacactgttctgcccacatcggatcgccagtgatacgcatcatcaattcgtcggaagccatttcttcgacaaacccacaggtttcagttccttgccggggatcgatacatcccatccgggcattttcatcagccccgaacataccacccggcacttgcccgaagcaacggcgaatcaaagcatgtacattatagctggcagccaaatgggccgaatcacccgacagcatataataagtggccggttcacggaaacactgtgctacattcacattatgccagttgggtaaacgactgtccattgtccaatcggccgtacaacggtgaatcttctccgccagttccaataaaaatgaatcaccggtaatattatacaaccaatatacactccaaaggttatcacctccccggctattttcccaataatccctcaggaatttactgtcatcgaccgtcaactgccatttgaaataattggtcatcaaatcgatcacccgttgatcgccggaatattcataataagactgcatacaccacaacataatcatgttagcccacaattcccggcggccatcccgttcgtttaccggtccgaaatacccgtccggttgtacacttttgaaaaccccttccagccaaactttcgtctcggcaatcattttaggatcgttcaggatataggccagattaccgtaccccttcaaccaatagggcacctcttcccaaccgtgttgtccgccagcagtcagccaagcattatcgtttttttccagccaggcactgatttctcccaaatgtccggtcagcccgtctctctgcaattccaggtattttctcagccatccttcgggttgaatactccctacaggtaatttaataaactgtaaaggcttcaaaggggcccggctagcggtataattcacattggccaccttagtcgaaggacgttctactacagcaatatgctcttcgtcagccgaacaaaaaccggtgaataaaatacctgttgccaataaagcacctgcacaaaccgacaacgattttgtgaataaagtcatcattttagattaaaaatttctatagcgtaaaaatagttccaaaatgagacaaaaggtaaaagaatctaaccattaaatgtcaatatcaggtaaaaatcaagtccggaatcaggcttcaaacgtttggtttgatctgaaaataccattttatgacataattttattagtatcctatccggattatttcttattttgtaacaaaattacacactaaatactttatatatgaaaaaaagattactcatcgtatgctgtgcattgtgctctctgatggcttgtaacagcaagaccgatacgggcacgaccttatccggattaaagaaagcagatttcgacacgacggtttccggaaaaaaagtcgctttatacgaactgaaaaacaaaaatggtgtagaggtagcgatcacgaactacggaggtcgtatcgtttctatttgggtacccgaccggaacggcaagttcggtgacatcatgctggcccacagttctatcgccgattatatcgccgaccaaggtggtaatttcggagctctgatcggacgctatggtaaccggatcaatcagggacgttttatcctggacggccaggaataccaattgcctcaaaataattacggtcactgcttacacggaggcgacaccggatttcatcaccggatttgggatgcaacccaacccaatgcccagacattagtcctgagctgtgtttctcccgacggagaagccggttttccgggaacgctgaaaacaacggttacttacagcttgtccgacgacaatgctcttcagatcaactatgaagcagaaaccgacaaaccgacgatcgtcaatctgaccaatcatgcttatttcaacctatcaggagatggcaaaaccaccattctggatcatcagttgacgctgaatgccgattattatactccggtggacagtacgtttatgactaccggcgaaatcgcaccggtcgaaggtactccgatggatttccggacagcaaccgcaatcggtgccagaatcgataattacgatttcgaacaattgaaaaacggtcacggctacgaccacaactacgttttgaacacccaaggcgacatcagccaagttgcagctaaagtgtacgaccccaaaagcggacgtactctggaagtatataccaacgaaccgggtattcaattttatgccggcaatttcctcgacgggactgtaaaaggtaaacacggtatttactatcccttacgttctgctctttgcctggaaacacaacactatcccgattcccccaacaaagccgactggccttcggttgtcgtacgtccgggagaaaaatatcatagcacctgtatttataaattcggtgcagaataaccgatagctcctgttagtatgacaaggagatacccaagcaatttataaagttaaaacggtgacaacagtaaaaacggtaacaaaggttgcaaactggactgtcaccgttttctttttgattattatgacttcaatatttatgaaaataagcttcatcttcatacttttcctcttctgttctctccatagttatggaacaacacctaaaattaaagtttactgtaatccggttctggctaagtcgactccggatcctactgtgattcaagctcccgacggaatgttttatttatacgccaccgaggatattcacaatataccgatttataaatctcccgatctggttaactggacttttgtcggaactgctttcaccgatgcgacacgtccgactttcgaacccaaagccggtttgtgggcgccggatatcaatcacatcgatgggaaatacgtgctatactatgcgatgtcccgctggggaggagaacatacttgcggtatcggatgcgccgttgccgactcgccggcaggaccatttacggaccagggaaaactcttcaggagtaatgaaatcggagttcaaaactctatcgatcccttttatatcgaagaaaacggagaaaaatacctgttttggggaagtttccggggtatttattatatcgaattaagcgaagatggacttcatatccgtcccggtgcaaaaccgacgcagatagcaggaacggcctacgaagccgtatatgtccataaaaaaggcaagtattactatctgttcgcttccatcggttcatgttgtcagggagaaaaaagtacctacaccacggtcgtcggcaggtcggaaagcctgttcggcccttacatggacaaaaacggcaattccatgctcgacaaccaccacgaggtggtcattcatcccaatgctagttttgccggtacggggcacaatgccgaaatcatgaccgataaaaaaggagacgactggattttatatcatgcttatatccgggataaggccaaacaagggcgggtagtgatgctcgaccggatacactggaaaaagggttggccttacgtggaaggaaatatgccgtcgaatgaagcccaggctcccaaattctaaatgtatccttgtaaagcttttgtactaatctaatcactctacagccatgaaaattttatttttcattctattcctgctttacaccatgagtttgtggggacaacaccaagctccggctcccctattccgggatccgattaccgatggagctgccgacccggtacttatctggaaccggactgaaaaaaactggtggatgctttacacgcaacgccgggcaaattccgaaaccgcagacgtcgcctattgttatgggaatcagatcggtatagcctcttccgacgaccatggtcaaagttgggtttaccggggcactctcgacctggatatcgaaccgggacacaacacattctgggcaccggatgtcgtgtatcacaacggtaaataccatatgttcgtatcttatattcaaggcgtacgcaatcattggagcgggaatgcctgtatcgcccactacactagtaaaaatttatgggactggaaatatgcaggaaaaccacagatcaactccaatatcatcgatcctaccttataccggactcccgacggtacttggaaaatgtggtacaaagaccagaaccgcggctctgtgacaatgatggccgaaagtaaaaatctaaaaaaatggattacccacgatcagccggcaattggagggaatgcccatgaaggccccaaagtattccgtttcggcaattattactggatgatcaccgatgaatggcaaggtttgcgggtataccgttccaccgacttaaatacctgggaaaaacaaggattgctcctggataaaccaggcaagcgtttccaggatactcctcagggagcacatgccgacgtcgttgtggccggagataaagcttatatattctacttcacacacccgggacgtaaatcacataccgaaacccgaaatgatgaatcaggcaacctaccgtatcaataccggagaagttgtattcaagtagctcccttgaccatccaggacggccttctaatctgtgaccgcaatagcgatttcgacttctatctacctaacgaagaagactgatgaaaaatcgatcacggggacggggcaattgtgcgaaaatttcgcacaattgccccgtccccgtgatcgattatacattaaatctaaaattcatcatatctccatcctgcaccacataatctttcccttctaccgacattttgccggcttctttgcatttcgtttcggaaccgtatgcaatgaaatcatcgtatttgatcacttcggcccggataaaccctttttcgaaatcagtatggataataccggccgtctgaggtgctttcatacctttacggaaagtccatgccctcacttctttcgggccagcagtaaaataggtctgaagattcaataaatgataagccgtacgaatcagcttgttgactccggcttcctttagtcccaaatcttccagaaacaattgtttctcttcgtaggtctccagttctgcaatatcagcctcaatgcctgccccgataatcaatacttcggctttttcatttttcaccgcttcacgaacagcatctacatatttatttcccttcacaaccgaggcttcgtcgacattgcaaacatacaatacgggtttattggtcaataattgcaggtctttggccgcttcctgttgtaaatcgtccaatacgacggtacgggcagacaatcctttctccaaggcagctttatacagatgaagtacttcaaccaagcgtttagcgaccggatccccacctgtcatagctcttttctcctctttctgtaagcgattatctactgtttccaaatctttcaactgcaattcagtatcgataatttccttatccctcaccggatctacactaccgtccacatgtacgatattatcgtcatcgaaacaacgtaacacatgaataatagcatccgtctcacggatgttagagagaaacttattacccaatccttcgcccttactggctcctttcaccaggccggcaatatcgacaatttcaaccacagcaggaaccacattctgcggattcaccaactcgaccagtttattcaaccgttcatcgggaacagtgatcaccccgacattgggctctatcgtacaaaaagggaaattggcggattgcgccttcgcattactcaaacaattaaacaaggtagactttccaacattcggcagtccgacaataccacattgtaaacccataatatattttatttttataattacctatgattccttcccttccgggcgtgcaaagataatcaattttgaaagataattcaatattaaaatgtgaggctttatttgtatcttcgtccggataaacagtatgccgcaagcttcatgtcagatatcgatatccatataaaagaattggagttcctgaaaaatattatcctaaaacacgggacaagaacagaaatcaagaaaaatagtttttttatccaaaggggacatttttgccatgagatagcctatatcgtccggggaagcttcaaatttctccgccatgacgctaaaggtgcagaacacattatggcttttgctttcgagaaagaaattatatcctcctacctgccttcccgaaagggttgtgacgctttattggatgtaaaagctttagaagattctgtcgttatccaggcccctctggaaaccttacgttcttttcttcaaatatcggtcgacggtgaaatttatgtacgtgcattcgtcgaatcgttggccttcgactttctcaaaaaaataatttccctgcattgtgatacccccgaggaacgttatctccaattacaaaaaagagttcccgatattttgaacagggttaatctcaaagaaattgcttcttacctcagaatcactcccgagacattaagccggatcagaacccgtattctcaacgaatccagaaaaaatcttgattaaaatcaagattttttctctttctccaagacaagttcgtcatttcacctatagaattttatttttgctatctccttaaaaacaaacaactataaaataaaatgtgatatgaaaaattttactttaatcg

SEQ ID NO: 5869 - DNA, 201 bp, Unknown
  gut microbiota DNA sequence
gaggcgtccacgccatagcgcgtggccacttccttcagctcgtcgagcttcatgtcctcgttgtactcaggggcctcgtcggccgcggtgttggtgctggcaggctcgtcggcgtcgtcgccgggagcgggtgcgggctgctcggcagtctcgcccagctcgccgatgtacttggcgacgccttccttcaccagacgggcc

SEQ ID NO: 5870 - DNA, 597 bp, Unknown
  gut microbiota DNA sequence
ggccgtgcagaagctcctcgacaaccgccgcatcgagatcggcaacgtggagcctgagctgctgcatgacggcgctgccatcgtggcccgcctgaacgtcctcggccgcatcatcagcgtcatctcctacgacctgacctacaccgacgacgagggcaacgacaagctctacatcccgtccggcaagtgcgtcctcaccgctcccggcgctggccgcaccgcctacggcgccgtctctcaggtcgagcagagcgacggcgagttccacacctacgccggccgccgcgtgccgaagtatgtgagcagcgccgaaggcaacagccgcacgctgaccatctccagccgcccgctgatgatccccaacaacaagaacccgttcatcgttgcggacgtcctgacggactgagcgcagcagaaaggagcagagcatgatccagatcatcaagggcaccttcggctactataacggccgcaaggtgatccccatcactgaagcagacggccctcagaagttcgacgacgagctggaggcccgtctggtgaaggaaggcgtcgccaagtacatcggcgagctgggcgagactgccgagcagcccg

SEQ ID NO: 5871 - DNA, 25473 bp, Unknown
  gut microbiota DNA sequence
gccaaaggctgcaaacgggctacccgttcggcgatgaaagccggagaaatcccttccagcaataaaacacatacggcattcatacaattttcaaaagaagcttcatccgggaacggtatagacaaagtaaacgcaacatgctcatatccgacggctaccaggcgttcatgggcagtgctccctttctcttcaacccggacagttgcatttttcccacttccccagatcattttttttacatccggtcgaagccggctagctatatagtccaaagcctccccttctcttccgataatacaacggcaatcccgaaacaatatggctttctccgctaatttctgttgtctggattcaaaattctctccatgcgcatctcccaaatgcgtaaaaatcccgatctcaggccggatcattgcctgcaacttacccatctctcccggcagagagattccggcttcaatgatggccaaacgggtagaaacatccatacccaacaaagacaaaggaaccccgacctgtgaattgtaactacggggactgcgataaatacccggttcatccgataataactgatataaccattctttgacgatcgtttttccattactcccggtgataccgaccacttcagccttcatttgaccgcgataccaggctgccaattgctgaagtgccggtaaaacctcatcgacgacaaaaaaattagccccggacaaaggaagaaaatccgctctcagcccggtcaccacaaaattccttaccccctgttcatacaatttttctacataatcatgtccatcatgattaattccttttaaagcaaaaaataaagtcgactcgggtttattcaccgaccggctatccacgcttacttctgtaatctcaaagtcctttacctcacaggctttgcaatccaagatccttaaaatttctttactactaaacatacacttcgtttcattcactctgaacatataatatctcctcttttcccccctcccacttatacttatagccttttacttttttaaagtaccggtgcaaacaaacgcgccaccgattcacacactttttcccgtttcgtcctgaatttccatctttgtatcgctccctcggtactgactttcaaatctttcataaaatctaccgctaattttttcaccacttcgcggtcgtaaatgatcaggcttacttcgaaattctgctcaaaacttctcaaatccatattagccgtcccgacgctggccacactgccgtcaacaataattaccttactatgattgatccctttctggtaccaataaatctttacaccggcttccaacaattcttcgacatacgaacgggtacaccaatgtgtcagccaggaatcggacttatgaggcaacagcaatctgacatccaccccgctcatcgcagccgtcttcaaggaattcaatgtcgtctctccgggcataaaataaggtgtcgaaataaaaacatatcgtttcgccatattgatcagcgtaaaataagactgctgaatggaagcccagtcactatccggtcccgaagtaaccgtctgcacgataacattattatcggcctgatggtagggcaagtattcattcttatccaacaacaattcctgccggacaaaataccagtcgatcaggaaaatcacctgcaacgaagtcacgacttccccggtcactttcaggtgggtatctctccaaatgcctattccgggtactccgtccatataacgatcggcgatattcagccccccgacaaatcccacttctccatccacgacggcaattttccgatggttccggtaattggctttattcgccaaatggtggaaacgtaccggcaaaaagggataaatctgtatatcggatttcctcaattcccggataaactccttggacaagctccatgatcccacatcatcgtagatgatccggatttcgactccttcggcagctttttgaagtaaaatctccttcagttcagtagccaatctcccttctccgataatatagtactccaaatggataaactttttggcatttttcaaagccccgaataaagccggaaatgtctcttcgccattattcaaaatttcgacctgattataacgggtcaataaagctttactattattcaacaataaagtcatcagcttccgcacttctaccgtctcccgctttttcaaaaactccgatttccggatcagctgtttctgatcttcgctcatatactggagccatttcatatcgcccaaacctttcatcgaaaacatcttatttttccggtaattcacaccgaaatagagatagaaaaggaaaccgaccaacggaacggtcaccaggacgataatccatgccaaggttcgcaccggattccggttttcaagaatcacattaaaaaccacactggccacagtaaggatatacagggcgattaaaacatatatgataatttgcaaccaggacataaaaaatataaaaaatggaaaagttttcagttttcaattttcaaataattttatctttgtattatgaatacaatccatcatttatcccaatacgctttgcaggaactaaaagattcatattccgaacatgaaatcgaatgtatctgcaggatcgtttacatggatgttttgcattatacaaatatagacatccatcttagaaaaaacgaaattttagacgaaagctttataaataaatttatcggaatcgttcgcttattgaaatccggttctccgatacagtatatcctcggagaaaccgggttcgccggtttaagattcaaactgtccccctcgactttaatcccacgtccggaaaccgaagaattggtccgatgggtgggagaatggctcaagccgggcaaccgcctgctcgatgtcgggagtggaagcggttgtatcggaatttccctggcccggttgtgtcaaggagctcacgtcacaggggtcgatatttctccggaagcgattgagctggcccgggaaaatgcaatactgaacggcgttaaagcggaattccttctccgcgacatcctacacccccaaaccgcctcctgggacacttacgatctgatcgtcagtaatcccccctatatccgggaaagcgaaaaaggaacgatggaagccaaagtactcgatcatgaacctcatcaggctttatttgtccccgacgaagatccactcctgttttaccgggctatagcagaattcggactgacccacttacaccctcaaggacttttatttttcgaaatcaacgaggccttcggccaggaaacgatagccctgctgacccgatatggctaccggaatatcgaattacgaaaagatttttatggcaaagaacgaatggtgaaaagtgcaaaaccggcacaaacaggaaatcggcataattaatatcggatagagatgaataaagagaaagccttaagcttagcggccgctatctgcagtaaaaaagaacattgtagttgggaaatccaggaaaaactggtcaaatgggaaatacctgaaaaagaaatcgaccggattatgacttttctgcatcagcatcgattcatcgacgatgcccgttatgcccaagcctatgccgaagataagttccggttcgaccattggggaaaacagaaaatagcccttatgctccatcgtaaaaaaatcgatccggacctcatttcccaagtattagaagcgttggataccgatacctatcaggaagcctgtctcactctgttaaaacaaaaaatgaaatccctggccggcgaagagccttataaacgaaaagccaaactgatccgcttcggattaagccgcggattcgactatgaggtgatcgaccgatgcctccaacgcttacccggtcatacagacgaagaggcagaaaattcgtagaaatcagttcataaagccgatggcccctgcgatatttttttacaactacttcagcggccgaacgggccactccggttccgtcaagaaggcgcccccgcaagaagggtactgacttctatgaaccattcctgagaacaatggaggaaacagagcaaacttcaattctccgtttcttccaatttatagtggatttacttttttgtctcaccggatattagttttgatttttattttttatagttttgaacgaaaaattccggaaatatgtattcaattcataccttcttactgcaaaaagaactttttcgaagttccgaaccagtaaaaacgagtgtcgtatcttcttttaccgacacccctgctttacaacaaatagccaggcaggcagattcggattatatccttttctataccggtacttctcccatcgagctgcatccttatgcaatcgggcgcatgtaccagatagccgaaagtaatgacggagcactgttttacagtgattaccaggaaatccggcaaggcaaaaaaatacaccatcccaccttggaatatcaaaccggaagtatacggaacgattttgatttcgggcaactattattattccgtaacgacagttttcagcaagtagtcgctcaaatgaataccgattaccgttttgcagctctctacgaattaaggttaagtatttcgcgtttaggaaaaatcgtacatataccggaaaccctttataccgtacagcccaccgatctgcggttatccggtgaaaaacagttcgattatgtcgatccggccaaccgggaagtgcagttggagatggaagccgtttgtacagcccacctccaggcgatcggagcctggttagctcccgaatttcagcgtatagacttcgggcaggagaatttcgcccgggaagcctctgtgattattcccgtcagaaaccgcaaacgtaccattgcggaagctgtagaatcggccttgcagcaacaaactgatttttcttttaatgtcattgtagtagataatcactctacggacggcaccggtcagattctgacagaattgtcccggcggtaccccaatctgattcatcacatccccgcttccaccgaattaggcatcggaggatgctggacggaagcgatcctattaccggaatgcggtaaattcgccatacaactcgacagcgacgatctgtataaggactgtcatgtattacaacgtatcgtcgacaccttctatcaggagaattgtgccatggtgatcggtagctatcagatggtcgatttcaagttggaagaaattccgccagggcttatcgcccaccgggaatggactccagacaacgggcgtaacaatgccctgcgcataaacgggctcggcgcaccacgggcattctacactcccgtgttaaggcaaatcaaatttccgaatgtgagctacggcgaagactatgcaaccgccctggccatttcacgaaaataccccatcgcccgtatttacgatcccctgtatttatgccggcgttgggaagaaaattcagatcacgatctggacatacagcaactgaacaactataatttttataaagacaaaatcaggaccctggaaatccaggcccgaatttccgggaaataaccggaataaatttttaatttcatgaatagtaaagatttacttcaactctataacggccaacttcaggaattcgaactggctaaaaaaaattataccgatctgcaacaagccgtctaccgggatattccattcgatctttttcgtctccggatccagtataatccagccagaatgatttctaccaatgccagaatagatgtccggacattacagaaccggaaatgttttctatgccgggagcatatgccggaagcgcaaaaaggaatccgttacaacgatcgttattctatttttataaatccctatcccattttcgaacgtcattttacggtaccttcccgccaccatgaacctcaatgcatcgggggacgatttgaagacctgctggatctcactttcgattttcaggggtataccttattttataacggtcccacttgcggcgcttctgccccggaccattttcactttcaaatgtgcccgcggcatcttatgcctttggaagaagatgccgccaatgaagagctccgccgttatctggtaaaaaaagactactattcggtttctatattaaaggactatcttcgcgaagtgatccttttacaagcttccgactcccatctcctttcggttctctttcggcagaccatggaaatcatcggccgatccattccgttcgaagaagaaccgatgatcaacctgctcggctggttcgacaactgtcaatggaccgtttgtctttttccccgccgcacacgccgtccccggcaattttatgcagagggaacggagaaaatattgttcagtccgggatgtgtcgatatggccggcctgatcatttctccccgggaagaagatttccggaaatattcagccggtttattgaccgatatgttcagtcaggtaacctccggcccggatagctgggaagcgatacaaaaagaattaatccgattataagttaaccttgcctatgcagaaatattcacacctcccacaactggaagtcggtatcctgttttcaccggaaatctgtttccggctgaacggaattttcacctgccggactacaggaaaaaaatataccggagcatataacatccggcaaacagaggacggttacctgttaagtcaggcagatcatcgggaaccggtttctttacctctgacgttcgaaccggaagacgacacgacttccgacttcgatttaaccgatgtcgtcatcggtattcaatttcattgggaacgtaaggaaaatcaaaagtttaaggggaagctaaaaatcatcgacgaacaaaaacacctgacagcgataaatatcctttctctggaagactatctactcagtgtgatatcttctgaaatgcgtgccacctcgtcagctgaatttctgaaagcccacgccgttatttcccggagttggctgctcgctcagatcgataaagccaaaacagtacggggcacatacagctcttgccgggtggatcaggaagaatacattcgctggtacgaccgggaagaccatgcccatttcgatgtctgcgccgacgatcattgtcaacgctatcaagggatcagtaaagcctatacccctgctgtccgggaagcgctggaagctacccggggagaagtacttacctacgaaggaaccatttgtgacgcccgtttttcaaaatgctgcggaggagccaccgaacgcttcgacaatacctgggaaccggtagtacatccttatctggataagatcacagacgcacccgaagatttggaaaccggagacttacgggatgaacagacagcccggaagtggatcctttctttcccgcctgctttctgccatacaaccgaccggcaaatattgtcacaggtattgaacgactatgaccaggaaacccagcattttttccgttggcaagtcagctatccggccgaacaattatcggaattggtctatcggaaaatcggtatcgatttcggtacgatccgggatattcagcccatcgagcgaggtgtatcgggcagattgatccgtgtaaaaatcaccggagacaaaaagacgctggtcataggtaaagaattgatcatccggaaagctttctcagaatcccatctatatagttcggcatttatcgtcgaaaagcaggatggaatattcactttccacggtgcaggctgggggcatggagtcgggctttgtcagataggagccgcagtgatgggagcccggggctataattataaggccattttacaacattatttcaaagggtgtgagttaataaaaatgtatgaataagaaaacagaaaacaaagcggtttctccctggcaatgggtgccttctctatactttgcccaaggtattccctacgtcgtcgtcatgagcgttgcagtcattctattcaaacgcatgggcatgtcgaataccgatatcgccctttataccagtggtttgaatcttccctgggtgataaagccattgtggagccctttggtcgatctgctgaaaaccaaacgctggtggatcgtagtcatgcaaatcctggtcggtgcaggattggcaggaatcgccttgacgatccaaggccccctggctttccggtattgcctggctttcatgtggttgctggcattcagttcggccacccacgatattgctgccgacggattttatatgttagggttaaatgaaaaaaaacaagcttatttcgtcggtatccgcaatactttttatcgttttgcggttattttcggccagggtatactggtaatgttcgccggctggctcgaacaacgctacgccagggagatgccggaaaccgcagccatcccccaagcctggtcgctgactttttacctgctgacaatcctgtttgcccttctgttcgtttatcactatttgtttttaccccacccccggcgggatacttgtacccttccacctcaacaagcctctgccggaagagtattcaaagaatttctaggtactttcacctctttcttccaaaagaaacacatcgtcagtgccctgatcttcatcctgctctatcggttcgccgaagcgcagttggtgaaaatcacttctccctttctgctggatactccggctaccggaggacttgccctatctacggcagaagtcggctttatctatggtacgatcggcgtcatcgccctgacgatcggaggaattgtcggaggaatcgctatggcacggcggggattgaagtcctgcctatggaccatgaccattgccatgaacctgcccaatatcgtgtatctgtatctctccttcgcccgaccggaaagtataggaatcatatcgggctgcgtcgccatcgaacaattcggttatggtttcggattcacttccctcacctattttatgatgctattcagcaacggcaaacaccaaaccgcccattatgcgatctgtaccggtttcatggctttaggcctgatgctccccggtatgatatcgggttggatcgaagaatcgatcggttaccgggcttttttcgtctggatcatgctgtgtacgatacccagtttctgggctacccatctggtcagaaaaaacttaaccgataatcattccgacaacagtagccgataataaagaagcgagtgtgcctgctaacaatgcccgcattccgaactgagccagcagaggtttatttttgggagttaaaccaccgattccgccgatttggataccgatcgaagcaaagtttgcgaatccacaaaggaagtaggtacacataatgaccgactttgtctgagcaaaagctccggcagctttgaggttggccaaatcgacatatccgataaattcggtcataatgatcttctgccccaacaggctaccggcatggatcatatcctgaggagcgataccgatcagccacatcaacggagaaatcgcatatcccagaataaattgtaagttcagttctttacttcgtccgtcggtaacctgagcaatccactcgtttactcccgtcaggctaccgaattttgtaaacagataattggcaaaagcgataaaagccacaaataccaacaacatgccggcaacattgacagccaatttcaccccttcggccgccccattggatatggcatccaaaatattcttaccgaccttatttttagaaatctgaatattattattcacctgccgggtctggggtaccaacattttagcgaaaaccacagcccccggagcagccatcactgaagcagcaagtaaatgtttggcaaaaatcaaccgttgtaccggatcttccccacctaaaaaactgatataggcagccaatactcctccggctatcgtcgccattcctccggtcatcaccagaaaaatctcggaagggctcatatcgtcgagatattctttaatcatcagcggagcttcggtctgtcccaaaaagatatttccggccacagacaacgattccatccctgagatattcatgagcttagtcatcacccaagccatagcataaaccactttctgaataatgcccagataaaacaataaggaggtcagagccgaaaagaatataatcgtaggcaacacctgaaaagcaaagatatatcccgctttggtggtatccatcagatcccccaacaagaaaatacttccatcccgcgtaaagtcgagaatacggataaagatcttaccgaaaaattcaaagatagcctgtacagccgggacataaagaattccgacagccaataccaactgcatcgccaaaccgatccccaccactttccaggaaatagctttccggtctttactgaacaaccaggcgatcgctaacaaagaaacaatccccagtaatccccggaataccgacatgaaagagatatgactttcaatattagcagccgattgtataccaccaccttgctgagccaacacagggctcaccacaaacaatacaggcaaaagccagcaagctttctttaacacaccactcataactcagattttagagctgcaatttaaccctaaaaaatgaataaaaaaggggggagtataacttttttttatacattgccatgttttttatccatatcattaatatcaaatccgatttatacatgaaacgtttatttctcattctgtggtgtatctgttcggtcgtctgtttttttatttcttgtatccggaagccggacaaagcgacactcaccatttactgtactaccgacgtacacggtagtctttttgacttcgatttaaagcaaaaccgccctactttatacagtctggccggggtagccggttatctctcggaagagcgtaaagcgggtgacagggagtatattctattagacgggggtgatatccttcaaggacaaccttccaactattatttcaattatatcgatacccttcagaccaatattaccgcccaggtcctgaacgatctgggttacgatgccgctgccgtaggcaatcacgatatcgaggcaggccatccggtctatgataaagtggccggagaatttcactttccctggctagcagcgaatgcaatagatacccgaaccggagcaccttacttcaaaccttacaccgtactccaccgcaagggactcaaaatagccgttttaggaatgatcaccccgggtattcccaaatggcttccccagcatttgtgggacggtatcgaattcgaagatatgatcgggacggcccggaaatgggtacctctgattcaggaaaaagaacaccccgacctgctgatcggcctgtttcatgccggttacaattacaactatgccggtgaaaacaaagacactccccgcaatgaaaatgccacgatgttagtggcccggcaagtagagggtttcgatatcatcgtctcgggccatgatcatcaggaaaaggtagaagaaatcacaaacgacgcgggacataaagtgttgatcgtggatgcccgttcgcatgcccgggctttaggcaagatcaccgtcagcctgacccggcatgccggacattacgacaagacctataccgccgaattgatcgatccggcgaaagccccacgggatacggcttatctccggaaattcacaccggccctgaatcaggtgaaagcctatatcgacactcccatcggcgaatttaccgaaacattatcggggcgggaaggcctgttcggtccttcggcttttaccgacttcatacataatgcccaactccgggaaacccgggcagacgtttcgttcagtactgtcctgcaaatggacgctaaaatcgcccaaggcgagattaccatccgggacatgttcaatctctataaatacgaaaacggactttacctgatgaaattcaccggacaggaaatcgaccgctacctggaatatgcttatcaactgcaatataacaccatgacttctgcccaagatcatttgttgaatttcaaaaaggatgaacagggaaatatcgttcgcaaccccaaaggtcactatgtattagccgccgactatttcaactattcatgtgcagccggaatcaaatacacagtagacgtcagccggcaacccggcaaccgggtagaaatccattccctgagcgacggccgccctttccatgccgacagcacttacaccgttgcgatcaattcctaccggggaaacggaggaggcgggcatcttacccaaggagtaggatggacaaaagcggatatcaatcaacggatactaaaaatctgggacaaagatgtgcgttactatatcacggaatacattaaagaaaagaaagtattgactccgcgttgccgcaacgattggaaagtcattccggaggcctggtttcaggcaggcaaaaaacaggattataaaatcatatacgaaagccattgagttacttcatcactccgcagaatgaatcacaaaaaacggggctcatcgctgagtcccgtcttttatgattgaaagtgccatgctctacccgactgctttcaaagaatcttcgacatattcgaattcagctttaccggtcaccacatatttaacggtatacaccgtcgtatctttcgtaccattgatcccatagatcgagaagttgacggtataggtcacttcgacgcccgtcaccacatcggcatcactgtaaatagcttccaaaccgatccgaaccgcttccggcagacgttcgaacatcagtgcagtcagctcttcatccgaaagatgctgatacgcggcagctccggccttattactttccctccaagaataaggataaaaactaaagttattctgataagaagaagctccgtaataaaattcggcattggtataacgcgtctgatagtaatcggaaccgaaagtctttccgacataatccacgatagcctgatagaaagcagccgactctgcatttcctttgacagcttccagcgtgattgtcatactcggatcgaatttccagacaccaccggcaaagacatactgttgtgtgaggtcgacaatccgggtattcagcgtccatctgccagtcgcagcggaataggtatattcatcgctataattcttcacctctttgccattgttgtagcgataaaccaccacacggttttcctgatctaccggataagcgattgcctttgccaaataattcggcaaataatccgcagcaggaactttttcggagaaacaatactggttttgtcccatttctttatagtcctgtaccgacaaaacaagtacattcttatccgcattattccatttctttccgtcgaacaccttcaaatcgaaggccacgtctgctttcaatccctctccttccggaattttcgaaccgatcatcacgttgtcgatctgataagtcgtagtctttttgttcactccgtcgcctaaatatttaaaagcaacgaacacctttttaccaccgtattgtgccaggggaaaagtaccggcagaagcgaaactaccgtatccttttgcgggtgcactcggaatagtaaaatgagaagtaatatcagtccaggttgccttttttacgtccttgccgtcaaaatcttccgaaatccataccgtaagacaatcggcattccagtttccgacacaaacatcaaaactcagtttatcgtcagcaccgaccgtcatttccggcgtaaccatccaagcctcgcactctccttccgtcttataagcagaatactgtatgtattgattgttgttataagcagtcaccttccactgtgtgcctcctgtagagctgacgaaccaatctttttcagattcccaatctttcagccgggtcaaattacccgtcccgagatcttcaaaattctcccaaagttgtggggtctccaaagtattgttactttgtgcattatatctatattcgactaaaacgacatctccctcttcgggctcttcatacccgttgatcaatagatcggccactttattttttgtattctcattgaggtaaggcacgaactttgcatttccgtgtgctgcccgataatccttattcccagccttataggattttatcgaagaataggctgaaagtaattcggacttattttcccggtaactataagttactttcacactcgaaccttcatcggcagtaaaatacttagccgccaaaaatgccggcagataagtcgggccgggaaccgtttcattaaggtacaaatcggttttcactgcagctaacgccttatcggtaccttcttttttagcgatactcttattcgtactattgtcactgatagccgcataatccgcttcaaccaaggtatatttctcttttaccacattcgcaggcttcacgatatcatccaggccatcgaaattcttatcattataatcgcatgcccccacgatgaaagccatccatattgtactgaggatatatattttcttcatcatttttccaattataaacttcattactatctttaaaaagttattttgaaacgtacggaataagtacggccaaatccataatatacctgtgctgtcgtccaatcgtgtgtcgtaccgtcctctgcgtcggaaatatattcctgatccaatacgttatttacattagccgaaatgattccccaaacttttccgagcgggaaacggtaactcatattcacatccatacttccggcagacggaattttccaaggagtatcatatttcatcgttttacccaattccttggataaatcacttccctgcagcttgaatttggcataattacgagcccaatgggtataatcggctcccaatctcaaacctttcaacacctgataattggctccgaaagcaaaagtcgtctgtgccgagttgccgactttcacatctttcaaatcgacatccactttcgcatgttctttactcttttctgtcgtcactaccccatctttggtcaaaggtattccctggtcattatatagataaccggtagccctgctattccagcgccaatcggctaatgacagcatacctgtcagctccagattacgcacaggtttcaccgttacctcgagctctactccctgatgtaaagcgtctacccccgtcatattgatccgtccccgttcgtcagaatcctggaaagtgacactggctcccatactcttatccatccaggccgtacgatagaggttcaggttagcggtgaataccggagaacggaaaccatatcccaattctacagagaagatcttttcattcacagcatccttattcagctcgttgctattttccttattcaggaacacggcatattcgaagaaaggagcttttgaaataaaaccgatattggcaaatacattgttgtgttcatccagattataattggcacctcctttgaccgtcccactccagaaatcggctttacctgattttgcatgtgctttgtcgtaatagaaacggtcataacgccaatacatcgtattggataccgaaccggcaataaatgtagccagggcattccggttgaattctacttgtccgaatactccttcctgcgtaacaaaaccatcgtagttccggtatacgacatcaccgactttcaacttctcattcttccagttcgcatcttgtgccaacgcattattttcagcttttacatttttacggctttccgaatcgacataataatctcctccataaagatccaccaggacagctttgtgggttcctttataataccgcaggtcgagaccgccgtatacattaaaatactgaccgagctgagtggtgtaagtcgataacaaaccgtaccattcatggttgttgatattattggacatcgccatctgcgaaccgttctcgctcttcatattcaaatcataaatggctgcataatcgaatgtcccgtcagcagcccggaattgcgtattcaacgttccgtccaaagccgtagcataccagctgtttttataagtactgtttccttgtccgcgataaccgcctccccgaccgatagacacatataaggctgtcgacaaactggatttttcattgatcgtccagtaatggttcaaagaaatctgaggtttatggaatttattatatccggctactttccgctgtccgttcagtccgaatccataaacagcattgaatttatatttattggcatgtttctgccattctgaaatcaacagattgtcatttcgctgattatgccattggggagcccccaatacggtcagcgagatcatgtgtttgtcattgatctgcttggatacatttccgaaataactgtacgcttcgaactcggtcccttgtacataaccgtttccccagctcttagcacctaatatcgaaatcgcccacccgttacgcaaaccggtagaaacattgaatgcgatcttattaaatccgtcgtttcccacagcgtaagagatacctcctccggctttgacgtcggtcgtattggtcacgatattgatagaacctcctaccgaaggggcagccaccttagccgcaccgagtccgcgttgtacctgcatcgaacgggtaacatccgaaagtccggcccaattcgaccagtagattttaccgctttccatttcgttcatcggcactccattgaccataacggccacattttcactttcgaagccacgtacatttacccgggaatcaccgaatcctccgccttgtttcgtagcatatatactaggtgtagattttaaaatttcaggaaactcctgagtggagagtttattttctatggctaccggatcgatcacagctacagccacaggagtcttccggctaacagctaccgaagcagtaaccgtcacgtcacctaaaccgatggattcggtttccaaagcaatggttcctaaattcagttcttttcccaaagtcacctcttttttcaattctttgtaaccgacacaacggaaagttaaggtttgtttgcccgtctgaccggtcttcaaggtaaaactaccatccagatcggcagctacgccttccgaagtaccctccagcatcactgtcgccccaaccaaaggttctttcgtttgagaatcaacaatttttcctttaatcgtcccttgagccaccgtcataaacgacatgaggcacaaagagagcataagtaataaagccttagtaaataaacttttcatacaataacatctcttaatattaataaatgatttaactctatttttcacactaccaacgctctttaaaaacgaacgtataattttatatataaaaacaaaatcacattaaatatttaacacaaacatataaaagtcaaaactttttataataataaccgtttcgacgccgtaaaaatatagaattaatattacaaaatagctatatcgattcttttaagacaaaaaaagagaaaagccaaactatccggtttattttttttgttggcaaccggcatataaaacattaataaacaaatgattataaaaaaacaagcacatttcattcaaaaaaatccggcattttgtaactgtttctcatttttcggcgtataactccatgatttagcacacaccacggggagaggaagtttataaaacaagctgatttccaaagcagttctttaaaatgacgaaaaggtataccacgggatatttacaccacgcacacaccacacagacgcacatataataatttcttttcaaaaatccctgcctgtttcaattttaaagtctcaaggaaatgtctccctaaaaaacacagaagacgcaatcagttgcgccttcttgttttttacaaaccgtattgtaaacaaaatagagcgtctttcgacgatttactacctgaaaattgaaaagtctgccgaaatcatggatgcttatgatttttgcggtctccggtatgcaaaaacagatccgaagcaatggcaggaaaagttcaaactgccccgttttgtctatttctcccttcgactggaatagatatatatcatccgggaacaatagagtactttgtccccggatgattctttaacggatttcggaaccgttcttcacctctttgtcaggacggacaaaagccagggaaccatcggcattttcagccatcagaatcataccctgcgactcgatgcctttgagtgctttaggctccagattcaccaggatactcacttgctgcccgatcacttcttcaggggtataatattcagcgattccggatacgaccgtgcgggtatctataccggtgtcgatcgtcagcttcattaatttcttcgtcttcgccaccttttcggcagcaatgatttttccggcacgtatatccagtttagcaaaatcatcgaacgaaatattttctttcgccggttttacttgtgcattagccatctcattggcctttttagtagccagcaatttatcgatttgtcgctgaatctgctcatcttcgatcttctcgaacaacaatcccggttcattcagccgatgccctgccgacaccacctcatctcccatccggttccaggcgatcggagctatattcaggaaatccctcaatttcgacgcactgaacggaataaacggttcggtcaaagtagacaggtcccctgcaatctgtaaacagatattcaaaatagtcttcacccgggcttcatcggtcttgattaatttccagggttccgtatcggccaggtatttatttcccaaacgggccagattcatacattctttgagtccttcccggaagtgaaaattatccagatttttctctacccggctgataatctcaggaatttcagccaatacttctttatcataatccgtcaattctccgcgctcaggcactataccgccgaaatatttctgcgtcagcaccaatgcgcggttgatgaagttgccgtaaatagccaccaactcactgttattccgggcttgaaaatccttccaggtaaaatcgttgtctttggtttcgggagcattggctgtcaacacataccgcaacacatcctgtttgccttcgaagtcacgcaaatattcatgcaaccatacggcccaattccgggaagtcgaaatcttgtctccttccagattcaaaaactcattggccggcacattatcgggcaatatataactaccttctgctttcaacatcgcagggaaaataatacaatggaatacaatattatctttcccgataaaatggatcatccgggtttcgggatccttccaatatttttcccattccggagtcagatctttcgttgcagaaatgtatccgataggagcatcgaaccagacatagagcacctttcctttcgcttcatcgagcggtacgggcaccccccaatccaaatcgcgggtcacggcacggggctgtaaaccattatccaaccacgatttacattgtccgtaaacattacttttccactctttatggccttccaaaatccattctttcaaccaatcctcatagcgatccaaaggtaaataccagtgtttcgtctctttaagttccggtttattaccggtaatcgccgatacaggatcgatcagatcggtagcattcagactggtaccacaagcctcgcactgatcgccataagcccgttcattcccacaatgaggacatttccctacaatatagcggtcggccaaaaactgtccggctttctcatcatagaactgcatagaagttttctcgatgaattttccttcgtcatataacttcttaaagaaagccgaagacaattcatgatgtgttttcgaacttgtgcgggaatagatatcgaaagagataccgaactcttcgaaagaatctttgatgatttgatgataacggtcaacaatatcctgaggagtcactccctctttctgagccttgatggtaatgggcactccatgctcatccgaaccaccgataaatactacttcttctcctttttgccgcagatagcgcacataaatatcggccggaacataaacaccggccagatgaccgatatgcacaggcccgttagcataaggtaatgccgtcgtgatcagattccttttgaacttagccatatctcttcttgttatttcagtttcaaaatcttaaattgcagtgtgcaaaggtaagaaataattgaaaattgaaaattgaaaattgaaaattacttatcttcgcacccgaaaagccttatcgctttctgcctatagcttatagcttttagcctatagcttattactttttaattttactgtatgttcagaccaccatatcttcaatccggcgataaagtcgccctggtttctccggcaggtatcatcgatccgctatcgatacatgatgcggtagaagtgttacgttcctgggaactgaatcctatcgtaggcccgaacgcggcagctacctacggctattttgcaggccgggacgaacaacgcctgcaggatatgcaatgggcgctcgacgacgaagacatccgggctatattttgtacccgtggcggatatggcagtttacgcattgtcgaacaactggattattctattttccaaggttccccgaaatggcttatcggattcagcgatattaccgttttccattcgaagctcaacacgctgggcattgaaagcatgcacgcccctatgcctaaaagttttcgctcaacaaatccggcagccttattacgactgaaagaatttttattcgggaaaatatcttcttaccggcttcctccccatccgttcaaccgagaagggatcgtacaggccgaactgacgggtggaaatctgactcttttacattgtctgcgttcttcggtattggaatgtaaacaccaaagttctattctatttatggaagatgtaggggaaaatctatattcgatcgaccgcatgctacaaagcctgaagctaacggataagttttcaaaacttcagggacttattgtcggagactttacagaaatgaaagggctcaatttcgggaaagatgcttatgaaatcatacaagaagtattcgccgactatacttatccgatctgtttcggttttccggccggacatgcagagaacaattttcctctgatcatcggttcgacgatcgaaatggagatcagtgctaccggaactaccatccattttcaaaatgattaaacaagcctgtaaatgagaaaatacatctttttcgtatcggttattttaatgggagcttgccaatcaccggcagtcttcgaaaaatatgaagaacaacccgacgaagtctggaaccggtatcatatcgtcgaatttacagccgacatcccggacagtggacaatatatagtgaaactctgtttgcggcataccaccgattacgagatggccaatctttggtgtttcgtctctacccgcagtcacggacaagagcaattatccgatacggtaaacctgaaaatagcagaacccgacggccgttggttgggaaaaggcaacagcattaaaacattggaacaaccgatcaatcgtaatccggtgactcttccccaaggaaatgtaatcttccggatcgaacaaggcatgcggatggaagaaatggccggagtaaaagatgtagggataaagatcgagaaagtgcaaactcagggataaggattaatcagattcatagaaaaaagatggcaaagaaaaaactggcacgatttgcagaaatggaagtattacccaatgtgttccagcccaagcatgaagaggtgtttcgtacggattaccccctgaagggaaaatggaatgaggaggtctttcataacgatcatcccatcattctggaaatcgggtgcggcaaaggagaatatacggtcgaactgggaaaattgtatcccgaacaaaattttatcggactggatatcaagggtgcccgtatgtggaaaggggctaaaacagctgtagaaaacggaatgaataatgtagctttcctgcgtatgtatgccgaaatgctcgaatcggttttcgctccgggagaaattgcagaactctggattaccttccctgatcctcaaatggctaaagcccgtaaacgccttagcgggacccgttttttgagtctctaccggaaaatactggccccacaagctgtgatccatctgaaaacggacagcctgtttttataccgatatacctcggctctgatcgaactcaaccacttaccggtagaagtccgaaccgaagacctgtacggctgcggctgggaagataaaattttgagcattaaaacattttatgaaaaacagtggctatcgagagggaaacagatcaaatatctccgtttttctttaggagaagacatccctctgaccgagcccgacgtagaaatagaaaaagacgattatcacagcgaaacacgctatatgaacagtcacctcgttcacggaaataaagcaatcaggaataattgaaaatggaaaagaagagagtattgatggctatgagcggaggtatcgacagtacggtcgccgccatgttattactagaacaaggatacgaattggtcggcgtaacttaccgtactttcgacaatatatcccggggatgcatggagaaagaaaagggatgttgcagcgtcgattctctgttcgaagcgaaacgtatggctcaggaactgggattcgaacaccatattctggatatccggcaagaatttaaagatacggtgatcaccaattttatcggagaatatctgcaaggacgcactcccaacccttgtgtcatctgcaattcgacgatcaaatgggggaaattgatcgagacggccaacgaaatgagatgcgattatatcgctaccggccattatgcccgcatcggtcaccaggatggacgccggtatctgcggaaaggagcagacctctcgaaagatcaaacgtattttctttggaccctgactcaagaaaatctatcccgtacgcttttcccactgggcgaactgactaaacccgaagtgcggcagatcgcttttgatcacggatatgaaaaactgtctaaaaaaggggaaagtcaggagatttgtttcattcccggcaatgactaccggacttttctggccgaacaggtcgaaaactatacggaaaaatacggcccggggaacttcgtcgataccagtggtaaacgcctgggcgaacacaagggataccccaactatacgataggacagcggaaaggactgggtatcgctttaggccagccgatgtttgtcatagccattcatcccgaagataatacggtcgtactaggcacaaaggaagaattgcaaggaaaatctttctttgccaaagagatcaacctcatgaaatacgcaaaaatccccgacgggctggaagtcaccgccaagatccgctaccggaatgaagggaagaaagcttttttatatccggaagacaaccgcctgcgtgtcgtctttcatgaaaccatggattccatcacccccggccaaagcgccgtattctatgaaggagaagacgttgtggggggaggggtgatagaaggtaaaaggctataagctaaaagcctttagcttcatagccttttcagcttctcttcaatgatcccggtgatcacatcccgtaaagggagacccatgacacggaccattttggggacgaaactgttggcggtcataccgggcgtggtattgacttccaacatgatgatttcttccccccggacaaaaccgtcgatacggacgattccttcacaccgcaggatgtcatatacctcggaagccatatcctgaatccggccggtaatctctgcagaaaaacgtccgggaataatctcatccgacatttttgcatcgtatttagcctcgtaatcgaaaaattcttttttgggaacgacctcggcgacaggcataaccacttttttatcccctactttgtataaaccgcaggtaaactctatcccatcgataaagctctcgaccaaaatctctctgcacatcttgaaagccccctcgaccgcagcatcgaaatcggcagctgtcttcactttagacacaccgaaactcgagccttcggcattgggctttataaaacaaggtaaaccgacagccttcagcaccgcttctttatcgaaagcctttcctctgaccagcatgatcggatgagtcgtattgataccaaaagcattcaaataattcgtacaggtatatttatcgaaagtaatggcttccaccaaagtattacaggttgaataaggcacccccatcatatcgagataaccttgcaacatcccgttttcaccgggattaccatgaatggtgatataggcgaaatcaaaaacaactttcttcccctggtattcaaatgaaaaatcatttttatctaccggaaatttctgatctccgatctccaccatccaatctctgccccgtaagatcatcaggtatttattgtatttttctccgtctacttctgaaaagatatgattcccggattttatagatacttcatattcagaagaatttcctcctgcaatcaccactacattttttttcatgatctaaaagttatattttcaattcctatcgtgcaaaattaactttcaaattacaaatatcaatttttgctgaacaatatttccatcccaactttcgatatttaagaagtacgatcagtttacctgcattcaacccgattcagattttgtcataaaaatcactatatctttcccgtctccagcatataatacccgttccgcttctaccggataaaggttgttatattttttctttttattccgattccgggttttataccgtcagaccggagcgtctgaaacggtcctgttccaatggtctcctatgcgttcagaaacatacccgctccctgaagaaattacctttgccatgatgtttatatttagttctgaagttgataatataataaaaaaagtttaaatctccaatttattttcaatttaatgccaattttaattggtgttaaaatggagattaattggaattgaattggagttgatacatattaactatatggtaactacctatttactatatggcaaagaactaccttcctcaggcttttacttgaagcagaaggtaaaatgaatattactcttcaataaaactctttttgaaaccaggataaataaactgaatctttattgatggatcctttcgaaagtattcaatcaataccgctctccaaatacgaataccgaagacgaataagtacaaaaaatgctaggtttatttcgttaccaattcgtctccggtgatcggaattggcgacccggtcgcttctgtcggtcgtctacctttttctttcactgaccggcggaactcctcactacgttcgtcagacaccaccggtcgggcgttcagaaaaagcaaaacgacactcgccagagctccaatggtcgccaatcccgatcaccttcgacttacgttatcactgaattgcagaccggtcttgatttgagaaataacattctacctggaaataatccggacggtc

SEQ ID NO: 5872 - DNA, 5882 bp, Unknown
  gut microbiota DNA sequence
ctttcatcgaattcagtagaagcttacttaaacgacattaagaagctggcaaagtattgcgctgacaaacatcacgttacaacgcctgatgcgatatcctacgaccatctgaaagattatttgatgtttataaacgaagttggagttaccaatcgtacacaagcgagatgtatttccagtattcgttcattttataaatttttagtattcgacggacagttggaaaacaatccgaccaaattactcgaagctccgaaaatcggacggaaattaccgaacatcctgacaaccgaagaaatcgacgccatgttgaattctgtagagatgtacaaaccggaagcccagcgtaataaagccattatcgaaatgctttattcctgcggattacgcgtttcagagctgatcagtataaaattatccaacatcaatttccgtcagggagttgtgaaaatcgaagggaaagggaacaaagaacggatgattccactgagcaaaaatgcaaaacaggaaatcaaacaatatatgaaagtataccgcgattacctggaaattgaaaaaggatacgaagatgttttattcctgaacaaacggggaactgctctttcgagagtaatggtgttcaatattatcaaacacctggctacccgtgccggaatcaagaaaaatgtgtctcctcatactttccgtcattcttttgcttctcatttggtgagtggaggagcagacctgagagcggtacaagatatgttgggacatgaatccatcctgacaacagaaatttatacccatctcgacgatcattatctgaaagatacaattaataaatttcacccgcgttccaaagggaatgaggaagaaacgaaataataaataaaaaaagagcgtgaacaacgctcttttttttatcttcgcggcaaaataaaatacgatggaaaataacgaggaaatactaaagaaaatcagcagcggagatcccgaagcaatcgcagaagctgtcgataccgtaaaggaaaacggcgacctggttattgccggtaaattactggacatcctgtcccagcctctcgcaccgtcgacaatcactatcatcgccaatttgctggccgatattaaagataatcagttcaaagacctgttaatccaaaaactggaacagacttccgaaggaacgctcaagaaggaattgcttcggattgtctgggaatcttcattggactactcctcctatttagatcattttttacaaatcttgcaggaggacgattttactgtagctttcgaagcttccacagtgattgaaaatctggttcctcacctgatgccagaacaacggacaaaattaaccgacatactgcaagtatttcccgaggacaaaaagtttttagctgaaaatatactggaagaactcagttatcaggagtgagccaccacctttttacgacctctactttttcttccataggtatcccggattccaaccaatggatatcgaatccatcgcgttccattttccggaaccaggtcatttgccgtttagcaaactgatgaatggccacgttcaattgttgcaccatttcctcatagcccaactgtccggtcaggtacagcgtcaggtatttatattccaaaccgtaataaatcaaatcttcgggcttcacaccactttgcaaaatccgttccacctcctccaccattccctgctgcaaacgggcatgtaatcgctgcgtgatacgctcccgcctcacctcccggctcacgtctaccccgacaaccaaaggatggatctgaggaaagtctttttcctcataaggatgtgtcttataatattcttcaatttctatcgcccggatggcccgtttaggtgtatctatctctgtcgtattatgcaatttcttatatgtcgccaaacgagcggccaattccggcaaagacagtccggccaatgaagcccgtaaatcctcgtcgaccggtacagccaataacttataccctttcaacacagcctccacatacaagccacttccaccgcataacacaggcaaaacaccccgctgcctgcaatcttcccaaaccttcacaaagtccgcctgatattcaaagacattatatttatacccagcctccacaacatcgatcaaatggtaaggaatttttttcccctcccatacatactcatccagatccttaccggtcccgatatccatcccccgatatacttgccgggaatcggcactgatgatctctccgccgaatgcagcagccaaacgaacagccaaattcgtctttccactcgcagtcggtccgacgatacacaacaaatcaaacattttatcttcgattacgtattacccaggcaaaggtagtgaaaatataaatgataaattaattacaagccaaaaggagttaaatacggagtaaaaaaactatatttgtaaaagatggaaatttccattcggataagggaaaagttaagaaaaggattgattacagtatgtctgttttactgcggttttcattccgctctcttaggtcaatctttatccagaagcaaacaaaacaataatatggtaacgagtcggcactattcttcggcctttgcaggtccgcaaaataaagtcgtatcctccttttctttcggagaatacgacttccgggatactctcccgggtaaaaactataccatacaattattcacgtcgttcgatacaccggcagatccgattctaacagaaagcaacaaaataaagatcatccggatgggtgaattataccggtatattttctctcaataccatgcactggacactgcccgtcaagcgttaatccctattcgccgattatacccacaagcctgcatccgggaataccaggaaggaaaattaggccctattatagatatgaatattgaccatagaataaatgacaaaacttatgatgcaagatgaaaacattctgatccgggcactcgaacccgaagatttggagtacctctacaagtgggaaaacgatatggacctttgggatgtcagtgacaccctgaccccattctctcatttcacactgaaaaaatacattgaaaatgcccatgtagacatttataccagcaagcaattgcggctgatgattacacgtgtcgatacccaagagcccatcggactgatcgacctgtacgatttcgacccttatcaccagcgggccggcctgggaatcatgattcacaatatggaaaaccgcaaacaaggctatgccagctcggcgattaagctcatgctggattattgtttcgaaaccctgggcttgaatcaggtatacagtagtgtgcccagttgtaacgtggccagtctgaaactcttcgaagccacgggctttacccaaaccggttaccggaaacaatggttaaaaaggggtaatgaatgggaagatgtcatttacttccagcaacttgcctctacctggaataacaactaaataatctctcatacgctataaacctttgttcggatagattgtcttatataatataaaaccaatttttatagaaaacatttattgaactaaaaaagcgattatgaaaaagttagtattcttagccaccacattattgatgttcctggccataacagtaaatgcccaacaaaggggcccgcgtgaacgaatgactccggaacagcaagcgacccggacggtcgaacgcctgaccaccgaattaaagttgacagacaaacaacaggcagacctgaaaaaatggtataccgaatcgttcaaaaagcgtgaagaagccatgcagaaaaaccgggataaccgtgaagccatgcgtgatcaaatgaaaaaagaccgtgaagctgcagacgccgaactaaaaaaagtattgaccgaagagcaatataaaacctacaaagccaacgaagaaaaacgcatgaaagagtggcaacaaagaggtcgtcaaggtggcggacaccctcaacgataaaataattgatgagggtgtccaaaaaggcaaaatacccccttgtagaatcggatatttgatttcagtctccaatagggatacgaataaatcgagggtgccaaatactttttggacaccctcattttttatcctagccctatcccctgttcattccagcccgaattgacaagctcttcatccatacacacgcatagactttgttccatccaatcgaccataacaacataaagaatatcttaattaaagcctttatagtttactttcgtcctgcctcccgacctaagttcctacttctggttatatcatcaaatctttcacactccccacgatacatcatccaacaacttaccacaatttcctacaacagctccaagagagtagtccgactttctgcatcggtaagtgatggcttatgacatgtacaatacattgattgttaatatgctcgtatggaggatttccctttggaattgttcgatgcaacatgttagaccaattgattaccaatagtttgaaacttaaatggtataaaagtctgattttgcccctttttctgcgctgaacttttgcaaagataatgcgttttttcggtacaaagaaaacaaatgaaaagactttgataaaaaaggcgattttgggtgtaattttgtaagtctttcaatgatatttacgaaagatgttgtagggtgcttcatctgttattatgttgtgattataccgcagattatttctccaagattgaatacgaagtgacttataccgattgctggcgaaaagaaaaatcagtcgggtaaatcttccttttccctctgtttgacttaactttattgcccgtgtatataataacggtcattaaagtcaagttgagtatctttttcttttggtaggcaaataattataccattcgttggctatttcaaaacatattactacttttgtattgtaaatatcaatatagtgaatataatggcgatatatagtatttaattatcagtataatgatatataaatatgaaagatttgtttgaatactccactcccgaactggtacgcatgttgggtactcgttttaaggaatatagaatgcggtgcaatctgacacaaaaagaagtgtcggaactttcaggtgtcgggctgactaccatacacaagtttgaaaatggtacggcaggcaatctttcattgtcgacatttattctgttgttgaaggtcgtcggtcagattaattctttagacgatattttgccggaattgcccgaatcgccttatcttatgcgtgaagacgagaaaaaagcgcaacgaatcagacactctaaataagacatacagatatgatgaagtcgttaaaaataatgctttgggatgaagaaatcggtcgcttggcttgggatgaacgccgacatctttcttatttcacatataatcccgattttatcaaaaaaagattgaatatatcccctttggttgcacctgttgacggtaccagagggctgttgcctgtttggggtgaagatgccaagatttaccagaagcttccggcatttgtcgcagattcattgcctgatgcctggggtaaccaattgtttgatttatggcgtcaacagcaaaaaatatccaattcagagataaatccgttggataagctctcgtttataggcagacgaggaatgggagcgttagaatttattccggaaactaacagggagcgaagaacagaaaaaatagatgttaagtcgttggcagatttggcagaacgcattttcgtagaaagagagaatgcccgtattatgccggaggagtccataaccatgcaatctttgttgactgtaggtacatccgctggagggcgtcagccgaaagcgattattgcgataaacagagaaacaggagagatacgaagcggtcaaattgc

SEQ ID NO: 5873 - DNA, 1360 bp, Unknown
  gut microbiota DNA sequence
gcagactaagtccggcctccggtacgaccggtcaaacgtttctgaccttgaggctcttcgagatattcggccttaaaaatctgaacacataagacaaagatagaaagcaacaaaggtccgaaaataatccccataaaaccaaataaggataagccgataaccaccccgaaaatggtaatcaaaggatgtgtatccgccattttccgctgcaaaaccgaacggatcagattatcgacattcgctacgattacaatacaatagaccgataaacccaaagccgtccaccaatgtccggtagctccgatgtacagagccaacggaatccatacgatagccacgccgatcaccgggataaccgtagcgaaacaggacacgactccccacagaatcacttcaggtgcaccgaaaatataataccccaacatagcaattcccccttgaatgatggctaataaaggtactccgatagcattggattttaccaccatatgaaattcgtgcagtacatcccgcttattcctctggttaaaaggtaaaatatcgataatatagtcctccattttccgtccgcccaccaacataaaatataacaccaatatcaataccaatacgttgataataaagttactgatactccccatcaagatttggccgactttaggcagtaccgataataaagcaccgatattccctttactcaaaacatcgtatccggtcttttcctgaacaagcttagaaacatgcccgatgggctccatcaaacttttaggatcgagattgatcgcctgcaatttactgattaaaagccagacgaccagagatatcggaatcagaaaaatcagaatagtctcgattaacatgagggtagccatcaggctttttttcatatgtttcttttctatcagatagagcatctgattgcgaagcagaatatagatggtcgctgcccccagcagtccgcctaaaaaaggagtagccttgaaaaagatcaccactcccatcaccaggataatggtaatgagggaatacttccaatactgttcttttgtactcatcttccacttttctcttggtcccattcgagaatagtcggactttgaatatttactccgaatttccgggctttcatcaagatccggcgtgccagctcttcttttttatcttcaggagcatacctgaaataggcttcagctgcccggacatgcggcgcatcgggcattggaaattcgcgggtttcgggaataccgaaatcttcgtctttcaattcgcatcgttcttctgtgttcagtttatcggcaatctgtcctttcatagcaaacttttttcaattacagaggttctaaggttgcaagacacacag

SEQ ID NO: 5874 - DNA, 44094 bp, Unknown
  gut microbiota DNA sequence
ctattaactcagcaactctattaactcagcaactctattaactcagcaactctattaactcagcaacttatcataaatcagcttcaacaccttaacatgagcttcccgttcgcttttcgaagaaccgtctaagtgtccgaaaaagcgatgttctgcaacttctattccacaaaattcaaaaattccctgatcggaagtttgtttcatcgattgcaacattccaatcttgtcataataatcataaggaaatcccatgttattgaggataacgacctttttacctgccaggagcccctgtaactgcccttcctcatccatattataagcaaatcctttggtaaatacccggtcgatatatcctttcatcagagcaggcataccggtccaccaaatcggatatataaaagtcaataaatcagcccactggatataatcctgttctactttcacttcttccggaatttgaccgtgttttaccgcatcgaaatcggattgctctaaaaccggatgaaaaccgatattatacaaatcccggacattcattgcatttccggacatttctgtcaattccatcaccgcctctttataaactgcactcaaagatttagggttcggattacaataaataatcaaatgtttgagttgtttttttgcttccatagttttctgtattatcacaaaacaaataatttcaaagtatcttccttaattaaacgcagactttcctacccttgttgcaaaaccatttgacaaaactcggaaaaataggtttgaaatgtaatcagtttgtaaaactctatccactgctatcgttttatccattttccccgtcaatccttcctgaaattttaaaacatttttatacttgaattcgtttgcatataaaaatatacagattaagagctatttctactaaaaataaaatattttcgcatcataaaacagaataacatatgattgattttaaaccgatcgcaacaactgataaagaattacttacctcgtttatacttccttcggacgaacaagactgcgacttttcctttgctaatttatgcagttggcatttcatgacggaatccagttatgcccttatcgaggatcatttagtgattcgtttcgtcacttctgaaggcaaccatgaatatttcatgcctttgggagaaggaagtccgattccggttatcgaagctttagaggcgtgtgccctctctgaaaacgaaccgttgtgtttacggggagtacaaccgaagatacaagataaactggagcaatacttccccactttattcgaatatacgagcaaccgggattatttcgattatatttaccgtcgtcaggatctggccgaattaaaaggcaagcattatcagcccaaacggaatcatgtcaataaattcaggaaagagtaccgatacaactatgagccgctaaccccggaccttattccggtatgcttacaattcgaatcggaatggtgtatgaaacacggctatatcgaaaacgaaaacatccggaacgaacggcgtgctttgacttatgccttacatcatttcgaagaactggatttgacaggcgctgtgatcagtgtcgacggcaagattgcagctttcactttcggagcccctatcagccacaacaccttcggggtgcattatgaaaaagcagatatcaatatcgacggtatttacagtgcgatcaaccaggaatttgcatcacatctaccggaacaatacatttacctgaaccgtgaagaagatctgggtattcccggtctccgccaggcaaaactctcttatcatcctgtattattactcgaaaagacgaaagccatcaaaagacaggccatttgaaaacactaaatccggatagatgaataaaaaacagcaagttatggaattatggcgccggtgttttgaagacacggacgaattcattcggttttacttcgaacgaaagtatagcgacgccaactcactgatttacgaagaaaacgggaaagccctgtcagccctgcaaatgcttccttatcccatgcgttgggaaaatgtcacggtcgatacatcttatatctcgggagcatgtaccctacccgatgtccgcaaccggggctttatgaccctgctcctccaaaatgctttgcaggagatgtacgaccgcgggattgccttcagcaccctgattccggctgaagattggttattcggttattatgcaggccaaggatatgttaccgtcttcgattatgcccttcacacttatacccctgctaatcaaactataccccatactctttcactcactacttccgatcgtttcgacgcaaactttgcccggaatttatttccctatttcgaccaggagatgagtaaaaggaattattgtatccaacatccttataacgattatattaccattgtcgaagaagcttacctgtcggaaggacaactctgggctacttaccgccaaaatgtaccgaccggttgggccttggctgtacctgaaaaggacagggtttgtgtcaaagaattgttattcgacaccgaacaggagaagacagaactcctacagaacattcatgccttttggcctgacaagaccttagtttacaaaactctccctgcagtttcaggtaacatcagtctgggtatggcccgtctgacacatgccccacaaatgttgcaatattttgcccggcttcatccggaagtcgctttcacgctcaagctgaacgatcctcaagtaccgtccaataacggaatatacaccattgccggcgggaattgtatacacacagaccaaatttccggaccgatcgacagtgaaacggatattccggtcctcacccaagccttattgggatatcatcctgatatcttaccggctcctttaaaccgattattccgggaagcaaggccctatatgaacttaatgttggattagacttactctgtaacaggaagtttgaacgggattgtcaataaaatttccttttctgtattttcccatttaccgggatattcttctaccaaacgaattgcctcacggttgcatgagggcgataaacgttgaatgagtttgatccgggcaggtaaaccttttcgattcaagcgcacggtcaattgtatctcgccttgcagtttttccaaacgggcatcttcgggataacgcaaagaatccgctacataacggttgaattctttcatccatccggcatgatctatgacaacttcttgtctgaatttcctctcacctgctcctctgcttttcgtatggacaatccttgtccgacgctctttacgggtatttttttccaacataaggctatccaagtatacagatttcgttcctacggcatcggcatcgttttttttctttttatctttcttttgggtatctgccttaggcaaagtcactgcatatccggttatcggctgtttccgccgaagatcggccggtttcaggacacaagagtcaaacgcttgcctagccgcttcgtttgtgacggccatcgctacaggctccgacaatacatccgcacttccggattcatcggattccgaatccatatcctcaacagcttgcacttgtcggtaaaatacttgttctttcccagctattttcccgataatcttccgtacaggcagagttacggtatcggtcacacctcgttcatccagctgtgccgccatcaattgtaaactatccggacgaataatcggttcacttttatccatttctgccacgacaacttcttgttgccgaagggcactcctgttcatcaagataaccgcaagtcccgccagcaacagcaaagaagccgctgccccccagcgatataaacgcacagtcttattcccttcccttttcttcattcgtttttgcaactgctgtacgattttctcatgatccgccttcacagtagtcaatccttcgacagcttcatacaaaaaaggatcggacaacatctcccgttcgaaccggttagctcgctttccggttctttctccctgaagatattcccatatgtcgctttgtctactcattggcctttattccttttcgttcgagacacaattgcaaattacgttttccattctgtataaagctcttgaccatcttcaaagtaaaacccgaagtttgcccgatttctttataagacagttcatccataaaaaaataacgaatgcaaagccgttgtttctcaggcaaagcttccatacactcctgtaatgctttctcctgccgatcggtctctctgctgtattcaagattaaagtcatcgcaaaattccataaatttttcgtctaatccgacaaaattatttccactccgccgtcgcaattccatcaagcaataattgcgcacacaactatacaaccaggctttaaatacctgtatgtcgtgatgcaatactttttcgaacagctcttcccaaatctgcatcacagcatcctgagcatccggtacattcttcagatacttcaaagccacgccgtataccaaaggcatataacgctcgtacaacccgattaagtaatccggtttccgagtacggcgataaaagctcaacaactctgcgtcactgtatttatggagatctttattcactagccaacaaatggtttacaaagataaaataaattcatttatatagagaccgaattttaaattcgatttctctacccagaaaaaggaaacggtttcgttgcttagccttcaattcgaatcaacgactaaagttttttaacaggaactgcaaatcctctcaacaagaacggagtaaatctcagcaaaccgaaaatttctaaacaactaaaatccagaattaaatgttttataaagtccttgaacactgcgggtgctttttcaacagtcgctgatacggccggccggaaccgaaggttcgttaaaaagagaccacagactttattaaattccgaaaagtcacctaaccctaaaccgggttctaacgttaaaaccattgaaacgaatcaataaattttaatcgtatgcaagaagaatacaaacctgccgcaatttattcaccgatatctatcggaaactggattatctcactgattttgacaatgatcccgatcgttaatattatcatgctgtttgtctgggctttcagtaacggtactaatcctacaaaagccaattgggcaaaggctgcattaatacttattctggtttggatcatcctgggaattatcttcggaggatattttatgcgaatgttttacgggaattatccgacatattaaaaagattacagctagacagacgtcaagcctaaacgtttttttagttacaacggttacagtagttaaaattgacctttaggggacctttttaactattgaaaccgctggaactatttaagatgcagacatttattgtttagaattccttcatcattacttagagaaccgaaaattctgttgcgataaaatccttcggattttctgttgaaaattttatcttaaagttcgaattgcagaataaaaacaggtatttataagcacaaatatgtatataactgcctattttagtatttttcaccgtatagtcaacgaatactggcttatccttacaaactgctcattctctcccctaagtgagtaaagggcgacttatttttgtagtagcgaattataaatcttaaatttactgctataaaaactataatttgcaaaatgaatcgtgcacatttataaaacgaaatgtgtacaatttattcggtcaaccatacgacatacacacacaattatatatgctacctaccgaacagcagacgaaacccttcctccggcattgcttgcagcagtttacagctctctttatctctgtcaacaccatatttcttcataatacgcccttcgatgaaacaacaaagatagcgaaatactcacaaaaaagccattccaacgctttccaactcttttcgaagcaccggaatgacttaacaccattcaaactattcccccgacttatattatttcagttgattcaaccagttgacaatctcctgcagcactgccggagcaatggtctcttcaatatcggaatactctacgggagaaccggtaacggcaggctggaacatatggttcaagcctgggaaaacaatggtcttcacctgagtgttaccattctctgaaatccctttcctgataaactccagattttccaccggcacctgacaatccttgtctccattgagtgccaacaccgggcatgtaatttccgggaaatcccactcgggattgtatttcaacaactcgatcttggctacattatacaactgctgcgtcgttgcggctgcctgaccggccaaaggagtaccattgaaaagttcggttagcttccgttcacaagtggcagcatctcccgattgcaaaacaatatcctgcgcctgacgcatatagttgttgtatttttcaataaaatcctcttttacaccggatgccctcaacaaggcagcccgctgcatcagcaacagttcgctgccgcttacgcctccgcccgccaaagtgatgataaaaggcacctctttccgggcagccatactgaatgccacgaaagcgccttcgctatgcccgatgactccaacactatcggcattgatttccggacgctgtttcaggtaattaaccgcagccacagcatccgcatctgcatccggtaaaccgctttccttcaaattgccgccggactttccgacaccacggtcatccacacgcaaggtagctatcccgtgacgggccagataatccgccagaacgaaaaaagttttgtgctctgaaaaagtgttattgcgatcctgaccgccactgccggaaaccaacaccacggccttgcacctggctccactggctggccaagtcaatgttcccgccaaggtgactccatcatccgcattctgaaaagtcacctcttccgaatgataagaaaaaggctctttcggagtctgcggacgcttgaacaccaccggcgtgcgggtaagaagaagctcgaaatcatatccttcccacaaaaaagttcccttcagcgaaccgtcggcctgaagcctgagaatactgcgagtctgcgcatccgcaatattcaccgtcaaaacatgatccgccaattctaccgcatccgcccgataggtcttttccgacaaatctggaatcttcaacgtaacctgatagccaccaccggccttttcgacatgatactccagacgcaagcgcatattcttcaaatcgggataaccataccacttacccgttatatcctgtgcacccagcgtcagagaaacgaataataaaaacaaaagcgaaacaattttcataatatacgatattaaaataccaaccatatgtctataatacgcgccacccgacaaaagggggggtactcatccgaccacaaagccacgagctacggaggagttacagacgagcctgctttcaaaccaaaagggaagcaggagcagcaacaactcatatcatggaaaaatcaaagatatcaggaaaggattttcaaccatacgggcaagtttttgcttgccgttttttttatgctccttgaccgtatcttcagaaatccgcaaacggctggcaatttccgaaatcttcaacccttccaatgtaagctgcattacgagacgacactggggcggaagctgttcaatcgccgccatcagattggcatagacatcttcctctaacactttttcccaaaaactacccatttcagatgccgtatccaacaattcacgctgataccggtcgcgcacctgctgctttctaaaataactgacacacctgtttttcaaggcactgtaaaggaaatatttaacctcatctccactgataaagcggtgggtagattccaataacgaaataaacacttcctgcaccagatcacaggctgtctgatcatcttttacataccggatagcaatggatttcaaggctacgaaatagacaccatataaatgacggaatgcccggttgtcctttcgcgccaagtaatgtagaaggagttcttcgttctgaatgcgcataaaattcataaatcaataaaacaaagatactacattatctataatttttcagtctcccccccttttttcttagttgcgcgtattaaataatatcgatgatattttattgggacataacacaaacaaaagatatgcttacagaaggacaggataaaataaaagaaacactctccatatctgacaagatcagtgatattctcagcgaagaagcggatgccgggagtcagcatgtgatagattcgtggcttgcacaaaatgaacaaaacaaggctttgttcaacaaaatctgctctgacaataccatacggaaaaaaatttacaactacaaaaacagtgatgcagaacaagcattcaacaattttctgaaagcaagaaaacaacgttcaaaccgccgcatatattaccggttcttatccggcgcagccgtcattgccatttgcttcggattttgggccctgacccgaatacaggaacaggcaacgcaaaatctgcaagttacagaaacagagcagcagctttcggacatgcctgccaacaagccggtgttgacattgggagacggcacacggataaacgtctggggaaacaacctttatttcaaagagacagaaaaagggcaaaaaatcatgttgggtgattcgttgctttcacaaaaggaggattccataacggcagacaactacaacacactggaagtgccgcttaagtgtgacttcagatttaccatgagcgacgggaccaaagtatggataaatgcaggctccacactgaaatacccggcaaaatttgcagccgattcgcgtacagtatacgcatccggagagatatatctggaagtggccaaggatgccgaacgtcccttttatgtagttgttgacggcataaccgtcaaagtattgggaacctccttcaatatcagggcatatgccgatgaaaacgagacgaaggtgactctactcgagggaaagattgccgcacaaatcaacgataaggagtacacgcttactcccggcaaacaattaaaatgtgacaagacttttggagggaccagtgtccgaacggtagatcctgcagagattgtttcctggaccagggggtattacatattcaaaaaagcaaggctgcaggaggtggcaaatacgctgaaaaactggtatggagtcaacattgtgctgagcagtggtgccagcgacatcatctatacgggagtagtcaacaaagaagagaaactggaggttttcctccggcgtctggaagaggtatccaacgtaaaatgcaactgcaacggtaagttcgtaacaatatattaaacaataaattcatcatcattaatctaaatcatcaagtatgaaaaaatggatcaccctaaacttgtgcctgttactatccggattcctggccggacagtctgaaaacaaagaaacgcagcccgtcaaaggctatgaaatcaacggcttcatcaccggcaaatacaccggcaaggtatatcttgtaaaagaagacggcatgcacggaccacaaaccaaagtggacagctgcgaagtgaaagagggacggttccggttcaaaggagatactgtacccgaatactccgtgatttatttcatccaaagccacgacggtcagttggcacccgtctttttggaggcaggtcagatgaacatgaccatgcgtgccgactatttcctgggttcagtaaccaaaggtaccatcaacaacaacctgtggtcgctccaccagttgcagacaagatactggatcgacagcatgctgctggcttccaacacccactacatgcgctacggacgcggaagttttgcagtggaggacagcctgttcaaataccgcacctgggaacagaacaccaagaaactgaacatggagaaatacatggcacgcttctataacgaccaggctttcgcaccgttcatcatgctgttcgagatgaccaacgaactgtcattggacgaactgaaagaattgcgcggacagttgaacgaaaagctcaacaaccacccgtacaccaaggagctggatgaaatcatcgccaacaaggagttcaaggtgggcgtagaggctccggaattctccatcaagggaatggacggcgaggacatcgaactgaagaactttgcaggcaaatacatcctgctcgacttctgggcatcctggtgcggaccatgccgcaatgaaatgccgaatgtagtgaagctctacaaggaatgcaagggcaagaactttgaaatcatcggtatctctctggaccagaaaccggaaccctggaaaaaggctgtgaaagacctgaagatgacctggccgcaggcttgcgacttccaggtatggtacggaccggtggcacgcaaatacaacctttcggctgtcccctacaccgtactgatcaacccggaaggaagaatcgaagccctgaacctgcgcggagaagagctgatcaataccatcaagaccctattgaaaaacgacaaaaagaaataatccgaagatgaagaaaatattggtttgtatgcttgtatgcctgttctgtgcaggcgtacaagcccagaaaacagcgaaaatcaaggcaaccgctgtcggatataccggcaaggtgatcgattttgagtttatagacaacacagcgaacaaccagcagtttccgttcaaggacaaccaactgatggagttcgaggtggaactgaaagagccgggcctgatgaaggtaaacgcctggctctggatgattgtatgtcccggagacgagattgaaatggccatccaattccagggaaaaaactacaagcacgttgagttcaagggtaccccggctgccgtcaccctgaacagcgccatccgtgacggacgcatggtgcgcatcaacgaccactacaagaccaacccgttggcagccgtggtgacacaggtgccggtacagacctattatgatgcctgcctgcggaactggaagaaggaacaggagattctggaaggcatccgcgacaaggtggacccgttcgcattcaactatatccatgcggaactggagggcatgtacctggacaacctggtgaaatatccgttcatcgtatccgatgtaaacaaaaaaccgcttcaggaatgcactccgaaaggctattgggaggctctggacggctatcaggtgaaaagcgacaaggcttcattgaaaagctacgcctacatcggttggttgatcgattatctggaataccgtgaaaaatgcgaggcccggaaagccggcaaagagtacaagcctgccggaaacatggaagagatgtatgagaaactgtcaaaagtgtacgaaggcgatgtgagagacgctgtgctttatctgtttttgtacaacgccatatcaaaacagcaagacttcgacgtaatcaaaacacttagtaaagattacttcaaaaaatacaataagaacaagaaatttaagaaggagttgactgaaatgcaaaagtaatatgtaacagtatctgcgaaatatcctagacaaggaatttactacagctgacgacaatatatttactaactaaaattacaaatttatgcaaaagaagaaaatgttacaggaatttctaggccatcggttcctggtgtttgctttatttatgctgattttttccggtggactaaaagctgcagaggaagaatatcaaaaaaagaaaatttcagtacagatagttaatgaaacaatagaacaagccctaaataaaatcggcaacattgctgatatccgctttttctataatcatgcgtcatttgatttttctaaaaaaatcaatataaatatcaccgacaaggagttgcgggatgctatcggacaggtgttggcaggatatgccgtagatgtggaataccagcctaaccgtaccgttgtattacgcccccggaaagagctacctgcccatgacgtacaaaaaatcagcggtgtggtaaaagatgccaaaacaggcgagccgctgcttggagccagtattgtactgaaggaacagagaggtgtgggggctgtgaccaacatggacggccgtttccacctggaaattatggaaggtagcgctacagcactggttattagttttgtcgggtatcaagaagaagaagtcaacattgccggtaaaggagatatggcagatgtcgtggtaaaactgacagccatgtctattgaaatggaagatgttgtggtaacaggtatggcgccccgtaaagtgtccggttttaccggccgttatgtcactgtcaaaggcgatcagttgaagaaattgaatccgaacaacctgttgcaggcgctccagcttttcgacccgagtttccgcatcgtggaaaacaatacggcaggttccgaccctaacgcattgcctgaattccgtctgcgcggagacgtccagttgggccagggagctaccggttccagtgcagatttccagatgttgatgggagactattccaaccgtcctaacatgccgttgttcattctggacggttttgagacgaccttgcagcgcattatcgacctggacccggagcgcgtagaatctattaccattctgaaagatgctgccggtactgccctttacggttcgagagcctctaacggagtgttggtttttgaaaccaagaaaccgaaaccgggtgcattgacgttgagttacagcggcaatgtgggaatttctgttccggacctgtccgactacaacctgatgaatgcgtccgaaaaattggaatacgagagatctgccggattgtttgagagcgtagacatgttgaactattacaacaaatacaaacaggaaatattgcgcggagtaaacacctattggctgtcgcaaccgttgcgtacggcactcacccatcgccacaccctgaacatggagggcggagacgaggcaatccgttatagcctgagcctgaactacggggatgagttcggagtcatgaaaggctcggaccgtaacaacgtaggtctgaccctttccttgcaataccgccgcaagaaatggaatatcagcaactcattgagcatgacaaacaccaaatcgcataattcgccttacggttcattctcggaatatacgaaactgaatccctattaccgtctgacagatgaaaacggccgttaccagcaggtaatagaaatcaagcccatgtcatcggcaaacaacccgaagacggttaccaatccattatataatgtacagtttcccaataaagacctgtcaaacaatttcagtattgtagacaacttctctatcgaatatgccattatggacaatctccgtgtcaacggacaggtgtctttgacaaagagcacggcccgttcggagcagttcaaatcgtcgcaccacactgattttgctcctgaagaagacctgacccagcgcggttcctatacaaaaagtaccggagagtctgtaagctggaatgccaacgctgccttgaactacaacctggtaaaaggcaaacacggaatgttcgccttgctccgctgggatgtctcttcatcgaaaagcgacggtatcaacctttctgcaaagggattcccggatgacaacatggacgatttcctgtttgccttcgaaatggaccagcgggtgaacggagaggaatccacccaacgcagcgtgggtatgaccggttcgttgaactatatgtatgaccagcgtttttccgtagacttcaatatccgcggcgacctttcttcacaattcggtgccgataccaaaatggcacccttctggtcggtggggctgcgttggaacatggagcgcgagaagtggctggagggaagcatcatttccaatctgacgctttttggaagtgtcggaacaaccggttctcaaagttattcgccttatcaagccaaggagacctattcgtttggagatttgatgttcccctatccttcgggagatgtcctgggagcacagttgatggcaatcggaaatccggatttgggatggtcgaaaaccatgcagaaaagtgtctctttggaattcggtttgtggaacagccgcttgaatgcaactgtttcatattaccacaattacaccgatgagatgttgctgggaacaaacatccagccttctaccggtttcagcacgctgacccgtaatgtgggagctgtattgaatgagggtgtagacgtttcattgaatggtttgctcatcaacaactacgaaaaccagttccagtggagtctcagcgtaaatgccacccacaaccggaatgtcattaaaaagctgtccaatgagctgaaagaaatgaaccgtaagaaccaggaaaatagaaacgagatattgcctatatacgaagagggtgaatctacgactgtcatcaaatccgtacgttctttgggtatcgacccggcaaccggtcaggaactgttccagaaattgaacggcgaaaagacctttgtctgggatgctgccgacaaagtgccggtaggcgacacggaacccaaagtgcgcggagcagtcaactcttcgcttatatggaagaacctttctgtcaatttgggtttctcctatcagttcggggcagaccgctacaaccagaccctggtagataaaatcgagaacatagacatctcgcaaaacgtagaccgccgtgctgcgggttccgaccgctggagtccgacaaaccgctatgcaaaatacaaaggaatctctttctttaatcagcagacaccggtaagtacccgtttcttgcagaaattaaatgaatttgtattcaattccgtatccatcggctaccgttttgagcccaagcagttcaaattcctggaagcatgcaagattgcaagtttgtcgctgaatgcttccatgcaggatatcgggcgaatctcttccgtaaaacaggaaagaggtctggattatccttttgcgcggagctttaacctgtctttatctgtattattcaattaaaaagaaatgtcatgtttagaatacgaattttaagtgcttgggttataatgacaatgctcttttccgcctgtgcagattgggtgaatgtcagcccgaaagatgaaatagaagccgacaagctgttcaaatcggaaaacggtttcaaggttgccctgataggtgtatattcccgcatgaccttgctcgacaattacgggaagagactgtcgtatgattatatagaacgacttgcccagcgttacgacaactacgacatatcggttgctccgtctgacaaaacgcgtgcggaaatctatgattacaagaataatgcgaatgccaaagaggatgtcaactccgtttgggtaaaccagtttggaaccattgccaacctcaataatctgctttaccgcctggagcacgaaggaaaagatgttgtgcttacggacggctattggaatctgatgaaaggtgaagcattgggtttgcgtgcattccattattttgacctgcttcgcctgtacggtcctgtatatagtgaagacccggagatgaaatgcctgccctggcgtacggaattcaatgccgaccagaaatccctggagtctgccggtgtcattgcacagcacattctggaagacctgacgcaagccgaggagttgttgaaagacgacccgttgaattataaaaatgatttgaataacccgttcctgggattgcgcaagcacagaatgaacaaaatggcagtcaaggcgttgatggcaagagtgtatctctggattggcgacaaggaaaacgctgcgctgaaagccaaggaggtgatagagcagtgtggactggagctcgtgataagcaatatccaggatgcctccctgtatgatgagactattttctgcctgggcatggatgatatggcgaacaaattgaaagatgactggaaaagcatcaacacttacagtaatgaactgtatatctcgtacgataatgcaaacactgtatttgagcgcaccaccatcggcttgaacgatatacgctaccggaacagctacgggtttatccacggcaacaacgggttgatgtgccgcaaatatctgagcaaagacaagaactacagcgagaaaataccgttgatccgcctctctgaaatgtattacatcctggcggaatccgtttctctgaaagagagcgtcacctatatcaataaggtgaggaatgcaaggggaatctcccgcaacaataacatcgaagcaaacgattcatacgatgaggctgcacgcaaggaggctctgaacaaagagtaccaaaaggatttttttgcagaaggacagtatttctatttcctgaaacggcacaactataaaaccttctggcgttgtccggttgagaagatggactattacgtactgccgactccggatgatgaaattgcctatggaaacgggaaataacggttaaccattaaaatgcaagtactatgagaaaatatatttattcgatttttctgctgggtctgttttcctgtcaggaagaaggcgtggtccaatatacgcaggaaaaagacggtttgcagttttctgccaacagcagtgaagatatgaccaaagtgttcaattttgccactgccacctatgaagaggaaataaacggcgagccgaaaacattctattacggggattcgctggcagcatatacctttgaacgggttgtgctggatttgcaggggttcccgactcccgatgaaagagagtataaattgaaaaccgttttggtggaagaccaggattccagcaaggttgccgaggttgtgtttgagccgtattatagcctggctcccaatcaattgaaagataccatcaagataaccgtgttgcgtcccaagacaagagggacctatacggtcggaattacggtcgatacggaagggaagggggcgttctttgacaagggtgttgtggaaaaatccatattgcgcctggatatcaaggatgtgtatgaacaaccggaaggttgggacgaacgtcaggagtggctcggagaatttgacgaagaaaagtatgcttttatggtaacggtttccaaacaggcattcagcaaggaaaacaaccacatgtggaacgagacggacaaatacaatctggagttgcgcgaagctctggatgaattcaatgccaatgcagcaccggaagaccggaagaaattcaaatttccggtaacgacaaaattggtatggtgggacaaacagctgaaattcctgggtgaattttcggaagaaaagcatgagtttatcaagaatctgctgagtgaagagggtgagaccttggcaaacaacagtaaattggaatactggaatctggtgttcagggatgcagttgcggaacagggtatctccgaattctctttcccggttgttaccgtgcagtcgtcctggtggcgtgagtccctgttgggagctttctcgcccgagaaacaggaattcattgtccgcgaacttttcccgcgcagtgattatcaaatcaaagacggcacctgggattatgccaatccggtgctgcgggtgttgttggaacaatacaatgcagaacatccggaagctccgcttgcctttgattttccgatagaaggacgtccggaatggtgggatttccgagaatcttatctgggagaatattcggatatcaaacgggacattgcggttgttgccgtattgacagagcagatgtattacggcgaatgcaacatcaatcctttggtgaaccagaatatgagcatggataatgtcatgggtgccatccgcgatgctattaacgcatacaacgaagaacatccggacagccagcttgaattgccggtttccgctccgggatggtgggctgaaaagagctattatttaggcgactattctccggaaaaagaggcattcatgcagcagataatgccgatgtatggtgcaacatatcaggaatgggcaaactggacagattggaaccccattttccgctatgaactggcagcctacaacagtgctcatccggacgctccttatggattcactttcccggaggttgataccaaaccatcctattgggatgagttgccttatttgggagaatactcggaagcgaaacgggtgtttatatggattactttgatgcctatgaattatggtaatgttgacggttggttcttgggagctccttctgaagggggaaatccaagcgactggcctgcaagacatgcaaccttgaccgaggcatacgccaatacatacgaagactttatgaagaaatatgccggtgcaaatccgacaccgtttgattttccggcttcttggtaaatttaatataataggattatgaaaaagacaatatcaatattcatgctggcagccctcttaatcggagggttgaccggatgctatgaggacaaaggcaattataaatatagggacattaacgaggtcacttataagatattgcctgaaagtgaggacggctattaccggttcaagcagccacctgtggatacgatgtatgtagattacaccgttgatttgtcacagagccaggcaaccaacgaagaaaacctggagttcttgtggctggtcagctacagcaaagacaaaaaaacagtgaccgataccatcacgaccagggatttaaggctgacattcccacctaagaaatcctctgctttcgatatcgtgttctccctgacggacaagcagacgaatgtcagttcgtacaaagagttgcatattaagatcgtttatccgtatatcaacagttggttggtattgaacggggataaagaagactcccgcatttctgccgtggaagaccctgattcgttgaattatttcttcacggaggacgcttatacggcattggggtataaaaaacgttttaaagatattaccgagttggtatatgcaccggtaatcaccggaaacggaaatgctccggagtggctttatattgcttctcctgacagtgtctgggcattgtttccttttgaaatgaaggtggaaaagaagcagaatgatattttgccggaagttatcactgagaataataccaaagtggcatacggattggatgggtctcccagcagtggcggtgccgtgatattggtagatgaaaacaaacgtttttattactcaacttttaatagcggaagaggtaaatttcaggttcccgaaatagcacaagaactgaatgaaacctaccaagttgatttgattgcaaaatctcaaaagagtagctacctgtgtttctgggatgatgaaagagacaagtttctttatttcaatttgggcggaggaggtgaaattacgcttttccccgaagaatataacgactggaccggcaaagaagtgatatggatgggaacggacaacaaggacaaagagcataaggatggaattgcaatggctattgtcaaggataccaaggaccaaagctattggacttaccgtcttagcactgaacagaccattacaggcgactctatcggggaattgccgattaacaaggattcgcagtttgccacgacaagcgcattccctgaccagtttttctataccgtagactccaaggtgtatctgttcaatgtggcaagtctggaaacatacgaactgtatgatgcaggaagtcccattacaaaaatgcaattccgcatcacggaagatcaccaacttaccgaagaatggaattatatgcaacgctgtctggcacttgctgtagacaagggagacaaaggagaactgcacgagctgactttgacaacggcaggagatatcgagacctcccgtattttcgagggattcggtcccatcaaggatatgtgtttcacctttattaatcgcattcaaaaatgaaaaagatagtatacttgcttttattggggttggcaggatgccagcaagagggcgtaatcacagaagttcccaaagacgactggtcggttgtagcgaataccgccggacaggtaaaggggcaagtgaacatcaaattcaaagagctgccggaggatttgcagattgtgaccacccgcagcggagtggatacggacaacggacagttgaacttcgttatccggcaattgggaggtacccgcctggagcgggtattcccccatgccgggaagttcgaagcacgtacccggaaggcaggccttcatctgtggtatcaggtgtctttcgacgagaatatccctacggcagaggcaatgaaggcactgtcagaactgcctaatgtttccattgtagaacctatttacaaagggaagacagagtcggtatcgttaccttataatgacccgtatctgccccgacaatggcatctctataatgacggcagcaacgggatgctggcaggtgcagacatcagcattctggatgcctgggagattgaaaaaggaaagccggaagtgattgtaaatgtggtggactccaaggttgaccttaaccatgaagatttgcgggacaatctttggaagaatcccggagaatttaaccagaatccttggggagacaacgacgggaacggttatcaaggtgactggcatggaatcggagcgaatcctgttaccggagttgcggaggatgatcacggtacccatgttgccggtatattggcagccaagaacaataacggcgtgggtatttgtggcgttgccggcggtgacacccctgacaacggagtacgttttatgtgctgtccgttcaataacggcaatcctgctgccagcatcaaatacggagccgaccacggagccgtaatctgtacgaacagttggtttatcgccggaggctcggttgccgaagtcatgcaggatgctgtcaattattttgtaaagaatgccggtatcgacgaaaacggaaatcagacaggaccgatgcggggcggtattgtattcggttctgccggtaatgacggagtcgagccggagagccactatcctgcttcgctggataatgttatcgcagtcgcagccctcgaccctgcctttaagaaaagcgattattccaattatgcagagtgggtcgatattgcagcacccggaggcggaaacggatatggctggcagatgtggagctgtgccagaaacaataactacctggaattggtgggaacttcgcaggcaacacctgtggctgcgggagtggcagccttgattgtatcgaagtttgcccgcgaagggttgactccatacgaagtggaatatcgcctgaagcgcggtgtgaagcctattgatgactataatccggaatataagggcaagttaggtgtaggatgtgtgaatgcgttgctggcattgagcgatgagcctataaacttcctcccggtaattacagcacaaaagccaatagaaggagtgcaaatcataccgtatggttcgacagcccaatatgtctatacagttagcgatacggaagacggaaccgatttggactatgttttggaagaccccagcaagagtgtcactgccaccaaacaagacggaaccatcatgttgacagtgaacaacaggaattgcattgccggagaccacattgtaaaattgacggtgacagaccggggagggctttcaagcacaaccgagctttccattaaattgcagccggaactgcttcaagaggttgaattgtacccgaatcctgtggtggatattctgactatccgtgccagcatgacctttagcggtgaaatgagagcctgtctgtacgatgcttccggtaatttggttctggaacgcaaggtgacagcctctttacataaagccggagagttggatttaagcaaggtggacggaggaagctatactttgaaactctactgcaacaataaaacaatcaccaaaaacattataaaattgtaaggatatgaacagattaaaatatagcctgatagcgatatttgcatttggaagtctcgctgtttttggacaaaaaagcacaggggcggcacaatttcctgaacttacgcccgatgttcgcggagtaggtatgggaaactcgggagtggcggcaactgccaatgctttctcaatataccgtaatgcagccaagagtattttttccacccaaaaagccgagatcggttatagctttactccctggttgcgcgaattgtccaaggggagcaatttacatggggtggccggttattggaatctggacgagaaacagggaattaccgccggattccgttggttcaaccattcggagaccaatatatgggacaaggaaggcaatgatgccggaacttttactcccaaaaattggagtgtggacgtaggttatgcccgtaaactgacagatgatttgtctgtaggagcaacagcccgttttatccgttcggatatgagtggtcttgataaggacgatgttgccaatgccgttgcatttgatctggggctttattatagacgcaattttgaaaattgggaacagtcgcagtgggctgtcggtttgcaggcatccaatttcggcaccaagatcgattacggctacggtaaatatgaccaggcttccaaggttgccgccggcggtatgatcgaccacgtatttacagacaaacaccgtctgcaaggaaccttggatgtggcttgccaggtgttacccaataccaattggggcggaagtgtcggagtggaatacactcttttgcagattgtagcgattcgtggcggttatcactacggcgaacaggacaacaaactgcaacgctacggcacgttgggatgcggtgtcggttgtcaccacatcaaagcagactttgcctatttgattccggagaaggacagtcttttaaagaatacatggcaggtggcattaagcatcgatttgggattatttaaaagataatccctattaaaaacaaaccatttaattcaatttgaatcatgaagtatttattgacatgtattttcctgttagcggcaacttcctttcttgcagcccagacattccatatccaaggaaatatagagcttgacaaaggggaattgcttgtgctgacccaacaagtggaaggcatggatactttggcacagacaaagtttgaaaacaaccggtttgccctgaccggcaatttgcaggagccggtagtcgccttgttgaagattgccggttatgagggcggttttgtcatgatactcgaaccgggcatggaatataccgcgaaactgacccgtaacggagccggcgatatccgtggaggaaaactccaggatatttacaatgattatcagaaaattgtagccgatgccaatgctgaaagccgggctttgaataaaaaagcatcggaagcagctgcccaaaagcatttcaagacatcccacgagctgaaggccaaagcaaacaaagtgcagcaggctgcctttgacaagatgaacaacatcgtccgcaagaatgcagacaatgtgctggcagcctatctgcagaccgccggttcggaacgtatcatggaactggaaccgctgaaacagatttacagcctgctttctgagaaagcaaaggaaacagctccggggaaactattggaggcacgtatcgctgacttggagaaagtgggtatcgccgctaccgctcccgactttaccctgaccactccagaaggaaaacaagtgtcgctctacagcgtgaaggggaaactgaaaattatcgatttctgggcttcctggtgcggaccgtgccgcatggaaaatcccaacatggtgaaactctacaatgacttcaaggacaaaggtcttgctattgtcagcgtgtcgctggacgaacgtaaggtaccctgggtacaggctatcaagaaagacggtatgccgtggacgcatgtctcttcgctgaaaggatggaagtgcgaagtagtgaaacaatacaacatcgatgccgtgccgtcgattatcgtactggacgaaaacaaccgcattttagccaagaacatcagagctgaaaaattgcgtgcattcgttacggaatacctgaaataaaatacctgtttccctatcggaaacaaagtcccgaaaaagaagtagtccccaaaaatgaagtgtcccccaaaaagtcggacataaaactttttgggagcacttcactttgcgatggggcagcattatcaaaaaatcgaccccggaaccaatctacaaaaacaacattaagatcaattgagcaaaaatcacacggataaacatggagagcggatataccgtcgcataagatacggccggattatctccctcgacggtcgcattgacataattcaacgccatcggattggccatacttccacacaacatccctgccagggaaccgaaatctattttcatcaatttcaaagcgataacggccaccaggacaacgggcacaaaagtgatcgcaaatcccaaagctacccacagcagcccttcgggacgaaacaccgtctcaaagaaatgtaccccggcatctaaccccagacaagccaggtaaatggaaagtcccaatccccggagcatcagattggcactccgggtcgtataagtaatcatatgtaaacgcggtccgaacgcccccatcagaattccgacgataatcggtccgcctgctattcccaaacggacagggaaactgactccggggatagaaaagggaatagccccgacagccaaacccaacacaatccccacaaatacggcgatcagattcggttctttaagactaataatacggtttcccaacactttctccacattgctgatagcagcagcttcgcccacaacggtcaatttatctcccaattgcagtaccagcccgggagttgccaacaactgtaccccagcccgatatatacgggtgatattgataccataatgattacgcaaacgtaaggatcccaatttctttccattgatctccgaacggctcacgacaatacgctgggaaaccaactggctatcgatggcattccagtcgatatcctttttattccaatccaccttttcctcttcaccgaaaaggatacgcaacgattcttcctcagcctcggtggtaatcaccagcaaacggtctccttcgagcaataccgtatcggaagtggggatcgtcactttcccatcgcgccataagcgtgaaataacaaatcgatgtgccgcaaggtgagctacttcttttacattcttcccaaaaattccgggattgcggacttcaaaaccggcaataaaagtgtgcttgcttttatcttctgccacaacggtttctgccgtccggcgaggaaacatcttacgcaatacgataaccgccagaatgacaccgaccactcctaaaggataggtcaccgcacaccctaaagcaggatcagccgcatcgatatgcatctgcttcaaagtttgctgtgcagcccccaaagcaggggtattggtcacagcaccactcaatataccaaccatatcgggcaacgacacgcctgtcaccacatgaaggcccaaagtcattgccgtgcccaccaggatcacagcaaaggcaagcatattcaatgtcatacctcccttccggaacgaaccgaaaaaaccaggcccgacctgcaatcccaaagcataaacaaaaataatcaatccgaaactctcggcataattcaacatttgggaatctatcgataagccgaaatgtccggccgcaattccaacaaaaaagacaaaagtaacccccagcgaaaccccgtagacgctgatctttcccaaagccaatcctaaagccgagatcatagcaatcacaacaacagcttgtatgacactgtgctctatcaatatactatttatccattccatagtcgatttattaaaatccgaacccgtttttcctaatttaaaagtgggcacaaaggtagtacaaataacttcaattcattaaaaataaacaggtaaaagcaacgaaaacaatgctttaacagaaaacgttaacatgttaaataaagttgtaatctatagacaatcagtaggttttgaaactttttcaattatctttgcgtttcaggaatgatctaatttgtctttttaatggtaaaaacagtcatttctaacttaatattcaccaaaaagatacagtatgagattgcacaacagagcactggttgctgttattttgagtttggcaggattttattcttgttcacgtcaagccacaattcccactcagttaacttatacccctgttcctgtatttactatcccagacagtcttttagcaacttctccgatcgaatatgctttttataaagcggagcccgtcgaattcttcgaaccgaaaccagaagtccgggattcttttaaccggatcgaaaaaacgatggtcggttatgcagacgatcaatttttcgtccgccagcccgaattggtattagacctggccgacctggaagagggtgcttttgtttttcccctgcccggcggaagggtattatctccttatggacgacggaatggaagaaatcataccggcatagacctgaaaatcaatcgtcgggacaccgttctggcagctttcgacgggatcgtcagaatgacaggtgggagccggggttatggcaacgtagtcgtcgtgcgtcattacaacggcctggaaacggtatacgcccataattccaaacacctggtccgttcgggcgatcatgtgaaagcaggtacaccggtttctattaccggcgaaacaggccgggccaccaccgaccacgtacattttgaaatccgggtaaatggaaaaaccatcgatccggctttggtgatcgatttcaacacccaaacccttctgcacaaacgcctggtatttactcctaccccgaaaggaaaaattcaggtagaggcggtgtaaaaacttcgggccccggttaccggatcagcctgtatattcaaaactaaaaggcaacaaggaagaggcttttatcactaccgtttcttcttcacctatcatcagtacatcaaaatcccggccgtaacgccggattacttccgccatcacctgccggcaagccccgcaaggagaaacgacttcttttctgggacgccctttaaaacaagcagcaatagccaatgctttgaccggaacgtccggataagcagcaccagcataaaataaagccgtccgttctgcacacattccactgggataagccacattttcctgattattgcctaaaacgatcgtaccgttttccagcaaaacagccgctccgacagcaaaatcggaatagatgcaataagctttgccggcagcagccagagctttttcggacaattcctcatagcctgcgggcactgaattccggcacacaaaataatctattttcagttctcttttatccatcactattttttactatttttacccccctaagatacagaataattataaaccggaaattgaaaaatcagcatttatcttttgccaggtaaatgcctgacgccaacgagtgagtgttatgaaaaagagtatgaaaatattggtattgtttagtctgttgctcatcagctttaatgttatggcagacaaacgtaaagagtttatccgcaaatacaaacatatagctatccgtgaaatggaacggaccggaattccggccagtatcacgcttgcacaaggtattctcgaatccggttgcggcgaatcggaactggccgtcaatgccaataaccatttcgggatcaaatgccacgaaacctggaacggcgatacatataccatggacgacgatacccgggacgaatgtttccggaaatataaaaatatcgaacaatcgtggatcgaccacagcgattttctgactagccgtccccgttatgccggtttattcagtattcctactacagattataaagcctgggcgaaggggttgaaagccgccggatatgcgaccaacccgcaatatgccaatatgctgattaaaatcatcgaagaagaagaattgtacaaattcgaccgctcgatcaaaagacggggtacaccgccgacgatcactgcagaagaatttgcccaaagtgtagcaacccaggaccacccgagtaataccaactaccgtaaccgcgaagaaatgcgcaatggcattatctgtatagaaacgatgccgggcgattcttttgaaaaaattgccggttattacggaatcaaacttaaaaaattattacaatacaacgacaaatccagcagtaccctggaccccggtcaattggtcttcctgaaaaagaaaaagagcaaagcggcacggggatacgaattccaccgtgtaaaagccggagatactatgtacagcatctcacagcaatacggagtacggctcaaaaatctttgcaggttcaactacctgtcggccgacagtccgctgacagaaggagaaaagatctatctgcgtaaacaagccgatttattgtaaggataaagaaaaatacatggcaccttcgaagaaaaagaattttttttcacaaaataccctgttcggtttattcgtcggactgagttttattgctgtagcttatgcctactaccgttcaggacggggagtcagtctcaatccgcaattgaacaatgtgatcctgctgctctccatcgtcggagcatttatcggagttcgtaaataccgggacgaattgccggataattgtctgtcttacgggaaagcactgggcgcttgtacctatctgatcgctgtagcctcggtcatctacggatgctttgtattctatctctatcgtcaccatccggaattactggagaattatctgacttcgatagaaacgacgttcaaagaggtatattcggattcggctttcaccgaaaatatgatctcgatgttaaaagcgtttacaacgcctgctacaattgcctttgcagaaacattcaataaaatattcaccggatttattttctccttgctcctggcaggattactcaggcgcacccgaaaaaatgaatttatttaaccgtaattttcagatcatggacatatcagtcgttataccgttatataatgaagacgaatctctgccggaactaacagcctggatcgaacgggtcatggcagcgaatcattttacgtatgaaatcatcatggtagacgatggcagtagcgataattcctgggcactcatcgaaaccctttcgacccaaaacgaacatatccgtgccataaaattccggcggaattacggtaaatccgcagccttacactgcgggttccagaatgcccaaggagatgttgtcattacgatggacgccgatatgcaggatagcccggacgaaataccggctctttatcaaatgatcatgtccgaagattatgacatggtttccggttggaagaaaaaaagattcgatccgaaatcaaagacaatacccaccaaattattcaatgcgacagcccggaaattttcagggatccatctgcacgatttcaactgtgggctcaaagcttacaagaataaagttgtgaaaagcatcgaagtatacggagaaatgcatcgctatatcccgatcctggcccaacaggccggtttcactaaaatcggagaaaaggtcgtacagcaccgggcacggaaatacggagtaaccaaattcggcggtttaaaccgatttatcaatggaatgctggatttgttgtccatcacctttattacccgttttgccaaaaaaccgatgcatctgttcggggcaatagggaccttgctgtttatcatcggattttgtgctgccggctggatcggtatagataaactgatctgtctttcacaagggatcagggcccgtttggtaaccgacaacccctatttttatatttctttggtttgtatgatcctcgggacccaactgtttttagccggttttgtagccgagctggtatcccgttcggctaccgaccgcaacgtctatctgatagagaaagaaatctgataccctttctctagaagaacccaccgacctctccgaacatacgcttataagccgctgccttttcaggcaagggtttcggataggcacgggaagaagagggcatgcggtataaccggatcgttctaccctcgaaatgaaaagtcgaaaaacctcctaccggtggctgagaggcttcgaccagagaaagcaaagtgtccgtcgctttctgccctgttgtcgcaatggctacacagtgcggtaattgccgcaatacgtcggacaaatcgatcttgcggacgatttccaaaaatttatccgaggcattatctttctgccgaacgacttcccggccggaatcggtcaaggcaattccttgccggataagaaaatcccggatccgttgttcgcaaaatgattttttatctgccgtcagaaaatgctccttgtcgtcgaaaaataccaatccaaagatacgccacatgtcattctgaaaattaggatagtaaaaatccattttccaacgttcacgtttcggcgggaaacttcccatcatcaatagccttgccccttgcgggaagaaaggctccaagggatggatttcagtttttatttcatctgttttcatgcatacaaaattaatcaaaacatacatactttggtttattttactagttttgccccgtgctaaaaaatctaaaacaaaaaaagtatgacaacgacagcaaaaaacaaagaaaaaatcaggttcagtaaagcattctgggtggccaacaccgtggaattattcgaacgtgctgcctactacggtgtatttatcgtgatcaccctctaccttagccgtatattggggttcaatgacattcaggctgccaccatcgcaggtactttctccgctttcctttatctgctgccaacttttgccggagctttggccgacaagatcggtttccggaactctatgctcctggctttcaccttattgactaccggttacggtggtctggctttatttcctacctggctcgaaagtgccggactggtagaatatgggcataccaccgtctttaaaggcctcaccgagagtggcctgcaatacggcattatcccgattatggctctgatcgtcatcggaggagcttttatcaaaagtgtaatctcgggaacggtggccaaagaaacgacagaagctacccgggccaaaggattcgccatcttttacggcatggtcaatatcggtgcattctcgggtaaaaccattgtaaaaccccttagagaggctttagggaatgaaggattgatcaccttgaattatttttcggccagtatgacctttctggctctcatagcgatctggtttttctataaaagtgctcaacacagcggagagggaaaaaccttccggcaaatctggaatgctctattaaaagtatgttctaacggccggctgatcatcctgatcctgatcattacgggtttctggatggtacaacatcaattgtatgccaccatgcccaaatacgtactccgtctggccggggaaggcgcatccccttcctggtatgccaatgtcaaccctttggtcgtagtgctgtgtgtcaacctggtcacccagctgatgcgtcaccggacagcccttacttcgatgaccgtcggaatgtttatcatgccgttgtccgctttgtgcatggcttcgggaaatatgctgaatccggaatcgaccattctgaccatgcacccggtagcttttatgatggttgtaggtatcgtcttccagggactggcggaaacttttatttccccgcgttttctggaatatttctccctgcaagcccccaagggcgaggaaggattatacctgggtttcagccacctgcattcgtttttgtcttccattttaggattcggactttccggctatttattaagtaaatattgccctgacgaaagcctgttcgccactcgtagcgaatggctcgctgccagcagtaatgcccattacatctggtattattttgctgtaatcgcactggcttccgccattgccctgatcatctacggccaagttgtcaagcgcctcgatcaggcaaaagcataaaataacagcatcggttgtaaagtccgtaaagtttgtaaagtcgatggccttcggggatactttataaactttacggactctcaattttataaactatcgccttctttcttcagattctaaagttaaaaataaacctttccggctaaagcccgtttgatataaaaattgaaacgtttaaattatggcaaacatagcagagcaaattgtagatatgctggtaaaagccggtgtaaaaagaatttatgctgtcacaggtgacagtttaaataagattaacgatgctgtccgcaaagacggccggattcagtggattcacgtacgtcacgaagaaaccggagcttttgctgccggagcagaagcccagcttcacggcaacctggcctgttgtgcaggtagcggcggtcccggccatgtgcacctgatcaacgggctctatgacgcccaccgttcaggggctcctgtcttagccatcgcttctaccattatttcaggtgaattcggaacgacctacttccaggagaccgacaccatccgcctgttcgacgactgcagttattacaaccaattagcgactacaccgggtcaactcccccgcatgctacagggggctatacaaaccgctctctcccgcagaggagtcagtgtcatcggtatccccggagatttgaccggagaaagccaggtcaatattccttcttcagagatcaactatccgactcatccccgcacctgtccatcggataccgaattacaggcgctggccgatctgttgaacaacaatagcaatataaccctgttttgtggcatcggagccaaagatgcacacgaagaaatcgtcgaattgtcccatcggttgaaagccccggtagcctattctttcaaaagtaaaatggaaatccaatatgataatcccaatgaagtagggatgaccggcttattaggcatggcatcgggttacaacagcatgcatgcggccgatgtactggttttattaggtaccgatttcccgtacggcccgtttttaccgactcacaataaaatcgttcagatcgacatcgatcccagtcacctgggccgaagagccaaagtacaaatggggctatgcggagatatcaagacgacactcgaagctttattacctcttttacaagccaaaagcgacaaaagctttctgaacgatcagttgctcggttattccaaagtaattaaagacctgaatgcttacgtcgaaaacaaaggcagtgataataagattcacccggaatatgtcatggcgatggtcgacgaaactgctcaggcaaatgctatttttaccgtcgatacgggtatgacctgtgtctggggagcccgttacctgaaagcttccggccagcgaaagatgttaggctctttcaatcacggcacaatggccaacgctatgccccaggctataggagcatcgttcgcctatccgggcagacaggtgatcgctctctgcggcgacggaggcatctctatgttactgggtgatctggcaaccatcgcccaatataagctaccggtcaagattattgtattcaataaccgttctttgggtatggtaaaactcgaaatggaagtcgccggcctgccggacaacgaaaccgacatgcaaaatccggattttgccctggtggctcaagcgatgggtataaagagctataccgtcagccgtccggacgatgtactcccggtattggtcgaagccttgaactcaccggaagctgctctactgaatgtaatgaccgatccgaatgcactggctatgcccccgcaaatagaatggaatcaaatgaccggattcgcacaagccatgtataaaatgttattgaccggccggacacaggagattatcgatacgatcaattccaattataaacacctgaaagaaattttataaagacaattccggcctcaacgacaatgtcacatttctgtcattaaatagtaacatggataaaatacattcgtaattaaatcaatacattgtattttatccatgaaagtaacaaggaaaaaaggtgagattccctacctggaaagggatatcagttggatgtattttaaccggagaatcctgtccgaagcagaaaaagccccggttcctttactcgaacggttatcctttctgggaatctactccaataatctggacgaattttacagggtacgggtagccaccctcaaccgaatcatcgaatatgaggataaaaccattaaggcagagagagaaaccgccattcaaaccttcagggaaatcagccggttgaatgccctgtatacacaaaaattcgaggaaacatttacagcaataaatacagcactccggcaaaaccggatttacctcctgaacgaacaagaattacaggaggagcaagccgactatatccgagaattttacaagacacaactgatcggctctacgaccccgcttttcacttcttctttccgtcatttcagcgaccaacccgacgaccatatctatctgagcgtctgtctgcaaaccacaggaaaaacgaaaaaagattttgccatcatcgctttgccggtgcaatcatacggccgttttatccggatccccggcgataacgaccgcatatgcctgatgttcctggacgacatcgtccgcttttgccttcccctgatattcaacggccggccttacgaccacttcgaggcttacacgttcaagttcactaaagacgcagaaatggaactcgattcagatcttcggaacagcattatgcaaaaaatatcgaagggggtgaaaagcagaaaaaacggggaaccgatccggttggtatacgacagccggatgcctgcggttatgcagcgccacctcagccggatgctttgtatggaccgctgggatactcaggtcggagccggtagataccaaaatctgaaagatctgatgaaatttcccgattgtaaacgtgacgatttaaaatatccccctcaaccacccttattcaaaacggacttttcaggggacgacagcatcttgaataccatccgtacccgcgatctcttcctgcactatccctatcacagtttttcttctttcttgcgtgtactccgggaagccacgatcgacccgaacgtcaaagccataaaaatgaccctctaccgggtagcgaaaaattccaaggttatccaaactttaatcgcagcagccagaaacgggaaaaaagtaactgtagttatcgaactactcgcccgtttcgacgaagcatcgaatatcagctggtctaaacaaatgcaagacgccggaatcaaagtcgtattcggagtcgaaggtctgaaaatacacgcaaaactagtatatatatcgggtagacagggagatatcgcctgtgtcagtaccggaaattttcatgaagggaatgccacccgatataccgacatcaccctttttaccgcacgcaaaaccctggtaaaagaagtccggcatgtcttcgactttattgaaaaaccttatctacccgtaaaattcaaagaattactggtctctcccaacgatatgcgttccaaactattgaaattgatcgaagaggaagtcaaaaatgccagaaaacaaaaaacggcccgaatattaggaaaggtaaaccatattacagaccggacattgatcgctaagctttatgaagcttcggccgcaggcgtaaagatcgacctggtggtacgaggtaattgttctatcgtcacaggaatcccgggaataagcgaaaacatccggatcaacggaattatcgaccgttatctggaacattcacgaattttcattttcgaaaatgcaggtgatatgatctgcctgacaggttctgccgactggatgccccggaatctggacaaccggatcgaagtacttacccctgtttatgataagaaaattcaaaccgaattgaaacgaatcgtcgaatatggcctgaaagactctctgcagggacgacaagtcgacggcacaggacagaatatcccctggaaaaacgaagaccattcgctattccggtcacaatcggccttatatcactattatcaggaagacatacaagaaatcacaactaataacataccccatgagtaaagtaaattatgcagcgatcgatatcggctccaatgcagtcagattattgatcaaaagtatcaatcccgaaacagcggaacagttgtttacaaaagagctccttctaagggttcccctgcgcctgggagaagaagtatttacacaaggtgaaataccggccagtaaagctaaaaaactactccgtctgatgaaggcttatcggcaactgatgaaaatatacgaagtcgatgcctatcgggcttgtgccacatcggcaatgcgggatgccgcaaacgggaaagaagtaatcgaaaccatcacccggaagtcaggtatccggatagatattatcaacggagaggaagaagcccgtttggtatacgataatcacatcgaatacctggcggataaaaacgccgattatatctatgtcgacgtcgggggaggtagcacggaaatcagcttgatccatcaaggaacactccgcagttcacattcttacaacatcggaaccgtacgtctgttgaaaggaaaagtcgttcccagcgtatacaaccgtttgaaaagagacctgaataaattgcggaaacaatacccggtaatcacgatcatcgggtccggtggaaatatcaacaaattgttccggttagctaaacttccggccaaaaataaaatgactctcccggtagaaaaattagtacaactcaacaacactctaaaaaactattccttagaagaacgtgcccggttatacaatctgaaacccgaccgtgcagatgtcattaccaatgccgcagatatcttcctgctagtcgcagagcatacccaagcgaagcatatcgtcgtgcctaccatcggcctggtcgacggtatcatcgacagtctctatctgcaacaccacaaaaccccggaagaacaaatccccctccccatttattaataaatacagataatagtaaatttttcaaataaatcgttaaaatttcgacttcaaccctcaatgatatcaatagataccgattagtataataaagacaggtattttttaaatcattttttttacgtaaccttgcagtttaaatggtgtgttaatttctgagaaggaattacgcaagttaataataaactaaattactatgtcacttaaaaggaatattcttgacttaagaaagaggaaagaaattgtacttcagggtggtggcgaagatgctatcaaaaagcaggccgccatgggtaaattgacagcccgtgagcgtatcgaggggattttggacaaaggttctttccacgagtacgacatgttcgtagagcaccaatctaaggattttgatatggacaagaaagttcttcacggcgacggtgtcgttatcggtaccggtactgtctatggagaacccgttgctatttatgctcaggatttcactgttgcaggaggttcgttaggactgatgcacgcccgtaaaatcaccaaaattatggatcatgccatcaaaatgcggatgccgatcatcggtatcaacgactcgggtggtgcacgtatccaggaaggggtggattcactggccggttatggagaaattttcttccgcaatacacaggcttccggtgttatccctcaattgtccgttattctgggtccttgtgctggtggagccgtttattctccggcattgaccgatttcgtatttgtggtagataatatttccaaaatgttcatcacaggtccggaagtagtaaaaacagtactgggagaagaagttagtatggaagacctcggaggagcacgcgttcatgcctgtatcagtggaaatgcccacttctttgcctctacagaagcagaatgtttcgaacaaataaaaaaactgctcacctttatcccctggaacaatcaacgtaaagcgaaagcctttccgtcaaaagctccgaaagcagaatacaatatcgaaaaaatccttcctgcagatcctacccagccttatgatgtaagagatattatcaaagccgttgccgacgattccgatttcttcgaggtacaacaggactttgcacagaatatcgttgtcggattcggtcgggtagatggagaaacgatcggtttcgtagccaatcaacccttggtattagccggtgtattggattgcgactctgccgataaagcaggccggtttatccgtttctgcgacgcattcaatattccgatcgtgaccttcgaagacatgccgggatatctaccgggcgttgaacaggaacatatgggtgtgatccgccacggagcaaaagtattgtatgcttatagtgaagctaccgtacctaaagtgacggtaatcctgcgtaaagcttacggtggtggatacatcgccatgaactcacgccacctgaaagccgactttatgtttgcctggccgacagccgaaatcgccgtaatgggaccggaaggggctgctaacattattttccgtaaagaaataaaagaatctgctaatccggaagaaacacggaagcagaaagttgccgaatatcgcgagaaatttgctaatccttatgtagcagcttccaaaggatatatcgactcggtgatcgaaccgtcggaaacacgcctgttattgaaacattctatcgaagtctccggtaataaaaccgttatgacacctgctaagaaacacggaattcctccgttctaacagtgttcagagtttataaagtccaggaattcccggacttttaaactgaaagacttaaaagtttcagaaccactaaaaaggaggtaaaatgactgttaaatatgaaaaattcctgctgaatggcgtagaatataaaactcagcttacccagaaatgggtaaaccgaaaaaaatgggaagaaccgaatccctatctgctgacttcacacattccgggaaccattatgcaaatcgaagtgaaagagggccaggaagtccaggaaggagatgttcttctgattcttcaggctatgaagatgaataacaaactggctgcaccattttcgggtaaaatcaaaaaaatatatgtcaactcaggagataaaattccgaaggggacattgatgatcgaaatggaagaaaatgaagctgtctgaatacagctgatctgttatgctgatgtgctaatatgtaaatgtgccgaccacaggagcgtattaacatatcagcatttgtatttataataatggcaggtataatgaattggtaaagttgataaagtccaaagactttatcaaccaatttaattctgcaatttatgtcgttacaaagatttcaaaggttacaaggatcttagacgtgaatcctgaccattataaccgttgtaacttttgtaactgttgtaagtgaaaaggtatgagtttttttgtcgctaaaaatattattaaaaattatgccaatcaccgggctttggacgatgtatctatcgaaatcccggaaggagctatttatggattgttaggccccaacggagccggaaagacttctctgatccgaattataaaccagattacaggaccggattcgggtgaactttattttaaagaccataaactggaacctgccgacatgaaccgcatcggttatctgcctgaagaaagaggcctctataaaaagatgaaagtcggtgaacaggccgtttatctggctcgtctgaaaggagtgagtcgtcatgacgcgattcaacaattgaaagcctggttcgagaaattcggaatcgaggcctggtgggatcggaaagtagaagaattatccaaaggaatggcccaaaaggtgcaattcatcaccaccgtcctgcacgaaccggaaatgctgatttttgatgaaccgttcagcggattcgaccccattaatgtcgaactcctgaaaaaagaaatactggaactgcgcaaaaaaggaacgaccattattttttccacccacaatatggcttccgtcgaggaaatctgtagccatattgccttgattaacaaatcaaaaaaaattatcgaaggcccgatcaatcagatccggaataagtatgccaacaatacttaccgactcatctgtaaatatcaaccggattttcatccgcaagaagtgatcggagaagaatatgagctgctttccgaaaagatagaagacggacaacacgaactggtcctgcaacgcctcgcggcttgtccgaccaatactttattacgtcgtctgctcgacaaaaccgatattatctcttatcaaaaggtcataccgggaatgaacgatatctttatcaaattagtgaaaggagaaatggttaacgacatcaaacaggaagaataatccacttcgtaaaccccaaatcataaatctgaaatgaataaaacgcttatcatcataggacgcgaatttacaaccagagtacggaaaagaagttttctggtactgacactcgtcgttcccattcttttagccggtttttatgctttcctgatgtggatgcttctgaaagacgacacacaggaccgtaaaattgcagtgatcaatcagtcagtactcgagacaccattcgagcaaatcaacaacaatacattcgaatatctgaataccccggtcgatgaatcgggagcttcggaatttctccggcaacatgactattacgccctgatttcaatcccggaaaatattatggatcacccggaaattccggtctattctttctctcaggttcctatggaattgaaaaatgaaatcgcggcccaattgcgcaaaaaaattgaagacataaaaagagcaaaagtcattgccgaatcacaagtccccgatttggaagaacaattatcggccacacaaacacctgtactggtgcgtacgttaaagatcaccgactcgggcgaagccaaagaaagctcgtcggaagtcgcttcggctatcggattgatcggcggcatgattatctacttctttatattcatgtatgcctctcaagtcatgaaaggagtgatcgaagaaaaaacaaaccggattatcgaggtattggtctcttctgtcaaaccgtttcaatttctgttaggtaaaatcatcggagtagcagctgtcggcctcgtacaattcctgatttgggtagtattcggccttgtgctgatcctggtcatgcaaacattcttcctgccgggcatcgatctggaagcactgagaaatgccggcaacctggccggcggcctgccggatatagccggtacagggaatctgagcgctgaaaaaatgcaaatcatccaaaaggttgcgatgaccatcgacccgatctttatcattaaattcctggcctctttcttattctattttatcggaggctacctgttatatgcttctttattcgccgctatcggtgctgccgtcgataacgaaaccgactcgcaacaattcctgacccctttgtcgattatcctcgtcatcgggttatacatcggtttcgccgccatgaaaagtcccgaatccccgatggtattctggagttcgttgatcccgttcacctcaccgatcgttatgctggtccgtatccccttcggagtaccgacctgggaaatcctgacctctatggcattattaatcgtcagttttatcttttttacctggctatccggaaaaatttaccgcatcggtattttaatgtatggcaaaaaagtcacttggaaagaactctacaaatggctgaaatattaacctcttccgggattccgggacggacttttcgtcccattttaagcaagctctcttttcacctacttctaaaataaaagataagcaatgttacagcggtttctatggttactccttaaccactgtaaccattacaactaacaaaataccgggcggtaagtctgatataaaaccggacaaaaggtccgtcccggaatcccaaatttttcgaccgataaggattttctgcgttatatcagtgaatccacaaaataaattatggaaacactagaaatacaaaaattaattcaacaaagcagacggcaagacagctatgctttcagtctcctcgtaagacaatatcaggattttgtatttcgccttgcttttagactcctttgtaattatgaagaagcccaggacatcacacaagaaacatttatccgggtctggactcatcttccccaattcaatttgcaagcaaaatttacaacctggttatataaaatcaccgtcaatctctgttacgattcattgcgttcgtataaaaagcgcccgatcgtacatgattcggaaattgattttctaaaagcttatcaacaactttccgatgaaaatttggagaacaaagtgatgaatgaggagttgatccagatcatcctttacctcactcaagaattgacgcccaagcaaaaattgatctttacattatgggacctggaagggctggaggctgaggaagtgaaagatatcagcgggctcagcagtgctaaaataaaaagtaatttatatctggcacggaaatacatacgggaaagaatcgaaaaattaaacctataaatcctatggacaagtacaatgctattctgaataaattacaacacactgctccgatagtcactgatcccgaaggattgacccaacggattatgaaggaaatcgagcagcctgtaatccgtagaagatctaaaatacgaattataatgacgggtatagctgcttcggtattatcggtatggatgatcgatgaaataaattaccgaccggtcgtctcaccgacaacaaaaacagaggaaataaatcgtccgcccgataatgccgaccgttcgtatattccggccgaactttccagccaggaaaaaaggacgatattctattctgaactaaaaagcagaatgaataaacaacaaaagatcaaacaactcatccaaaaaattcaagattatgaaacgaaataatttatatctcagcctgatattggtggtatttacccttttttcctgcacccatcgatcttaccgaatgcaaacccaagtcaaccgggacggttcttgtgtccgttccatttcggtggagacccgggattctgcttttattgccggagatacgactgcgaatccgcttcctatccaactcgacacgacctggaccgtcgaatgctataacggacaacaaaaagtaacatggcctgttgtaaatttcgctttattccaaacagatacattaccccgcctgacaattgtcgcttcccgtcgcttcccgtcagtcgaggccatggctgaaaattttcattttaatcacggattatggagtgtttgtaaaccttctatcattttcaagaaggaattcagatggttttacacctattattcttataccgaaacctatcccccattttcagtcctcaccaagattccgttggatcattatcttacctccgaggaacagacactatggtttcagggaaatgatccggcttttcaagggaaaaacggcactgaactatgcgatttattgtcaaaaatcgaacctaaagcctatctttggctaaatcacaatctttttgccgaaagttatgcagctatcgaccggcttcttcccgaccatccgttcaaaaaccgtttcgaagctgccagagactctattttccggctgaaccaggacaaatacgatgccctcgatgcaaaacttcccgagatgttggacaactattttaaaaccgattattttagccggcacggacaacggatagactcactcgacgacccggaattaaaccataaactcgattctctggatctctatgaaattacttttcaatatgaattgctcttaccgggaaaaattctctcgagcaacacccggcaaaccaccgcaggtaaactgtcctggcaactcgatgcctatcgtttcctgccgcaagattacgtcatgacagcgcaatcccgtgcaataaatgtatgggctttcgcccttactgcccttttgctgctcaccgccctatattttatatggaaaagaaagtgaaatactattttttgtataaatttgttacaataccatatcctttattgctatgcttagatccgcccatcaacaatctattacaaatagaggag

SEQ ID NO: 5875 - DNA, 27207 bp, Unknown
  gut microbiota DNA sequence
cgttcatatacttgtcctgcttgggaatgcgttatttttaataaaaaagtggggtaaagtggtttaaagtgggaaatatttcctaactttacatcacaaatccacctcttgttttcgggagctgtgtatgtttgtaataagttgttatagaattaattggtaatacgatggcttcatttatcggagattatacctgtaaagctgatagcaaatgtcgggttgtggtgcctgcctctttccggagagtgatggtggcttcgcaacagacgttttttgttttgcggaaaaatgtcttcgggaagtgcatcgatatgtatcctttgcaggaatgggaaaatatgattgcaggggtacgtgcccgtctgaatttgttcgatcctaaacatgcggctttttttagggagttttgtcggggaacgcaggaggtagagatggataccaatggccggattttactaccccggaagatgctggatgagatcggaatcgataaggaaatggtgttggctgcgcaggattcgatgatacaggtgtgggatgccagggtgtatgaggaggtggcgattagtggagaagagttagggatgatggcggaagaaatttttaaaaactaatatacgatagatatgtccgaatatcatgtaccggttttgctgaaagagtctgtcgatggattggatatccggcagggaggtgtgtatctggatctgaccttcggggggggaggacattccggggagatattgaaacgattggatgcagagggatgtttgctggggttcgatcaggatgaggatgctttggctaatgtgccggaagatgatcgttttatttttgtgaatcataatttcagatatttgcgtaattttatgcgctattatgggtatgaagaagcggatggcattctggcggatttgggggtatcttctcatgaattcgatgaagccggccggggattttcgttccggttcgaagcggaattggatatgaggatgaaccaacggagtaagctgacagccgctaccgtgctgaatacctacgatgcagaacagttgaccgctattttcaggaattacggggaggtggagaatgcccggaggttggtggatttgatcgtgaaagcccgggcaaatcaggaaataaaaacttccgaggcgttttatcagattattttgccttgtattccgaagttgaaagaaaaaaaatatctggcaaaagtctatcaggctttacggatagaagtgaacggggagctggaagctttggaggagatgatgcaacaggcgatggaggtattgaagccggggggcagattggtgattattacctatcattctctggaagatcggattgtgaagaattttttgaaggccgggaatgcggaaggtaaattggaaaaggatctggtgttcggtcatgtacaccataactttgaattggtcaaccggaaagtgatcgttccctcggaagaggaaatcgtgcgtaatccgcgggccaggagtgcaaagcttcggattgcgagaaagaaggattaagaaataataaggaaagagatgggagtttttagtaggaaaaagataacggaagatgtgccggtggaggaggaggagaggcaagaggaggtcaaaacgtcgtcctcggtgaaaagtgtattggagggaagtctgctagcagaaaaactgcggcagaatatccggtttgtactttttgctacttttttagggatttggtatatatccaatggatattctactgaaaagctgcatcgggagagggttcttctggaaaaggaagtaaccgatctgcgtttcgagtcgatttctgcagcagcggatttgatgttgatgcgcaagcaatcggagattatcaaacggataaaaaatgaaggattagcattggaggagagtaaagaacctccggtaaaattgtatcggtgatcgaaatggcaataaaggatgacataacgtggagaaccataattgtttatgtgtttatcgtactgttcggttgtctgattctggctaaagcttgtgcagtgatgactgtggaaggggaaaagtggcggaagatggcgtcggcaaatgtgccggtgcagcctgtcaaaatagaacccaaccggggagatatctgggcagccgacggtcggattctggcgacctcggttcctttttatgaactccgtttcgatcctattgcagtgaataagaaagtgttcgatgctgaagtggatagtctggctttgtgtttatcccggttctttaaggatggaagtaaggctttttataaagataagctggtgggtgcccgcaatcggaaacctcgtcccgaccgttatttgctgatcaataaacgtaaagtgaatcataaggagttgaaacaaatccgtcaattcccgattttccgtctgggaaagaataaaggtggttttcaggctatagtcaatgacgaaagattacagccccatgtgaatttagccggtcggacgatcggttatctgaacgaatcggaaaccggggagagggaaggccgggttgggttggaagcgacttttgaaaaccagttgaagggcgaatgcggacaagggataaagcggatgatgtcgggtacctggatgatcattacccgtaaggaaccggtagatggacacgatgtcgtgaccacgatagatgtggattatcaggatatcgtgcagcatgccctgaaaaaacagatggagaaaagcgaggcgacacacggtacggctatcctgatggaagtgaaaaccggggatatcaaagcaatcgccaacctggccagaaaggacggggtatatatcgaaaaccagaattttgctatcagtggtgccggtgaaccgggatctgtaatcaaagcagcgactatgatcgccttgctggaggacgggtgtgtcactccttacgatacgatcgacctgggtacttcagggagatataaattttatgaccgttatctgaccgaatcgcatgatggtttagggaaagtgacggtaaaacagataatggaaaaatcgtcgaacggtattgcgaaattggtgtatgatcattataaagaccggccggagaaatttgtaaaccgctggtatgctatggggttggataagaaaaccggtatttgtctgccgggagagatagagccttatatcaaatatcccaaagataaaagctggagcggtatcagtttgccctggatgagtatcgggtatgaattaaaagttactcctctgcagattctggctttttataatgccatagccaacgacggtcagcggatgcgtccgcgcctggtaaaagagatccggaaccggggagaggtagtggaatccttcgagccggaggaagtcgggggaaggatttgtagccggaagacgttgaacgaggtaaaagatatgttggaaggagtcgtcgaaaacggtacggcccggaatatttatacgcctaaataccggatcgccggtaaaacgggtacagcccgtttggcaagcgggtcgagcggatatggaggtggacgttaccgggcgagcttcgtgggatatttccctgccgaacggcctttgtattcctgtattgtcgtgatcgataatccgacgaacggttattatgccacgactgtatcggctccggttttccgggaaattgccgataaggtttactctatggcatacgtacaatacggtaaacccgaatatgaagcggataaaactttgccggtatgtaaaaatggcctgaaagaagatttcaggactattttcgatgaattggatatggatatagacggagtgagggatgcggatggtgccgattgggtggtcacggccagcaacgaaggggaaaatatcgtgatcaaaccccggcggatttcctattcatcggtgccgaatgtgaagggaatgggtttgagggatgcactgtacgtattggaaaattccggtttgaaagtcgatttttccggtgccggaatggtacagcggcaatcgctccaacccggggcggaagttcccaaagggtcttatatccggattgaactaagataagagattaaataacgcggccagggctgcacaaagagatgaagaaattaaaggaattattaaacggagtaaatgtcggaaaagtatatggggataccgaccgggagatcggacatatccatttcgattcacgcaaaatcgaaccgggagatgtatttatcgctcagagaggagtcaatgcggacggacatgcttttatcgacaaagcgttgacccgcggggctgttgcggtagtgtgtgaacaattgccggaaaacagaccggaagaggtaacttatatatggactgcagatacctccgaggctttgggggtaatggccgggaattactgggataatccttcccgggaactgaaactggtcggggtgacggggacaaacggaaagacgacgacggcaaccttgttgtacgaactggttcgattgaccggagaaaaggccggactgttgtcgacggtatgtaactatatcggagaggaaaagattccggcgacacatacaactccggatgcgctgtctatccaggaattattacggcggatggtagatgccggatgccggtattgttttatggaagccagttcgcatgcgatccatcagaaaaggattgccggtctggatttcgacggggctattttttccaatattacgcacgatcatctggattatcataaaacattcaaggcttatatcgaagcgaagaaagcttttttcgaccgtttaccggcccatgcttttgctttgaccaatgctgatgataaaaatggcctggtgatgttgcagaataccagagcacaccgatatacctattcttgccggacgatggctgattttacagctaaagtgctcgagaaacatttggacggaaccttgctccgacttgacggggaagaagtgtggaccaagtttaccggtgatttcaacgcttacaatctgttagcagtatatgctgctgcccgtttgttggggttcccgaaagagaacgtgttggaatatgtgagtttgctggtgccggtgtccggacgtttcgaaactttgatttcgaccgaaggagtgatggcggtggtcgattatgcccatactccggatgctgtagagaatgtattgtcgacgatttgcggattgaagggcagagataatcaggtgattaccgttgtgggagccggaggcgaccgcgataagaccaaacgtccggagatggctgatgcagcttgccgttatagtgatcatgtcatcctcacttccgataatccgcggagtgaagatcccgaacagatcatccgtgatatgctgaccggagtgaaagaaggatttcagtaccgggtagaagccattaccgaccggaaagaggctatccggaaagcgattggtatggcttcaaaaggagacatcatattggttgccggtaaaggacatgaaaattatcaggaagtgaaaggagtaaaacaccacttcgacgataaggaagttatccgggagatttttgatctctctaatcgctaattcctaacttttaaacgtaatgttgtatcatttatttcaatatttagagagttttgattttccgggagccggggtgtttcaatacatcacttttcgctcggcctgtgctattattttgtccttgatcattgcctccgtggtggggaaaagagtgatccggatgctgcagagacagcagatcggggaggaaatccgtgatttgggtttgcagggccagatggagaagaaaggaacgccgacgatgggggggatcattattttactggctatcctgattccggtacttttgttcgcccgtttggataatgtctatatccaactgatgattatttcgacaatatggttgggattgatcggtttcgccgatgactatatcaaagtattccggaagcataaggaagggttgaaaggccgtttcaaagtgatcggacaagtagggctcggattgattgtcggactgaccctctatatgaatgatgaggtcgtcatccgggagagggctgcggtgagtgaaatcggtgtggtgaccagtacggtggatgaaggattttctgccgagggtacccagcaggtccgtacgaaagatatcaaatcgacaaaaacaactattcctttttttaaagataacgagttcgattatgcctggtttacttcttttgcgggaaaatatgccgacgagctggggtggctgttgtttgttttggttactatttttatcattacagctgtgtcgaatggggcgaatctgaccgatggtctggatggtctggctaccggaacgtcggcgattatcggagcgacgctgggaatcctggcctatgtgtcggggaatatggtctatgccgattatctgaatatcatgtacattccgcattccggagaattggtggtattcggttctgcctttatcggagcgacgatcgggtttttgtggtataactcttatccggcccaggtgtttatgggggataccggaagtctggcattgggagggatcattgccgttttcgctattatcattcataaagaattattgataccggctttgtgcgggattttcctgatggagaatctgtctgtcgtgatgcaggtcagttattttaaatatacgaaaaggaaattcggagaaggaagaaggatttttttgatggcacctctacatcatcatttccaaaagaaaggtatacccgaacctaagattgttacccgcttttggattataggtattattctggcggtggtgacgattgtgacgctgaagataaggtagaaagtaaaaggctgaaaggctaaaaggctaaaagcgataagctataagctgaaggctggaagttatgggatagaaggaggggaaagaaagggaggaaaataaatataaaaattgaagtttatgaaattggtggttttaggagggggagaaagtggggtcggtgcagccttgttgggccgtcatttaggatatgaagtatttttgtcggataagggaaaattggctgaatcttatcgggacgaattgattacacaccggattgcgtttgaagaagggcagcactcgatggatcggatttttgctgctgaattggtggtaaagagtcctgggattcccgatacggtgccgatggtcgtagctctgcgcgaaagggggatcgaggtgatttcggaaatcgaatttgccggcaggcatacggaggcgaaaatggtgtgtattaccgggagcaatgggaaaacgacgactaccttgctgacttgtcatattttgactacagcggggatcgatgccggattagccggaaatgtggggcgtagtctggctgcacaggtggcagaggatgcacatccgctgtatgtcgtcgagctttcgagttttcagctcgacgggatgtttgatttccgggcggatattgccgttctgacgaatataaccccggatcatttggatcggtacgaccataaattcgaaaattatatcgattcgaagttccggatactgaataatatgcgtcctcaggatttgtttatttacggtttggatagcgaggcggtagggcatagactccggcaggtgagagttgtaccccggatggccggatttatttatgctgaccggagtatatgggagaaaaatacatgtcgaagcggtgcctggatggaaggagaagaggtggtcgtgcagttggaaaaccggcagttccggatcgccaaacaggagatcagtattcaggggagacacaatgtctataatgcgatggctgcgattctggcttgtatgcaggtcggtgtttcggacgaaaaaatcgctgaaggattgcggaccttcccgcaggtggaacatcggctcgaaaccgtacgggttgtggagggggtgacttatatcaacgactcgaaagccaccaatgtcgattctgcctggtatgccttggatagtatgactactccggtgatttggattgccggaggtacggataaaggaaatgattacagtgtcttgttcgatctggtacgtcaaaaagtcaaagtgttgatttgtatgggcgtggataaccggaaattgatcgataatttttccggaatttgtcaggtagtcgatacacatagtttgaaagatgcgctggcagctgcccggcagtatgcggtggaaggagatacggttctgctttctccctgttgtgccagcttcgatctgtttaaaaattacgaaaaccgcggcgaactttttaaagctgccgtaaaagagctgtaggaaattgtgaactgaaatctggattcgattgaaatgaacgactggaaagaaaaaatagcatttaagggagataagattctctggtatatcgttatcatgctgatgatcgcttctgtcatggtggtgtattcctctacaggacgtctggcttataacgagaaggcggggaatacgtttttctatctgatcaagcaattatttttgatcggaggctgttttggagtgatgtttatcgtacagtcgattcattaccggtatttttataaatatgccggagtgttgttgttcgtatctatgattttattggtttgtgcagcctttgggggtacgaatatcaacggagccgggcgatggatccgtttgcctttgatcggtcttacttttcagccttccgagctggcgaaaatcgctatcatgatgtttacagcccggattttgtccgaggctcagaccgacacgcattgtgacgatagtgttttacagaagtttctgctttttgtgggaccggtgattttgttgatttttatggataatttctctacctcggctttgatcggggcagtatgttttatcctgtttatgatagcccggatgcgctggcggttgttggcgatgaccttgggaaccgctttggcggcgattgctttggtgttgattctgggaatttatatacctcaggtgcaaaaatggggacggatcggtacgatggttaaccgtattacagattttgccaaaggcggagaggatggagacggttattcctatcagtcggtacaggctcgtattgcggtggctaaggggggattgatggggagcggacccggtaacagtacgcagcgtaattttttgcctcacccttattccgattttatttatgctattgtgattgaagaatacggattgggaggcggtgctttcatcatgttgctgtatgcggtgattttgttccgggtaggagtgatcgggcgaaagagcatgaggaaggaagtgttgaatgatcggggtatgccggatatttttccggctttgctggttgtcggtttagggttgacgatcgttttacaggcaatgatcaatatgggagtctgtgtggggttattaccggtgaccggacagaccttgcctttggtgagtatgggaggtacgtcgcttttgtttaccagtgcagctttcggtgtgattctcagtattgcccataccttttcaccggagggtgaaaaggaagagagcgaacggctgaagatgaaaagtgaaaaacaggggcggaagaacagacgggaagaatacgaacccgaggaagtgctggtcgatgaagtggaagatggggaattgccggagatgcaaccccggaccgtaacgcctccgacaggaagacggcgggggagaaaaccggcagagtacgacgaagatcgggatttcgatattctcggtgaggaaggaatcggagagatcagggacgagctggaaagtgaaggccgggaagtattgaatgagctgaagcgaaggggaagataaattggaagtttataaatttaagttatatacggatttttgatttgaagatagattaatacttttgtgatatgaaaagagtgattgttagcggaggaggtaccggaggacatatctttccggcgttgtcgattgcgaatgcattgaagcggttgcaaccggatatcgagattttgtttgtcggggccgaggggaagatggagatggaaaaagtgcctgaagcgggttatcgcatcgaaggattaccggtgaggggactaaaacgtaaactgactctggaaaatgtgaaagtattgtataatctttggaagagtctgcgtaaagccagaaagattatccgggagtttaaacccgatgctgtggtgggagtcggtggatatgccagtgggccgatcggacgggtagctgcagaagcaggtattcctttgattttgcaggaacagaattcctatgcaggggtgacgaataaactactggcgaaaaaagcttgtaagatttgtgtggcttatgaagggatggagcgtttttttgaaaaaaagaaaattatctttaccggtaacccggtgcggaaagatctgttacaggcccgggaaatcagggctgaaggaatagaattctatggactggatgcctcgaagaagacgatattggtgaccggaggaagcttgggtgccggcacattgaataaagcggtgatgcgttgtttaaaggatatagggcagtggcaagaggtacaggtattgtggcagtgtggtagttattattatgaggatctgaaaaaacagctggacggtaaattaccggaaaatgtaaaattactggctttcctgaagcggatggatttggcttatgctgctgcggatattgtcgttgcccgtgccggagcagggacaatatccgaactttgcttattggaaaaagcggcggtattgattccttcgcctaatgtggcagaagatcatcagacaaagaatgctatggcgctggtcgataaaggggctgctgtcatgatcagggatacggaagctgaagaacggttggaacaggtgctcaccggtttgctatcggatgaaaaacaacggaaagagctggaaaagcatatagcgaaattggctatccgggattcggatgagcaaattgcgagagaaatattgaaggtgatcggctaagtgtttgaaaatagtatggttgagttagaacagacgataaaaaacgtttatttcctgggtatcggaggaataggtatgagtgctttggcccgttattttaaggctaaagggtacaaagtggccggttatgaccggactctttcggcattgactcaaaaaatgcaggctgaagaagaaatccggattaattatatcgatgaagaggaagagattccggctgaattccgggataaaacgacgacgttggtggtatatactccggcgatacccggggataaccggcaacgggcttatttcgtaggggcgggtttcgatttgcataaacgggcggaggtcctgggtatgatttcccggaaaggaaaggcgatctgtgtagccggtacacatgggaaaacgacggtatctacgctgactgcctttttgttaaaaaattcaaccgtaggatgtaatgcttttttgggcggaatagcggcgaattttggaactaatctattgctggatcgtaattcttcgtatatcgttatcgaagcagatgaattcgaccgttcgtttttacatctgagtccggaaatagcggtaatcacggcaatggatgaagatcatttggatatctatgagaataaagccaatctgttggaggctttcgaagcatttgccggacaagtgaacccacagggcgggagactgtttctgaaaaaaggattgcagttgaagcagacgcaggtaaccggttattacggcgtagaggtgaaagccgattgttatgccgatgggttgaggatcgaacagggacgttatgtattcgattatcatgggcgtggggtagatatcgaaggattgatactgggaataccggggcggttgaatgttgaaaatgcaacggcagccatcacgttggctttggaagccggagtacagcctgaggaaatccgcagggcactgcctgactttaagggagtagcccggcgttttaatatacaagtgtatactgaaaagaccatttatatcgacgattacgctcatcatccgcgggagatcgaggctacgctgcgttctgtccgggaaatgtggcccgatcggccggtgacggtggtttttcagcctcatttatatacccggacccgggattttcaggaggatttcgcccggagcctgagtttggccgaccgggtggttttactggagatttatccggccagggaacgacctattccgggaattactgcggaagtgatccggaaaaggcttactgttccggggaatattgtgacaaaagaggaactgttacaacagattatacctgattttcagggaggtatattggtgacgatgggagcaggggatatcgatcggttggtgggagagattggggagaaggtaaaaaggtagaaagtaaaaagttaaaggctatatgctataagctataaaggcgggaagaatgaaaaaaacattgccttacatattatctgtcagtttgtttgtatacctgataattgtgtttacctttgcatcggcaaaattgagggaggtaaaatgtgagggtttgcaggttgtcgttgacggtaccgaagaaaatgcgtttatcgacgagacggaagtgttggggattattaaacgcggatatggtgatatcgagggatgcaatatagtcagtgtcgataaagacagtttggagcatattctggtcagaaattcggtgattaagtcggctcaggtttactacactttggacggttattttcatgtagaaatcacacaacgaaagcctgtactgagaattatgtcaggtgaaggttattatgtggatgaagatggtaaaatcatgccgttgtcccggaaatatacgtcgcgcgtagtcgtggctaccggaaatatatccagaaagtttgcttgtaatggtttatacccttttataatgactttacggaatgatgagttctgggatgctttggtggaacagatcgttgtcgaaaaaggaaatgaagttgtactgatcccgaaagtcgggaatttcaggattgtattagggactttggacgatatgaacgagaaattggaaaatttacgtcttttccttcgggaaggtatagttttaaagggatggaacgtatataaagaaataaatctgaagtttaagaatcagatagtatgtgttaaaagataatatagcagattatgggttggactgcatctttggatatgggatctgaaaaaatggttatggcgctggcttcgggagaagggagcgtttgccatttgaaaggaataaagattatggcctcacaaggcatcgaacatggcgtaatcaaggataaggagaaggtgagaatgtgtattcgtagcctgatgtcggagctgatgaaagaccgggaaatcgaggtgatgaatgtggccttgtcgggagctgttttgcggatcgtcgaacgaagaatagtcgtacctatacaaaagaaagtcgttgaacaaagtgatttattccgggcagaacaacgttgcatagacgcttatggcggaggacaggatgaagtggtggatatcctgccggtaggttatgcgatcgaccgcggggaaatgatcgccgatccgctgggtagaagcggacggaatctggaggtgacctatcaggtatatctggccgattatgattatttggccgatattcagggactgttcgagggaagcgggattcaggagatagagttttatccggcggttcgtgcttatgctgaagcactggatgtagaacgggctgaacgtgactttgctttggtggatctgggagcgatgggagtgaacgtcgtccttttccgtgatggaatgttggaatatgaagcgcatttgccgatcggggtacggacgatagataccgatacgatggctgcttttgccttgagtttcggacaagcccgtaagttgaaacacgaatacggacaggccttaaggtcgatctgtaaaaataaaaaattgccgataccggatacccgcttaacgttggaaagccgggatttggctacggttatacaaagtcggtgcgaagaattgctggagggtgtgattttccagttgcagcaatggggattcgatgatgtcgaagatccggtattgttgacaggaggaggcagtcggttgcaggatgtagatgaattgttgcggcggatgtccggacatcctgtagaaagtgctgcggcacgtcggattcaggccccccgggaagaagtgttgcggacacctgagtatctggtggctctgggactgttgctttgtgcccggcaagaaccgaaggagacccctaatggtatcggagaaaagattgtcagaagaatcggtaagatcttcggtatttaggctccggaatgtttaacttttatttttcaagttatggaaattgaagacgacctgatttcattgaaattacctgatgcaactcaagaagaatcgatcattaaggtgatcggtgtcggcggaggtggaagtaatgccgtaaaccatatgttccggcagggaattcatggggttgaatttgtcgtttgtaatacggatatacaagctttgcgccagagccgggtaaaaaaccggatccagttggggaaggagctgacagaaggacgcggggctggttgccagcccgaaagaggacgtctgtccgctatcgagagtatggattttatcaaaacgattctcgaacataatacccggatggtgtttattactgccggaatggggggagggacgggtaccggagccgctcctgaaattgcccggcaggcgaaggaattgggtattctgaccatcggtatcgtgaccgtgcctttcagcttcgaaggcaaacgcaagatcgaacaggcgatgaccggtatcgatgaactggaagagtatgtagatgctttgctgattattgccaatgaacggttgcgggagatatacggagacctgaagttgtccgatgcttttgctatggccgataacgtcctgacgattgcggcgaagagtattgccgaaatcattaccgtaaaaggatatgtcaatgtcgattttgccgatgtcgagagcgtgatgcgggatagcggggtggctttgatgggagcggctgaagcggaaggagaaggccgggcgatggaagccttgacgaatgctttgatatcgcctttgttgaacagtaacgatattcggggagcttctaatattctgttgaatatgctttacggcgaaaaggaagtcacgatggatgaaatcagtctgatcaccgattcgttgcgggagaaagtaggaagaaatgtgaatgtgatttgggggaccggtaaagacgagaccttgggggataaactgcgggtagcggtgatcgctaccggatttaacaataaccggggaagagctactgctgcaacagagcagaaaatagaaacggcaactacgacatcggctaaaaagccctattttaaggtggagcccttgcccgacgatctggagatgaaggttatgaatccggccgaactggaggaagaagcccgtttgcgccgtcagaaacaggaagaagaacgggcgagaaaacagaaacgggaatctaaccgacgggtagaccgttttgagcggagccagcggggagtcaatgaagtgcccgatacgaacggatggctcaaacgaaagatcggtacgctttttagtgatgaagaataaacaaataaacgaataataccatggtcgacggatttataaattttaatctgaacgagaaaacgcctaccattatcaaggtgatcggtgtcggtggcggaggtggaaatgctgtggaatatatgtacgagaaagggatctgtgatgtcgattttgtcatttgtaatacagattatcaggcgctccgcaacagtccgattccttgtaaaattcagttggggaaagagttgaccgcaggacatggagcaggtaataatcctgccatgggagagaagtcggctcaggagagtctggccgatatagaagctattctgaagaaggatacccggatggcctttatcacggctgctatgggaggaggtaccggtacgggggctgccccggtgattgccaggttgtctaaggacatggggattctgacggttgggatcgtttcggtgccggcgcgtttcgaaggtccgaaacgtttggatcaggcccgtgacggattgcgtcgcttaaaagatcatgtggattgtctgatcgttatcgataatgaaaaaatcaaatcgatctatggatcgcaaactatatcgcaagcttttgcaaaagccaacgatgtactgaatatcgctgctaaaggtattgctgagattattacccttccgggatatatcaatgtcgattttgccgatgtcaggacggtgatgacggatagtggggtggctattatgggagctgcccaggctagcggtgaggaccgggcgatccgggcaatcacagaggctttggaaagtccgctgctgaataataacgatattttaggagcgaaagatattttactgaatattacttccggaacagatgagattaccatggacgaaatgtctcagattacttcccatattattcgtaaagtgggaaataatgccgctgtgatctggggtgtgggtaccgatcccgatttgggggatgccgtctctgtgacgatcattgctaccggtttccctaccggagatatcgagttgttcggagaagagaatacttgtgccggatatgctaaacaaccggaatgcctgaaagaggaagaagtacgggtgaaacccggattgaccgaagaacaggtgagggaattagagacggtacctgcattcgaacggagggacttgagggtgagttgaggctaaaagctaaaggctagaaagctaaaggctaaaagctaaagacgggagaggcacaaaaagtaaaaggtaaaaggtaaaaagtaaaaggggggaaagatagggggaggaagagagaaatggggaagaggagaaagtgcaacaatggagttgccaagtaacgcagcaagatgctgcattaaaaaaaagaatggaaaaatttaaagaattaggtttagaaggagaaattctaaaaggaattgaagatttagggttcgaggttcctagtcctgtacaggaaaaagtaattcccgtgattttaggggaagaaaatgatttggtggccttggctcagaccgggaccggtaaaacagcggctttcggtttgcccttattgcaaaagctggacacttcattgaatgcaattcaggtgctgattctgagtcctacccgcgagttgtgtatgcagatcggtaaggacttgcagaattatgcgaaataccggagtgatatccgggtggcatgtgtatatgggggggcggatatccgcaaacaaatcagggaattggataggggtgtacacgtattggtggctactccgggccgtctctgtgatttaatcaagcgggaagcggtgaaaatcgaacaggttcgggcagtcgtactcgatgaagccgacgagatgttgaatatgggttttaaggaggatctgaattttattttggatgaaactcctgcagaaagaaatacctatctgttttcagcgactatgcctcgtgaggtggaacgtatcgctaagaattatctccgtaatcctcaggaaatttctaccggaaagaaaaatcagggggcagatacagtgacgcacgaatattatcaggtgctggccagggattgttatgagactcttcatcgggtgatcgactgcgctccggatatgtatgcgattattttcacccggacgaaaatggatgcccgggaaattgcccggaagttacagaaagacgggatcgattgtgatgccctgcacggtgacttgagtcaggcacaacgggatgatgtgatggaccgtttccgggctaaacggctgaaagtgctggtggctaccgatgtggctgcccggggattggatgtggacaatctgactcatgtaatcaattataatttgcccgaagatgtggaaagttacacccatcgtagcggtcgcaccggccgggccggacgtgaggggatttcggtggctattatcaattcgaaagaaaaaggaaaattgcgccggatcgagaatatcctgaagaaaaaattccagtataaggaagtgcccggaggtgaagaagtgtgtcgggctcagctgtcgtattatgccgacaagatcctgatgacagaaccgaaagagactctggataaataccggcacgagttgttcgagaaattcgaggagttgtctaaagaagagttgatccagaagatgatgtcctatgaattcggaaaattactgaaaaaatatgcttcggttgccgatttgaatctttcggatgaagagcggcacgatggaggacggggagaaaaacggcgtggagaacggaaaaatgaagagagtgtgacttttacgactttctctgtgaatgtcggtaaagaggacgggttcactccacgtgatctgatgactattatcaatgagaatgccccgcggaaaggattggaaatcgggagtatccgcattttcggtaataatacgaaatttgaagtcgatgtgcgtggaatcaacgggtttatgtcttgtttccggaatgtcagtttcaacggtctgccctttacgctttccgaggtaaaggatcgttataaccgttcggaccggggtggagaacgccggagttctactgccaacaataaatggcgttcggcaaaccgccggagtgacggaagtagccgtggacgcttcggagaaaagaaaaaaggtatcgaaagcggaggtcgttcccgcaagaaaagataagacgataaacgacggatgaaatagaacaaaagataaaacagatgaaacggtgataacggttgagtctgttttatttttataatgaagctgtttttcaatggaagtattactatattttttgacaggagccggaataggtggtttactgacttatctttcgacccgtatcgggagaaaaggaatggaggtcaatcttcggatattgcaggaaaaagcgaaagcatgggaagagaaggaacagcgatggcaggaagaaaaaatggccttgatccgcgataatgaacggttgaaggagaatttgcggcagacggaagaaaaatggagggggcaaaaagaggagattttgcaaatagcggctttacagaaagaacagtttcaaaatctggcaaacgatatcctggaggataaatcccggcgttttacggaagcgaaccgggaaaatatagagcgtatactgagccctttgaataaagatattcaggagttccgtaaaaaagtggaagaaagctattcgaaagaaacggtcgagcggaccgtactggaacgaaagatcgcagaattggtgcagctgaataatcggatccgggaggatgccgtcaatttaaccaatgctttgaaaggaaatacgaaaactcagggtgattggggggaaatgattctcgaacgaattcttgaaaattcgggattgacgaaaggaagggagtatttcattcaggaaacgttgaaagatgaaagcgatagggtgatccggacggagaacgggaacacgatgcggccggatgtgattgtggtgtatcctgataaccggaaggtgattatcgattctaaagtttcgttgaccgcctacgtcgattattgtaatgcagagaccgaaacggaacgggaagttgccttgaaggcccatttgttgtcggtaaggaaacatatagacgaattgtctgccaggaattattgcgattggtgtgacggtgccctggattttgtgatgttgtttattcccaacgaatcttcttatgtgttggctatgcaatcggaacctaccctttggcatgaagcttatcggaaaagggtattgttgttgagtccttccaatctgatcgtatctttgaaactcactgccgatttatggagccgggaataccaaaaccgccatgctcaggaaatcgctgaacggggagctaagctctacgataaatgtgtggcttttctggaaagcctgaccgctatcggcgacaacatccggcgtacagaagaaagttacaggcaagcattaaaccgcttaaaagaaggtaacggaaacctgatctcccaaaccctgaaactaaaagaattgggggtgaaatcccgcagaggagacaaagaaatccctgaagaactaattaggtgattctgatttttcttgttttgtttcctgtttttctcattctccgttttatattttatctttgtaaaataatcccaaatggaatggaatatggatatagtaaaagcagaatttgtcgtcagtaatgcaacagtggagaaatgtccgaagccggaccggcatgaatatgcttttatcgggcggtcgaatgtcggaaaatcatcgttgatcaatatgctgacgaacaataaaaaattggctaagacggctgcacggcccgggaagacccaattgatcaatcactttctgatcaacgatatgtggtatatggtggatttgcccggatatggatatgcccgtacttccgaaaccgcccgccggcaatttgaaaaaatgattcgggattatattctcaaacgggagaatttggtctgcctttttgtcttgatagacagtagactggaaccgcagaaaatcgatttggaatttatggaatggctgggtgagaatggggttccctttgtgatgattttcacgaaagcggataaactctctgccacacaacgcttgaaatgtatcgacgactatcataaggtgatgctggaaacctgggagacgacacctatggcttttatgacttcttctgaaaagcgattgggacgggaagaggtgctggattatatcgatgaattgaaccgtaccgtaaaattgtaggattgaataggtttataaagtacataaactttaagtgacaaaagagcaactttaagaactgattatattttagaatatggagacgaacgttgtgcttgctgtcttgttttggggatgtttgctcctggggatgccggagggccggggacaggaggctgagtggcgtaaagggacttatcctgacgggacattacgttatgaagggtatttcagagcaggaaagcctgccggagaaatgaaacggtattatcctgacggtaagttgcaggcgcggatggtgtatcgcggggatacggtcgaggctgtgttgtacagccggaaaagcgattgttgcatgcggggaaaatatgtcggccggaagaagcaggggacctgggaatattttaagaacgattgtcttttgatgaaggaggaatatcgtgatcaggtattgaatgggaagacggtccgttttttcagtacgggtaatcccgctgaggaaaaaggttgggtgaacggtaaaccggaaggggagtggaaattgtattatgataacggacagttgcggatgatcgccggtttgaaagccggaaaattggatggggaagtgaagacttatagttatcaggggatattacgttcggaaggccggtaccggaatgaccggaaagagggaacctgggtatttttcgatgattcgggggtagaggtaaaacgtaaaaactaccgcgccggtatttcggatacggcagaggaagatgagctggaagaaagccggcagttggatgttttgttgtcgacggtaaaaaagattcccgatccggctgtttttgccgatgatccggaggggtatatgaaattaaccgggatggaatgatggaggcgatcagtctatatgaattgaacaaccggatcaagcagactttgaaggctagctttgccgattcggtttggattacggccgagattacagaggtacagctgaatcgttccggtcattgttatttgcaattggcggacaagagggaacaggaagacagtattgtagccactgcccgggggacgatctgggcgtttacctttcgtacgttgcgtccttatttcgagacgacaaccggacggcagttggagaaagggatgaaagtcctgttgaatgtcgaggtcgtttttcatgaattatacggttattcgttgaatatccgggatatcgacccgacttataccatcggggatctggaacggaaaaagagagaaatcctggctcagctcgaggccgacggggtaatcgatatgaaccgggaactggaattcccggtattgcctaaaacgatcgcagtcatttcttcacctacggctgcaggattgggagattttatgaatcagctgcagaccaatccgtacgggtatcgttttcaggtcaaactctttccggcgattatgcagggggataaaacgaccgattcggtgattgccgctttggaacggatttatgaatatgaatcggtattcgatgtggtggtcattatccggggaggtggttcgcagaccgatctgggctgtttcgattcttatgagatggctgctaatattgcgcagtttcccttgcctgtgattgccggaatcggtcacgagagagacgaaacaatcgtcgaccgtgttgcacatatgcgggtgaagactcctacggctgctgccgcttttttgatcgggactttccgggagcaggatgggcagttggagacctggaaaaatgattttatcgtaggagtgcaggaattgctccacaacgaacaaaacagacaggtggtaaggatatccgattttaaacgttcggtgcaagtggtgttgacagggaatcgaacaaacctgaaattgctgtcccaacgtttggaccatgcttctgaaaattatatccggaaccggcaggtatatttcgatcgtttgaaaatgaaaataaccggccggatagatgtcttggccgatcgtcagcgaaatcgcctggaaaatttcggaaaggccttacaacaacaaaccggtcggatatttgcagatcaacaccgtcgtctggaattggctgcaacgacgatcaaatacgtagatcctaaaaatgtgctggaaagaggttattcgatcacccgtttgaatggaaaagcagtcagaaaagctgcggttttacaagccggagagatcgtggaaaccgaattagctcatggtaaaatccaatgtcaaatccttaacaactcagcaactcagcaactcagcaactcagcaactcagcaactcagcaactcagtaactcagtaactcagtaactcagcaactcagtaactcagtaactcaaaaacttttataaccctatggaagaaaataaattaacctataaagaggctatggccgaaatcgaggatatcgtgactaaactggaaaataatcaactggatgtcgatgaattgagcggcaaggtaaagcgggtatcggaattgattgctttttgtaaatccaaactgcacgagaccgaggaagaggtagagaagattttgaagacgatagaagattgatgatgagatattggggagttgtattttgtttttgtctttgggggtggggcgtgcaaggacagccggaagtggctttaaagcaattactggaaacgccgggattgaatcacgctgctatcggtatatcggtgaaaaaagtcggagatggaacgacggtattggctcatcaggcaggaatggccttgactccggcctccgtgacgaaattactgcctactgtatttgctttacaggaaagagggaaagattttcgttttaaaacccgggtcgggtataccggaaagatacaagatggtactttaaccggagatttgattcttgtggcagcgggtgatccgacgctcgagtcccgttatttccccaatcattctcttttgagtccgatcgtcactgcgttggaaaaagcaggaatacaacgaatagacggaagtatccgggtcgagggagcattaccgggagtgaatattccgggatcgtggacttgggaagatgtttcgaattactatgcagctttgtatctgcccttcaattaccgggataatacctgtttttatcattttcagacaggagtcgcaggcactccggctaagttaaaagagattgtccctgctttgccgggagtgaaaatagtgaatgaggtaacggctgctgtcggaaaccgggatgatgcctgggtgttcggaggaccctatagtgaagttttatgtattcgggggactcttccacaaaaccggacgctctttaaagtgaaaggtgcgatacatcgtccggctgaggtatttgtggccgaattgaccgatatactgaaagccaggggaattaccgttgcgaagaaaaaaatcgaagaacaaccccgtacggaatggttgaccctgacttctcctgaattgggggaaatcgtattccataccaacaaagccagtgtcaatttgtttgccgaagccttagggtgcctggtagctccggcggattggccggaaaaggtcggaatgttactcaaagaggctgggataccggcggaaggaatgatcttaaaagatgcctgtgggttgtcgccgatggatgctgtgccggcttctgtttttaccgacctgttggtttatgcagacaaagtggtaggggagacattgggccgttcattgccggtggcaggaaaagacggtggtttaagtggttattgtatcggagcgacagcattgaaaggacggatgcaggctaaaaccgggtcgatgtccggagtacgttgtctggcaggttacctgactactacggggaatgaacgaatggcctttaccgttctcatcaaccattatacctgtactgcttcacaattacaaaaagcggtcggaaaattcttgcaaagtctgctgagctattgatattccgatcccctcccgtgattggtttatcttcggaaagaaagggtgaaaacacttcctgcaccggtttgtgatttgacggtgatattgcctttatggagggtcatgatttgtttacacaggctgagaccgatacccgagcctccggatttggttgtgaaaaaaggaacgaagattttatccaaagcttcagggacgatgcccggtccgttgtcctcgacgtggatggtgatctgagtggtgtcggactgggtggtgatgcggatcaggggagccggtatatcccggcaggcttcttcggcatttcggatgagattgaggagtacctgttcgatctgggttcggtcggcttggatttgcaggcggggatcgtgacaaataaattcacagggaataacagaggtcgcatggagtttccgaagaccggtgaataattcttccagcgagagcgggactaattcgggagccgggatacgggtaagtttccggtaattttgtacaaattcgagtaatcctttactacgccggtggatcgcttctaaagcctggagcatgaccggtgaggtcgcatcttcggtcgttgtccgggcaacccgttccgtcagggtttcggatagagaaatgatgggggccagggagttcatgatttcatgggtcagcacccggatcagtttttgccaggcttcgatttcattgttttccagtaccgaatgaatgtttttcaggctgatcaataataattctttgccctgtattctgaaaatgaccggattcagagcgatttcacggacacgcccggattgttccagacgcagaatatgagtttctccggggataagccgcagcaataggtcgggtaagtcaggggtaatcgctgccagttctgaaagttggcgaaggctggtcaggccgaattcccgaagcacggttttattataccattcgatggtgccgttccggttgaggaccaatatgcccgaatcgatggtactcaacaaggtattataatataggtgttgttcttcgagggtgtacattttttcccggaattgctttaaagcttgttccatcgcctgcgttaaccgagggtctgcctgttttttactccccggacggaaagataacgaaaaatctgaaaaacggatagccgtaatgagccgcatgaccatttcggtcaacttttgttgctgcttgtcgatatggaggataaacaggagaatgacgaaaaaagtaaagagcgaacaaaaccaaagcgatttcatcaataggattcccaacaaaacagaaaggaagaccaacgatccgctttgtaagagtaagatcagacgggagttttggaaagatttcatcagatttcgtatttttccagtttacggtaaagggcaaaacgggtgatgcccagcatttcggcagcccggctgatattaccttcacattttttcatcgctttctctatcgctttttgttccaattccatcaggtttaaggtttccaggtcaccggtagtactactatatgggggacgtaacataaaattgtccggttctaacagcttgcccggggccaggataacggcccgttcgacagcatgctgtaattcccttacattgcccggccaattgtattggagcaatttttgttgggtgtctcgtgtaaagcctgtgatttcttttttgtatttatagcaatagcggttgagaaaatgccgggccaggagtaaaatatcctttccccgttcccggaggggaggaatcgggatttcgatggtattgatgcggtaaagaaggtcctggcggaattttcctgtagtgaccatattgtggatatcggcattggtggcacagatcaaacggatatcgatgtttttaggctgagtagaacctaaacgggtgatttgacgtttctcgatcgctgtcaatagccgggcttgcatgggaagcgagagatttccgatttcgtccagaaacagggttccccccgaggcggtttccatacgtcctgctttgtctttccgggcatcggtgaaagctcctttttcgtaaccgaaaagctcgctttcgaataaggtttccgggattgcccccaggtcgatcgggacaaaaggagctccgttgcggggagagttttggtaaatggctctggctatcaggtctttccccgtaccgttttcacccaatagaagaatgttggcgtcggtacccgagatctttttgatggtgtgaattacttccagtatggccggcgattcaccgatgatttctactccttcgtccggagcggaaagggctgtcagctgctctttcaaagccactacttcggtccgggtttggcggagacggatagccgaggaaatggtggccagcagtttttcggtttcccagggtttaggaataaaatcgatcgcgccggcacgaatagctttcacggctttctcggtgtc

SEQ ID NO: 5876 - DNA, 12246 bp, Unknown
  gut microbiota DNA sequence
tatgcggtgataaacaacacgacggcttgcgggtctttttgtaaaattttttccagccatagaaagccttcttgtccactgctggcatcccggctgaaattcatgtccagtaagataatgtccgggttgaaattgtccataaaatattctatacgcgcaggagaagtggtgacctttattttttccacataaggctctaataatagattcaaagcaaaaagcacatcttcattatcgtctacaatcagaatttttccatccatggttttaggattgaacaggtgttgttattcatttcaaacaaatgtaggaataatatttacagcttgtatgtgcggattcgaacattttttgtgcggatatgcacatctattttatcgcttttgttttgtaagttattgattattatattattttgattgtggcacgttgtttgcctccctgatttgtaaaaagaaacctatgaacctgaaattatgctatatcacaggatggtcattactggtagctaccgggctttcggcccagaataggggcgatcttgcggttaaagtagcccgggatagcggtcaggtgatcgaattgactttgcaggaggctgtcgacatggcccgtacaaattcaccctcggcagtatctgcccgtcacactttccgttcggcttattggagttatcgttcttttcgggcgaattatctgccttcattgacgttttcgtctaatcccgatctgacacgaacgattagtaaagtcaccttgggggatggttcggagaaatacgtcagtcagaatatgttgacggtagacggtgaattgtcgatttcccaaaatgtctccctgaccggaggtagtttttttgtacagagttcgttacaacggatgaaattgttcgattccaattcggtatccttccgttcttccccgattattatcggttatagccaatccttgttcggatacaatagcctgagatgggaccgccggatcgaaccggtacgttatcgggaggcgaaaaaggcctatgtggaatcgctcgagctggtatctgctgaaacggtgaataaatttttcgctttggcacaggctcagagtaattacgatatggcccggttcaattacaataatgcggatactctgtataaattcggtaaaggtaggtatgagatcggacggatcacagaaaacgaacttttacagttggagatcaatcggttgaacgaatcgaccaacgtgatggatgcttccattgaaatggacaactgccgtcaggctttgtgtgtgtatttgggtctggataaaaatgttattctgaaagtccgggtaaatgtcgaagttccccggatccgggtgaatccggagcaagcctacgaattattcaaccgtaatagtcccgatatagatgatctcgaacggcaattattagaaagtaagagtggtgtggcacaggccagggcgaatgccggattgaaggccgatctgtatgtgcagtgcggattgtcacagacggggaccacttttaaccaggcctatacaaatcccaacgatcagcaacaggttcgtgtcgggatttccttaccgatcctcgactggggccgtggacgcggacgggtgaaagtggcgaaatccagggaagaattggtgaaaatacaggtggaacaacaacggaacaacctggaaatgaatgtccgtaaattggtattacaattcaacttgcaggccgaacgggtacagattgctatgaaaaccgaccagacagcccgccgccgtcatgaggtggcccgtaaactgtacttactgggaaaatccactattctcgacttgaatgcatcggtcaccgagaaagacactgccagccgtaatttcctttatgctttgagtaattactggaatttgtattatatgctccggagtatgacgctctatgactttgcccgccattcggagatcagtgtagattataaaaaacttgaaaattaaatagtatggaccggattcttgaaaaaaaaccttttatcatccgctatcggaactatctgattgccggtgtcgtttttctcgcctttttgatttacgtggtcgtaaattcgatgggaggacgcaagcttcgtacagaggccgataaactgtcggtcgaaacggtgagacaagataaattcctggagtatgtggatgccgaagggattgtacaaccgatcctgacgttgaaagtaaatacccgtgaagggggaagtgtcgataagatcatcggcgaagaaggggtgatgctggaaaaaggagatactatcctgatactgaccaatccggaactgatccgttctatcgacgaccaaagggatgatttggataaacaaattactgcattccgcgagaaagcgatcgagatggaacaaaaaagcctgaatttgaaacaacaggtattacaggccgcttatgaattggagcgcctcgaaaaaagctatgttttggatcaggaagaatataagatgggagtgaaaagcaaggcgcagctcgaagttgcccgggatgagtacgaatataaaaagaaaagtacggctttacaactcgagggattacagcacgattctaccgtgacggtgatccggaaagaattgatgcaaggcgatctcgaacgcgaaaagaaaaaatttgcccgggcctgtgaacgtctggataaattggtggtcagagctcccgtgaagggacaactgagctttgtcaaagtgaccccgggacaacaggtaggcccgaatgaaagcattgccgagatcaaagtgctcgaccagtttaaaatccacacttctctaagcgaatattacatcgaccggattactaccggactacccgccaccgtcaattatcaggatgaaaaatatccgctgaaaattacccgggtggttcctgaggtgaaggatcgtacctttgatgtcgatttggtattttgtgaaaagatgcccgataatgtacgcatcgggaaaagctaccgggtacaggtcgaactgggacagcccgaagatgccgtcgttattccgaaaggcaatttcttccagtatacgggaggacaatggatctacaaattggacgaatccggtaacagagcggtgaaagtacccattacggtaggccggcagaatccgcgtcaatatgagattatcgaaggattgaaagcaggggatcgggtgatcacctcgggttacgatacttttggagatgccgaagaattgattctcaaatgataaaagagcaggcaggcatgttgagacaggatttgtagatcgtctggcggtggctctgcaaatggacagggctgtcggtagcgatcctgcaagggccctgaaagaaggaaagtagaaattacagaaaattgaataaagagatgagttgtcatggactgaaaatggcataccggaatttattgaagtacaagttacaatcggtgatttgtgtactcgggttagccggaggattatcctgctttacggtatgtaattatatgttgaggaaagagttggcctggaataaacagttaccccattacggggagacttataaattggtcactatccgggaaaatggggaggtcgacgggttggtcagcctggatctggctgaacagttgaaacaggagtttcctgagattgaaaaatcggtatattatgtcggtatgtccggggtcagcgataaattatgtgtcgtcgggcaggaaaatgggaaacagacagctgcgaaggctttctttgtgctgacggatagttcttttttcgatttttatgattttcggctgacggcggggaatggggagaaattgaaaaagcaacccgatgttttgatactgacatccgaaggggccgataaaattttcggtacttcggaagcggtcggaaagagttttacagaagtaaatgattttgagaacactgagcgttcctggaccgtggcggcgatgatggaaaattttccgcatcgtacggattttcagtatggggacggggtgatcctgaattccgatgtattgcgtcaggcccgatacagggattatgttttcgtatactatcgcttgcgggaggggacttcctatgaattgctgaaccgtaaaatcggtgtttatatggagaaacatccggagtggaggggaaatacacctttgactgtgaaagtttatccttacaaagactataagaaactgaccgggaagcctctattgagtaaggcgggattgatattttccgggatcgggttgctggtcttgctgacagcgctgttcaatttcctgttgtttacggccggcaggatgttcaaccgcaggaaagaactgggtatccgggaactccacggagcgacatcagggaggctgcttcagctgtttatggtcgaaataaccctgactttgctcatcaccggtgtgatagcggcggccatgctggaactgatttcgatgtattttgccggggaatggacctattatatgaatttttccgagggtgggagttgggtgattaaaatgggaggtgatttagccgaatacctgatcggagtgtggctgttgatgttggttgtcggatacggaattatccggcaggtacggcaagcgactatgttacgtaatttacaaggaggagggattgcttaccgtgcccgtatgcagacagtgctattgggaatccagctggtcatttgtatgttcctgatcggtctctcctggtttatgcagaatcagcaaaaagccttggaaagccagatggccggggggatgacccgggcggagatggagcgtatttatgcctttaatctgaatggtgagagtctcgagccgatccggaaacaaatgcgcgatatgctggcggcgaatccctatgccgaagaatggtgccggagtggtaccggattactcgctccctggatgatgtatcccaaaggctatcggatagaaggtgtggaggaagagaaagaagtgacgttgaactataattgtgtcgacccgaactataccgattttatccatgcgaaaatggaggaagggcgttttttcaagaccggtgaaccttatgtgatggtcgttaaccgggcatttgccgattggctgggtgaaaatccgatcggaaagtctgtgactatcgatgggatgatgggagtgattacttaccggattatcggtatcatggagaatcttttacccgtaggaaacgaaccccggatcataccgggaatttatctgcctttcccggaaggttatatcaacgaaacgctttatgtgaaattcaggccgggatatgttcagcaagggatacagccattgaaagataaagtgcaagctcagttgagttcgtttacccctctatatattgaaaatctttgggtagatatggaaggttatttaagtaaggtgatcgaactcggcagtatgatcttttggctggctgttttttgtatactgatcagtgctttgggtgtgtattcggcaatgatgctggccgtggaaaaacgaagccgggagatggctatccgtaaaatcaacggagctactttgacggatattgccggaatcttttgtctgcattatctgaaactcttgatctttgccgcctgtatcgcttttccgctgatatacgggacgatgcaccggtggctggaagaatatagccaccggatcacgttgagaccggatgtgtttgctgcgatttttattctgatgatgatcattatgctgttgacaatcgggtctcaattgctgaaaatcatccgggtgaatccgaccgaggtattgaaaaacgattgaagatattattttttgtgattggtatgaaattatgattcgacacattttgattgttgcctggcgcaatatctgtaaatataaagtatcggccggaattgcggtagtcggtctggcgatgggattactctgttttgtattgtgtaatttttgtgcccgtttgttcttttcgatagataaggtcttccctaactatgaccggatggcggagatacagatcaaggtaggagaaggcggggagttgcaggattattttgccgggacaccgccgactttggccggggatatggaaacggcttttccgggacagatcgagtgttgtacggcagtatcctatgggggacaaatgaatgtaaccttcgaacgcggagagaaaaaacctttggtctgtatgctttatacgatcgaggtcgacagcaactttcagaaggttttctcggtgcaactgaccgaaggaaattggaggcagttgttccggcaaaagaatgctgtagtattgagccggtctgctgcacgtcggatttttggaaaacaaaatccggtcggtaaggtattccatccgaataaattgacaagaaggtccgaaagaaattatactccggaagaattggccgctatcgattatgtggtgtcgggagtgatggaggatttgccggtgaatgccagttatagtctcctgaatcggattgatgccctgttgattaacgatcagcagggccgatttgccgggtatgtaccgggagagggaaccggatgtacgacgtttgctttgctatatcccggagtgaaaaaagaaacggtgaatcaaaggatcgatcccgaaaaaaataagatttttgtctcgggaatggaaggaagaccgcagttattgtcacccggaaagaacagtacggaatattatcatgatctcggctatgggtatttatgcatcggattattgatcctgttggtggcggtactgaatttttttattttcatcagcggtaattttctgaatcgacaaaaggaatacaatatccgccgggctatcgggagtagctgtcgacaggtattggggttgttgtttgccgaaacgatgatcatgcttatggctgtcgggattatcgtggcttgtttgctcgaattactatacgataggttggattttagtctgacgaggcaggtgatcgtttttgagccggctatgctgtaccgccatttgttacaatatctggggggctgtgtcgtcctgtttctgggagtttgctgggggatttcccatcggctgaatcgtcagagcatacagaccggtataggaacctccctgaaaataagaaaaaacagattacggaattggatgttgggtatgcaattggtgatttgtttcctgttttttaccggcggactggccgtttatttacaatcggaaatgaatatgaagaatatttttccttttctcgataaacaggagagggagcatatcctcgaagttaatctcacctatccgcagttgcagggattggaaacggcttatatcgcccgtttcggagagattgccggtgtcaccgatgtcttgccgatggataaggatttgttcggcggatacttttcgacgacgacggttcggctgggggaagggcagtaccgggaattctgtgaggtgcggaccggaccgaattttgcttctttctttcatattcccgtacttgccggcgaaatgtttaagtatccggggcaaagggtggctgaccggattatcgacggcatatacggaggaaaggtcatcaccgatggatttgaagatatcgatgggaaaaaaataaatatctgtggggtggtggaagctattcctcagatttatgcagaaagtcatacgtgggcacgtttatggatgttgagtgaacatcccaggtggtgttatcttaaagtacttcccggctccaaagcgaaggtcatggagacggtgcaacgtatgctggccgaagaagtgccggaaagtctggacaaccggatttttacactggaagaattggtgcagaaagaaaatcactcccaggaacagatgaaatcgatgttgctgtttttcacgctggtgtgtctgtcgattactgttctggggatttattcggcgatcagtatcgataccgaaaggcgacgaaaggaaatcgctatccgtaaaatcaacggagcatcggcttatgtgatagtacgtctctttgcccggttatacctgaggttattagtggcggcgatggtgcttactttcccttttctgaactggatcatgcatttgtggcttcaggggtttaccctgcatttcggtcacggtccggccttttggatttttatagtctttgtgatggtaacggtggtggctttgaccattgcctggaaaatacgcgcgatcatccgggtgaatccggtggaggcactgagggatgaataagaggtaaaaggccgggaggctataggctaagggctgaaacagaaaggagaaggctgaagtgacttgacaaactcctctgaaagaagataatatcgtctttcagaggaaaattgaattgataaaatcgctggaacgtaatggagcaacctttatttggcccggtatttattttcccggaggatattcaggactttttctttcacttctccctgaatgatgatctctccgtcttttaccgatccgccgactccgcatttgttttttagcagtttggccagttctttcagatcgtcttccctgcctacaaagccctgtactaaggtgaccgttttccctttacgttgtttggagtcgagcattactctcagattttgtttttccgggggtaatgtctcgtcttctgtctcgttattgtattcgtaattatagttcggatcagtggaataaactacatggattcggttctttttatctgctttcataaactaatatcttaaattcctgagatgatacatccctaatctttcatcttcacttctctcccatctcttaatagaaatacaaatatagaactttttgtttaattttctgttaaagggttgtttgtgagaaaatagccactaattttgtatcaccaaaaggtggaattgaaaaatattccatacggcccatataacaaagaactataaacgtataaaaaatgaataagattctgaaaaaaacgtacttctctgagaaggtggtgcaaatggtcgtcgaggctcctttaatagctaaatccaggaaaccgggtaattttgtgattgtacgggtaggtgaaaaaggcgaacggatgccgttaacgatttcggacgctgatccggtgaaaggtacgattacgcttgtgatccagaaaatgggagtttcttctaccaaattatgtaatctcgaagaaggagaatatataacggatttggtaggaccattgggcaaagcgactcatatagagaaagtgggaaccgtgttggcttgtggaggtggtgtcggtgtggctcctctgttgccgattatacgggcctttaaggctgccggtaaccgggtagtgagtattttggctgctcgtactaaagaactgattattctggaagatgaagtgcgcaaagcttccgatgaagtgatcatcatgaccgatgacggaagttatggtaaacaaggagttgtaaccgtggggatggaagaagtgatcggccgtgaaaaagtggatctgtgtgtaactatcggaccggctatcatgatgaagttttgtgctttactcactaaaaaatatgaaatcccgaccattgccagcttgaatgctatcatggtggacggtaccggtatgtgtggtgcctgccgggttactgtcggtggaaagaccagatttacttgtgtcgacggccctgaattcgatgcccatcagattgatttcaatgagatgttgtctcgcttgggaggttttaaaggggcggaaaccgaaaaaatggaggaattcgtacatcatggcgaatgtgctctgagcgatcggaatgccgattggcggaaagcactgcgcgaaactgtgaaagcgaaagagcgtacgatgatcgaaagggtgaaaatgcccgaacgtactcctcaggaacggatctctagccagcgcctggaagtgaataccgggctgacgaaagaaatggctatgcgggaagcccggcgttgtcaggattgtgctaatccgacctgtatggaaggctgtcctgttgggatcgatattccaggatttattaaaaatatcgagcgtggagagattcttgaagctgctgccgtattgaaaaagaccagtgctctgccggcagtgtgcggacgggtatgtccacaggaaaaacaatgtgaatcgaaatgtttctatctgcaaaaaatgaaaaaagcaccggtagctatcggttatctggaacgttttgcagctgatttcgaacgcgaatccggtcagatggcgatacccgaagtggctgctcccaacggaataaaaatagcagtgatcggttcaggaccctcgggactttcatttgccggagatatggtgaagagaggctatgaggttacggttttcgaagcgctccacgagattggaggggtattgaaatacggtattcctgaattccgtctgccgaatcatatcgtagatgtggaaatcggtaacctgaaaaaaatgggtgtgaagtttgtaactaactttatcgttgggatgaccgaaagtatcgaagacctgaaaaaggagggtttcaaaggattttatgtcgcttccggtgcaggcttacctaattttatgaatattccgggagagaatgcgaatggggtgctttcctctaacgaatacctgacccgggtgaatttgatgggggctgataacgagttttcggatacgccggtctaccggggaaaaaatgtagtcgtagtcggtggtggaaatacagcgatggactctgttcgtaccgctaaacgtttgggagccgagagagcgatgattgtttaccggcgcagtgaagaagaaatgcctgcacgtctcgaagaggtgaaacatgccaaggaagaaggatgcgaatttatcactttgaccaatccggtagaatatatcgctgatgaaaagggaagagtaaaacaagtcagggttcagaaaatggaacttggtgaacccgatgccagcggacgtcgtcgtcctgtgccggttgaagggagcgaatacctgatcgatgccgatgtggtagtggtagctgtcggagtttcgcctaatccgatcgttccccgttcggtggccggactggaagtttctaagaaaggtacgattgtcgtgaatgatgctaccatgcagtcgaatctgccggagttttatgccggtggggatattgtccggggaggagctacggtgatcctcgctatgggagacggacgccgggcagctgctcatatggatgctcagctaagatcgtaatcggtctttatagagaaggagctggtccaaaagttttagcttttgtggtcagctcctatctgttctttacctctttcctgatccgggtaaaaaaacgcctccagcgataggctttcgtttcgggatctttggctgtcagaatcaaggtcgctttaccgatgataaattcttcggggataggccccagatagcgcgaatcctgagaattccacatattgtcaccgcccataaaataccagttggtacggaaagtataacgctcgaccagtgaatcgccacaccacacctgaccttctcgctcttgcaagttcagcccactttcgtatttaatcattttataatagatccggacagctgaagtatcgatcggtaaggtatctcctttacggggcagataaaggggaccgaaatttataaagttccagcctagccggtagtcgaatggataagtgttgtatattccctgcggatattcaccccgataattggaaagcatctcctgatcgttcagattgcctattccccgcctaccgttgatttcataaaatccccctttgatttgcagactatcgcccggtataccgatgcagcgtttgacatagaaacgggaaaggtgcatactgatcctgtcccatcctcctgaatagggaaaattaaaaaccagcacatccccattatgaattttcgagaagcctttgatccggtaagtttccggttctgttcggtctttcagaaaatcgaaatttttatacatccgcgcaccgaaactcaatttatttaccataataaaatctcccggttctatcgtcggttgcatggagtcgctggggatggaataaaaatcgacgacaaacagtcgtaacaagattgctatcactaacgaaataacgatgactgcaatatattgaagtatatttttgataatttttttcattataatctgatcggaaacaccgttttattgaacggttgaagttaacgataattttaagaatatatcactttccactatttttttaacaatagcccgctttctcccttccccgtgagttacagcctgaggggacc

SEQ ID NO: 5877 - DNA, 21427 bp, Unknown
  gut microbiota DNA sequence
cttatcaaacatcattttgatacatatttcatttccagcccttaaagcttcaataatattctcttcagaaaataataccatccactgcaaattagaaaaggcagatcggtaccttcgcaaaaataattattttcaaattatctgctttttgatattgccttgcctttttataccttatctctaccatttacacttctctcattcctcttctatttttagaatcacaacatccctcaaggggcggcaattatcgtccgtctcttgttcggcaatagaatcgacaatttccattccctcgatcacttcaccgaaaacagtatattccccgtctaaatggggacttcccccgatggtcgtataggctgcccgctgttccccggtaagtttcaacttcacctgatcgaataaaagacgggtcgtatcggatagcttttcgttcaactgcatcaacttctcataatcatttgctagttgatacttcaggatttctccttcacaagcttgttgtaaacgattaaaaagggcggtatagcgcttgttattgattttctctatttcttcatcgatgatatcgggagtaaaaattcttccctgcacgatataaaaatgcgatccgctggagctccgttccggattgatattatcggcttcacgggccgctgccagtacccctcttttatggaaatatttcgggacaatctctgctttcaatgtgtatccgatatcgttagctcccaagaccatccccggacgtgccgatttcgaatccggatcaccggtctgaatcataaaatcctttattacccgatgaaaaagcataccgttataatagccttcgcggattaatttcaggatattatcacgatgtaataccgtctcatcatacaatttcaaccggatatttcccaaagaagtctccatgcggataaccgtgtcctttttccgctcacaagctccgagcagcaggcttaacaccaggataaaaacaattcttttcataaactacaaccattaggaccgaatgatacctttcttgtcagcaaaattaatttatctcggcataaactaacctattttttactaaatttgtgacgaaatatcgttttccggttcaaacctgtatatttgcgacaaaattctttgacaatgaaatttacactgctatttctattacttagctttttgatttacggttgtaaaaataaagaactgccggccaagtacctgagtacgattactgttgtccgcgaaacaggaggcaaccacaacatacggcaaaccggcgaggaagctacttcaccttcccatgctacgccaatacttccccagcaagctaatacccatagtggtaccagatatcatattatcgtggggagtttcagctctgcagaaaaaaaacgggcggaacagcttgtcgaaaaattaaaagcccaggattatccggccacattgatcagttcttcccaaagatatcgtgtcagcatagaaagtttcccaacagaaaacgaagcgaatgcagcccgggatgaataccggaaaatcaccgaccggcaagatatttgggttcacaaagtcaactgacctataaaaggattccaaatacaaaaaacaaaccgaacaaaaaacccagataaacctgcaaaggagtgtgttttttcagatacaaacgggaagttgccaatataccggacaaaagcaaaaataaaataaaagcattacgcacgtccccctgatagttcatcccccagaccagcagaaaaccacataatccaccgatagccgtcatatgcatactgatcttccaccggaaagtaatcactgaaaaagtggacaacaaaataatcaacaccaggtatagctgccttacgatatttgtataaccgatacgtcccaacagccaaaaacctaaaaaggcaaaggccacagccaccaatatcggatataccctttcttgtttatcgttcaactcataactgcggatcaacctgaaatgcttaaacaaaggcaaactgataacgggcatgatcaaaagagcgaatacggtcaccagataacaatacaattttaccccccagggaatatacgcaaacaaagtgttattattgaagataaaaaaaagaatatacaaaggcatcagcatcggatgcaaaatataagatattgtttgagctatatatttcatcgatagaggtttagtttatatttcacgtcttaatcgggccaccggaatatcgagcatttgcctgtatttggtaaccgttctccgggctatctgataaccggccttctccatcaaaatcactaattcgtcatctgtcagcggttttttcttgtcttcatcatcgaccaattttttcaacatattcttcaattcacctgtacttacctcctcaccacttgtcgtttgcatactgccagtaaaaaaatcctttaaagcatatattccaaaccacgtctgaacgtattttgaattggaaacccgtgatatcgttgaaacatccaatccggtaatatcagctatatcttttagaatcatcggtttcaacatcgtttcatcaccggtcaggaaaaattgtttctgaaactgtacgatagcggtcatggtcagcatcagggtgttgtctcgttgttgtacagcatctataaacgatctggcagaattcaatttatactttacaaacgacacgacatctttcttattcttaggcgactggtctttctgatactgttcaagaatattcagataagctttattgattttcaattcgggaatatcccctgaatttaaactcagctgcaattctccatctaccaaatcgagcataaaatccggaataatcttttcggcctgttgtccgtaagaaaaatcggcgactgtccccccgggcttgggattcaatttcaaaatttcgtctatggcctgtttcagttctgtatcgctcaatcgtagtttccgggatattttttcgtaatgtttacgtgaaaactcttcgaaacattcttccaaaattgctttggcatcctgcaacagtttgtgctccggattttcgttcaatttatgttgaatctgcaataacagacattctttcaaatcacgggcccctactcctgccggttcgaactcctgaataatcttcagcaagcgtaaaacctcttcctcagagacctcgatccctgcaccgaaagccagatcatcgacaatattctcgatatcccgccttaaataaccgtcctcatcgatgtttccgatgatatattcagtgatgcgccgctccagatcgctcaacggacgtgtccctaattgtgcgatcagactttcccggaacgaggacgcctgagagaatacaaaatcacgtgtctcctcgtctttagaagcgttggaagaattcaaacggtaatcaggtgtatcgtcatcatctgtcatgtaatcctctaaagaaaaatcatcgtcacctctcaaatcattttcctcttcgctttcaccttcctgataatcatcatcaaactcctctcccgaatcggtggcagtttcctcgtttacatccgtttctcctttttcttccacctcctccaacaaaggattttgctccaattcttcttttatccgctgctccaattgatacgtaggaagctccaacagtttaatcaactgtatttgaagaggattaatcttcaatcctaatttctgctgtaaactttgtttgagcacgttttctattctctcattgaaaatataccaatgtaaaaattacattggtataccgaattaatttttaaaactctgcattcttaggtgtacgcgggaaaggaatcacatcccgaatatttcccataccggttacgaataacaataagcgttcgaatcctaagccgaacccactatgaacagccgatccgaaacgacgtgtatccaaataataggacatgctctcttcggaaatccccacttcgttcatccgggctaccaatttatcatagttctcttcacgctgtgaccctccgataatctcaccgatctgcgggaacaacacatccatggctgcaaccgtttttccgtccggattttgcttcatatagaaagctttgatttctttgggatagcctgtcagaatcaccggttttttaaagtgtttttctaccagataacgttcgtgttcactttgcaaatcgacaccccagccatccaccggatactggaattttccattcttattgggcttactatttttcagaatctcgatcgcctctgtataagtcactctttcgaaagaatgagtcagcacaaaattcagcttctcgatcaattccatagaacgttcttccgctttcttattcttttcttcctcctgctgacgggcactcaggaatttcagatcatccatacaattgtccaaagcataacggatcaggtatttcagaaaatcttccgccaagtccatattatcgtccagatcgtaaaaagccgcctccggttcgatcatccagaattccgacaaatgccgggtcgtatttgaattttcagcccggaaggtgggtccgaaagtatagatttttcccaaggccatagctccaagctctccttccaattgtccactcaccgtcagattggttgctttaccaaaaaaatcctgtctgaaatcgacttcaccctcttctgtcaaaggcggatttttaggatccagtgtcgttacccgaaacatctcgccggcaccttcacaatcggaagccgtaatcagcggagtatgcaaataaaagaacccgtgctgatcgaaatattgatggatagcaaacgccatagcatgacgaatccggaaaatagccccgaacatattggtgcgaaaacgcagatgggcatggtctctcaaaaattccagactatgctttttaggttgtatcggatatttttcaggatcggcttcccctaatacgtccaattcatgagcctgaatttcatgcgattgtccgcttccctcactcttcaccaacaatcctttcacatgaatcgcagctcctgtagtgacttttttcatcaactcctctgaaatattattcatgtcaaccacaatctggatattatttatggtagagccatcattcaaagcgataaaattcacttgcttattacctcgcttggttctcacccaaccactgatttccacttctttgtcgcaatctccagattgcaataactctttgattgacaatttttttgtgctcatctcgtttaatttacacatgaatcgtttaacattctcttccgcctcttcaagacacggatttgcaaagataacaaattcagacaaaaataaagttctcctgcttaaaactttattcaataccttcaaagaaaatctcctaatcaaacgacgaataaatcactgaacacatcgtccgaaaccaaccatcctttttctgtcagcctgatccggccgttttgacaaaccaccgacccgttttcgagaaaaggggctagtttcggacgaacggtcttcgaaaagtcaggaaactgtaattgcatcttttcttcctgaatcccccacatcgtcctcaggttggtcatgatatattcgttaaatttatctttatccgtcaaaatctctttttcaaagcttaacctatcattagctaaattatcgatataagattttagatgagctacattccattgacgggaattcagatcgaaagaatgtgcagccggaccaaagcccacatatttctgttgttgccaataggaggtgttatgtagggaatatttagagtttttagcgaaattagaaatttcataatgctcgaaaccaattgatttcaagtaatcggaaacccacaaatattgatcagccagttcatcgtcggtttgaggctgaaatcgacctttctgcatcaatttttcaaagactgtatttgaatcgatgcttaataaataaaccgataaatgtgttataggtaaatgatttacgatttccagatcttgttgcaaatgcagtctcgtataccccggtaatccgagtatcaaatctatccctatattttcaaatcccgaatcagcagcccactccacggaccggagggcatcctgagccgtatgtgtccggtttatccgtttcagaacctcatcgttaaacgattggataccgatactcaaccgattaaaccccaaggctctccaccccttcagtttatcccgggtaatatcttcagggtttgcttcgatagtgcgttcagctacgcagttcaatgcgaaattcatttcgagtgtcgtaacgatatcggtcaattcatccatactcaaccatgagggagtacctcccccaaaataaagtgtctttacttccgatgtatccaaataatctttacgcaattgtatttcgtgtcctaatgcagctatgtaggcttttttcagctgagtagaagcaaccgaatagaaaccacaataataacacttactccggcaaaaagggatatgtacataaatgcccatagcgattttttgaaatttcgatacaaagctaagaacaaaatccggaaccaacagagtgcagtcttcatctttttactacatttgtaaggattgttgatagcttcttatgcataaattcttatttatcatcggtttgttcttcccaggaattgttttctcccagactcttatcgtcgggcgggtaatcatccatgacgggactccggtaagcggcgtcaatgtctggtgccccgaacaaaacaagggtacttcttccgattccacaggctatttcgagttagcctgtgaagttccctgtacgctggaattttcacatgtgaattacaaaaaagaaagctatactttgaaagacacccggagtccatttatcgtcattctaagaaataaattcaacaacctaagggaagttgtcgttaccggccgatcgattcccggacgcctctattcctcgaaagaaggtatagaaatgattccggccattctgggcgaacaagacattttaaaatacctggccacaactccgggcattattaccaccaatgcactcgatccggggatttatgtccggggaagcaacagttgcgaaaatggtttcctcacccatgatatggaaatcgccagcccggatcatcttaccggaatcctctctactttcgatccttttatcctgaataattcgacagtctataaaagcggtttcccggcagtttacaacagttacttatcctcttacatcaatatgaggccggatcccggaaacaaacaaaaatacgagggagaaatcactttaggccttgtctcttctgccctgaaaataaaaggtccgttagtaagagatcatacctcttttgccgcttcattccgtacgtcctatttacaaaccatcgcccgcttatataacaaatcggtaaaagaccagaaacaacaaaattttatgcccgaatatgctttcaacgatgccaccgtcagtatagattccaaactttccaaccgttggcgggtcactgccttcgggttatttacgatcgacggtctaagtatgaagttaaatgaaaatgtaaattatgactttaactggcacactttttcaggcaatgcaggtgcttggtatacccctgcaaacggtgatatcctgcatttccgattaggggtaaaatctgctttcagtgaaggagatgccgaaggtacgattcctatgggaggtggtaaccggaattattccatcattgcacggatcatgtatacccattcttttctggacaagtttcaatggaatatcggaggaaaattcgaacaagcccgttttgaaacagccaataggcccgatgcagaagaaaacatactcatccgcagttctgataaaaaattcaatatctatgaaatatattcagatatatcctatcaaataaataattactttacctgttatgccggtttaaattttcaatattacaacggaaatttaaaaaacttctgtgtttctccccgggcaaaaatcagcttttcaaaaaacagattcactttctgggccgactatgcccaaacggcacaatatttaagcctttatccctactttactgtaaaaactccggtagatatctggtatcctctcgaaaaaaacatgaaacccgcgctctgccaccaatattcgatcggagcagaacaggaaatccagggaggtttgactttatatgcgggtattttttataaaaaaatgaaacatgtcaaagatttttcctcagggctgtccactaaatacactgccctgaccgacaatatgattaccggcagcggatatgcccgggggtttgaattcaatctggccctggagcgtagaaagatcagtgcccggtttaactataccctctcggaatccaaacgtaaatttgctgaaatcaacaacggaaaatcctttttccctccttatgatgtcaaacacaatgttgtggtcaatacctcctacgatatcagtacacgccttacttttaacagtttatggacattttcttcaggggtttataccacattccctgtcggagtagctgttgcccataacattagcagcagccaaaaccaaccggtcctcgtgccggtctatacagaccgctacaattacaagcttcccaacaatcatcgtctggacttaaacctggattatacgatcccttataaatatgcaagcttaaaattaagtataggagcctataatgtttacaatcaatcgaatccatcttttgtctattttaaagctgaacaaacggcaaacaatcatacaaaatttattccaaaatctaaagtcatgttgccgtttataccgtatatttcgtttaaaataaaattataaatgaaacaccgatactatccgatattactgctgtattttttccaggcagcgtgtatgcctgaagaagatctccctatccgtcataccggggaaactccggagtattttatcgagtgttattgtcaacccggccggccgttcgctttatcggcaacgagtgtgcttccggtatccgaagatctgcaaatcgacttttcaaaagaaatgaaagtgaccattcatgcagacaaagccatttcactgatacatgctttatacactctccccggttccgagtttatatacaattatggaagcccggaaaaatttgaagtccgctatatcgattctttattcctcgatattactacgatcgatcacaaatcgatcacagcttcgacctccatccctccggcagtatctatctataattgccaggtagcaggaaatgaagcgatcattcgtttttatatttcggaaaaagccgatgaaaactattacatttatacagcagaagctgtccatgcagattcgattctcaacaaagaagtatgttatctggattatagtgaattccaacaggaaggccttactgaaaagtccgttatccttccggatatcggacaggcagaggaaattattttcacgctgaaacgaattacgaaagctaattacgattaccaggtatccctaaatgcagcaaatacagccaatcagagcagtatcacgacccctgtccctttaaaaggtaatctgcagggagctctgggtatttttacttgttatacggaagacaaacaaacggttccactataagctatcagtccctatgctatatatatttttgacagttatatacatatttacacgttataaacgtagaattattttgttacttgttcgtcttcggtattcgtgttcggggacccggtcgcttctgtcggtcgtctacctttttctttcactgaccggcggaactcctcgcaggctcgtcagacaccaccggtcgggcattcagaaaaagcaagacgacacccgacagagctccaatggtccccgaacacgaacacctccgacttacgttatcactgcataggaaacgaactgtgacctgaaaagtataaacttctatcaaacagctgtttttctgaacccttaccttcggaattaattcagtaatcggtattttataggaataatccggtcaggtaacccaggtatccatactccggtcagggtggcctgccctttcattcaatgaaactttccttctttgccctgtcgtgctgacggaagatgcagggttttatgccggaagaccattggagcaggaacgagggtccggttaggatttccgaacgcccgaccggtggtgtctgacgaacgtagtgaggagttccgccggtcagtgaaggaaagccttaacggaccgttccaggcgaaccggtctgatggcacaaaacccggaatcggaatagaaagaaaaaataaacctacatttagtgtaaacatgtatataaaatcaggctatttcaaatcgaacttccctatatcgtttttaacgatgatgcaggaaatccggttaatttgcctctaacgaacctgctcaatgtgacttatgtcaaagccgaacgttatctgatccttcattacgaataattcacaaaatctattttatagacaaaactctttgattataaataatctttgattaaatttgcccctcattttggagtggtgcacacttttaaactgcaaggttgaaccttagccatttaccttgcaggcacattttcagtgaatgggattttggcctgcccgactatgcgtttttcccattctccgttaattgcaagggtttgccgcgccaaaaaacaaacagatgtatcattaaaaattaaaaaaagtggatcaagtaagttacaaaacaacttatgtcaacaaagtcaccgcacaaaaagagtgggttattgttgacgcagagaatcaggttttgggacgtcttgcttctaaagttgcgaaactgttaagaggcaaatacaaaccgtcctttactccgtttgaagattgtggcgacaacgtcatcatcatcaacgcagaaaaagtagtgttaaccggtaataagttaaccgacaaattgtacactcgtcacaccggatatcccggaggccagcgtcacacctctccggcagcagtattgaaagtacatccggaaagagtaatcgaacacgccgttcgtggtatgcttcctaaaaaccgtctgggaagagcagttttgaaaaaccttcacctgtatgcaggcaccgaacacaaacacgaagctcaacagccgaaggtaattgatttaaactctttaaattaacagatcatggaagtaattaacgcaatcggtagaagaaaagcagcagtagctcgcgtttacgtcagtgaaggaaaaggcaatatcaccatcaacaaacgtccgttggaagaatattttaccttacctacactccagtacattgttaaacaacctctcgaactgttgggagttaccggtcaatatgacatcaaggtaaatctggacggtggtggtttcaaaggccaggcagaagccctgcgtctgggtatcgccagagctctggttgaaatcaatgcagaagacaaacctaaattaagggcagcaggtttcatgacacgtgatcctcgcgaagttgaacgtaagaaaccggggcggcccaaagcacgtaagagattccagttctctaaacgttaatctcagtttagtatctaaattgacaggactccttcagtgggactacctggcaattgcttaaatgaagaatgtaaactttttaaaaacacaaaaatgtcaaatacgaatttcgacgaattattaaatgcaggttgtcacttcggacacctcacccgtaaatggaatcctaaaatggctccttatatttttatggagcgtaatgatatccacatcattgacctgaacaaaacagctatcatgctggacaaagcttctgcagcactgaaacagatcgctaagtcaggccgtaaaattctgtttgttgcaacaaagaaacaggctaaggacattgttgctgagaaaatttctaatattaatatgccttatgtgactgaaagatggccgggtggtatgttgaccaacttcccgacaatccgtaaggcagtgaagaaaatgaccaccatcgataagatggagaaagacggtactttcgaccacctttcaaaacgggaaaaacttcagatcgctcgtcagcgggcaaaactcgacaagaacttaggaagtattgccgatctgacccgtctgccagcagctcttttcgttgtggatgtaatgaaggaatatattgcagtgaaagaagctaaaagtctcggtattccagtatttgcaatggtagacaccaactctgatccgagttgtattgatttcgtcattccgtgtaatgacgatgcttctacttctatcagtttagttatcgaccgggtagccgatgctatcaaagaaggtttgtcagaacgtaaagctgaaaaagacaaagaaggcaccgaaaaaaaaccggcagctaagaaagtagaaaaagtagctgaaggcgaagctgaagaagttgcagaagaagcaacagaagaacaataatcaaaaaattacaaacatggaaataaaagcagctgatgtaatgaagttgcgtcatgcaactaatgccggaatgatggactgtaagaaagcacttcaggaagctgaaggagatttcgataaagcagtagacatcatccgtaaaagaggcctgattgttgctagcaaacgtgcagaccgcgaagctaaagaaggctgtgttttggctcacgcagaagggaagaaaggggttttggtaagccttaattgtgaaaccgacttcgtagctaaaaatgaaaacttcatcaatttcaccaaacaaattctggatacagcttttgagaatatgcctgctgataaagatgctcttttggcattacaaatcggtggccgttctatcgcagatcagatttcagaacaaaccggtgtgatcggtgaaaaactggaattagcttattatggcaaaatcgaagccgaagctactatcgcttatattcacccgggtaataaattggctactgtgatcggtttcaacaaagatgccgatacccaagtgaaaaaagacatagcgatgcaggctgctgcaatggcaccgatcgctgtcgacaaaaacgacgttcctcaggaagtgatcgctcacgaactggaaatcggacgtgataaagcacgtgaagaaggaaaacctgaaaacatgctcgataaaatcgctgaaggccgtctgaacaaattttatcaggagtctaccctgttgaatcaggcttttgtaaaagatgctaaacaaacgatcaaagcttatttagcaagtcaggacaaagatctgaccgtaaccggatttattcgttttacactgaacgattgatccgaacccaatacaataagagagccttagaaataaggctcttttttattacctccgccaagcataaatttttttattcctttatagccgaaaatgaaaatgaaacctgcaacttcaggtaaccgaattcatttttatacgtacgaaatatctataaaggaaaaatgatgaaaataaccagatatttacttttctttgcgtgctttatacctctcttgtatttcagggattttactcccaataatgaattgaaatatctgagtattgcagatgaagctctccgcgaaggccattggttcaccttttggaatcatggcgccctatatgccgacaaacctcctctttacctctggattgtcatgctaggtaagtggctactcggtacacattcgatgtttttcctgggattgttttccctgatcccggccttgtggatcctgttcatcatggataaatgggtaaacacagccttaccctccgacctcaggttaagcagccaattcatgcttctgacgagcggtttatttacaggctcggccattgtgctacgcatggatatgctgatgtctttatttatcattctaagcctgtatactttttaccgcatctataccggccgatgttctcctgctgacccgatcaaactaccgatttatatctttctggccatttttactaaaggtccggtaggtttgatcattcctctattgaccattccggcttttttattggtaaaaaaacaattcaaaaccatcggtaaatatttaggttggaaacaatggagcatattaatcgggctttgcagcttgtggtttattgctgtatatctcgaagggggaaaaacctatctgaacaacctgcttttccaccagaccatcaacagggccgtcgattccttccatcacaaagaacctttctggtattatctgaaaacgatctggtattcactcgctccctggaccctattttacgttgtcgttctcctcatcgggatacgcaaacacctttacaataacgatataaaacaattattcctgaccatccttcttaccggtttcgtggtacttactttttcaagtgccaaactggatatttatcttttacccctattcccctttatggcttatttggctttcctattactccccgaaatagcactccccaaaatctattttactatcgttctacctgcagccgtactcgtattcgtttttccggctttattcttcctcccagcctttctctccctgccttggttagaaagctcttatttctatttcgccgccttcctgctgtcttcgtcggctattctgtgcttatattatctttacaaaaatagattcactaatgcgacgaatagtctttctgtcggtttgctcttgtctattctcattggatcggtgaacatttccgaattaaataaatacatcggtttgaaaaatattactcaaaaagcgacaagaatagcccaagaagatggtataaaaaattactatttctacaaacttcgaagtggaaagaatttagattcttacctaaataaacaaattaatgaagtagatctacccactatagatagtctatcaggaaaacaaaattttattctattcgtaaatagaaacacactcaaaaaagaaagtaaattatataatttttcaaataataatgaatcatatacaattggagattacagtattataattttccaacaaaactaaaaattcaatgatatacgcactcggttttttagcacaaatttgcttctctgcccgcttacttattcagtggattatatctgaaaaagaaaagcaggtagtatcccctactctgttctggttattaagcttattaggttcatacttacttttcttttacggttggttgcgaaatgactttgccataattttaggacaacttatatcctactacatctacatttggaatttgaacatgaaaaacagctggcaaaagattccggtactcatccgctacattctcctcataaccccgatcgtagccatcggatatatgttagcagaggtaaaagggttcatcaatcaatttttctacaatgaaaacattcctttcggcctgcttctctgggggtctttagggcagattattttcactcttcgcttcgtctaccagtgggtttattcgcgtaggcaccatgactccattttaccgatgggattttggttgatcagtctcagcggatcgttgattatcgtatcctatgccttggtgaggcacgacccagttttaattttaggccagtcgacgggattagtcgtctattgcagggatatctggattctttataaaaataaaaaacaaaatcctgaccggatcgaagcttagagcaaatttcagttctgttttaaatagtattcgcaggataaacattttttagataatttcaactcatcggaaaaaatcagctttcctagccggttcttaccaactctattcttaaaaaatctttattaaagatgagtatctgctatttcataatttatatatcgttttttcatccaacgatacgcaaagcaatctttaaagggtgatatgaggcgattgtataaattgtatttcgatttttcagctattcgcgggtaatgacgcaccggtacttgtttcacttttccttgttgtagcaggatcagagccggtaaaaaacgatgcattccagtaaaaaaaggtattcgttgcgcatattcagtatgcaaaatttttaaggggcatccggtgtctttcaccccatcttttgtcatcagtcttcgaaacccattagctactttcgaggacatatttttcaccagactatccttccgtcccacccgaatccccatgaccagctcataatcatcggtatattccaacaaaagattgaaatcttcaggtgtagtttgtaaatcagcatctatatatccgaccaacctggagcaggtataatcgattcctgctttcatagctgcgctcaatccacagtttttagccaaaccgatataaaaaaaatctttattccgccggcaaatttctctgatcaaatcaccgctcccatcttgcgacccgtcgttcacaaacaaaatacaagatttcactttcgattttttcagaaaagccgacaaagcagtttcaagccgcaacatatttcccctttcattatataccggaacaatcacggtcaggtcataatcagaagttttattagtcatcatatttaaaaatataaagttgtattaattcatcctatattcaaactatagtaatattaaaaatgtatctttacgccgtattttaaaccctattttttctaaaatgcgaacattttctcaccccggttacaaacggttcttattgtctgtaggatgtttgttatccatacatttcaccgctttattctttctcacactattcagactcgtttttttcttcagcgccaattacgattttccggatcaggagcatgtcggttttatgtcgatatggcctgcctttatccggggagtctggttcgataatgtaatcgcttgttacatactcctcatccctttagtagctgtttccatttcggctttgttcaactactacggtaaaatactctggaatgttacatgtatttttttcagtttattctatggaatcgtattgctggttacggcagccaatattccctattttcaatatttctttaaaatcatcaattcgtcggtcttcaattggttcggctatatgaatacgacagccggcatggtattcggagaaacctcctactaccctcctttgatcggctttctattgactttagtgttatttatctggctcatgcgacgattgatccgtcattttcaacgtttactaaatacaaaaaatccgtctgtcttttggctcgaccgtatttatatcttcctgacagccggcatctgtatcggcctctgcctgttcggtatccggggacgtaccggatataatccgataaaagtcagtgcagcttattattgtaccgatccgtttttgaatcaattgggcatcagtccggtattcaatctgttaagcagtacgttagacgattcacggaaagaaaaccgataccttcatcttatgccggaaaacgaagcgttggaaaatacccgacactatttaaaccggccgggaatcgaagggatctctcccattgcacgccaaatcaacgcctccgacagtttaagacgtccgaatattgtgctgatttttatggaatcgatgtctgcccatctgatgaaacgttttggacagcagaaggagctgactccttttctggacagtttataccgacaatccttagcattctctaatttttattcctcaggaatccatacgaatcatggcatgtatgcgaccctttattcttttccttccatcttaaaacgaaacgcgatgaaaggttctgtcattcccacttattccggtcttccgactatattaaaagaacagggttaccgcaccatgttctttatgacccacgaatcccaatacgacaatatgaatgctttttttcgtaccaatggcttcgacgagatcttttctcaggaaaactacccgtccgaaaaagtagtcaatggtttcggcgtacaagatgattttctttacgactatgcactgaatcatttgaaaaaacagtccgctcagactagtccgttttttgctgtcttactttctatcagcaaccatcctccttacgtgattccgtcctatttccagcctaaaagtaaaaacatagaagaacaaatcgtagaatacgccgactggtcgattcgtcaattcatgcataaagcctcgcaacaaccttggttcgacaatacgatcttcgtcttattgggcgatcacggaaaattagtcggcaatccggatagtgaaatgcctcaatcgtacaatcacattcctttgatgttttatgctcccgcacttctcaccgcagaagaaaaagaaaatttcggaggacagatcgacgtagctcctactttattgggtatgttacgtatcaattatattcaaaacaatctgggaatagatttattaaaagaagaacgtccttgtatgttttttagcgcagacaatatgttaggagtcaaagacacaaaacatttctatatttacgatacggaaagtaaacaagagttcaattataatattcataacggaactctaagcccggcaacagcgaatacgacattcgactcactgaaaacctatgccttctccatgttgcaaacgacagaatatctgatccgtaaacaactgacaaccgacaaaccacattctaatccataataaaccatgaatacaacccaccttattatcgtagttccgtgttataatgaggaaagcgtacttccggaaactatccggcaattatccggcgtcctgaacagaatgctggaaaacggaaaaatctccattggaaaaatattatttgtcgacgacggcagtaaagacaaaacctgggaaatcattaccgaggcaggtaaaacaaacggactcgtcggtggtttaaaattggctcataattccggtcatcaatatgccttgttagcaggcctggaatgggccagtacacactgcgatgccgccatttcaatcgatgccgatttacaggacgatgtcgatgctatcgaagagatgaccgattgtttcctacagggagcggatattgtctatggagtaaggcgggaacggacgaccgatacctggtttaagaaaaatacagctttattattctatcagctaatccgtaaaatgggaagcgatgtcgtctataatcatgccgacttccgactgatgagtaaacgcgcattacaggcactcgtatcctatccggaacgcaatctatttcttcgtggaatagtccggctaatcggtttccccgaagcttacgtatattatgaccggaaaagccggtttgcaggagaatccaaatatccgttcaaaaagatgctttcttttgccctggacggtattacctctttttctgtaaaaccgcttcagctaatcctgacgggaggatttattttcggaataatcgtccccattatcatgattatttacgccttggtacaacatgctcatgcccataccataccgggttggacctccttactggtctctatctggtttatcggtggaatgattatgatggctatcggaataaccggaatatatatcggaaagatttacaaagaagtgaaacaacgtccccgttattttatcgaagaagatgtcaatctgaaataaataaccgggctatttgcagatggtcggatattttccgaccatctgcaaaacacggtttctgttaaaaacgttcttccgtttctgcatttcctatcgccttctctttggtaaaatgaagaatatggattatatctctgacatcacaactccggcgattcgaagtataaaccgtatctaaaacatattcctctccatatttctgacgaaattcttccaatagcccctgcttcactaaaacgtagccttcttcaggcaattctttttcaaaaagcgccatccggtcaccattgaaaaaattgacactatagaagaaataagtataagaataaatttttccttcgggcacccatttccgtgcttcctgcgccaaaccgctatccgatttggtattcaatacggcaggctgataaactccgtccaaaacgacaaatatcgtaaacaataatccgcacaaagcatacaatacctgagtattccagggtttacttttcaattttctaagcaaaacaacgacagcaacaatcggtaaaaagatcagaacaatattgaataaattcattggaatttcttccaacgcatgcaaaaaagcgatattctctacagcccttttacccgcaaaaatcgtgtcgggaacagctcctgctttcacgacaaaaaatacgacagtcagtaaaataataaggcaagagataacgatagcaaaaatctttatggcagttttccccatacgaaccaaccaaagaaaataaaccgccagaaaataaccgataaaagggtatatcggtaacagataaacacttctcttacttgcagggatacaataaaatacaaatatcagtgctatagtcaaaaaagaatacaagtgaaccggatcactggtccggactttctctaccgtttgttgccacttctctttccaggtcccggtccatttgcggtaacgcaaacagaaaagagagaagagcaacaacaaagtccaggggagatagccggccataagcatataaatattataataaaaaggattttcatgggaagcataagacatcttacctaaaaaccgcccgaaattttcttccatcatcaaatctaaaaattcctgctttccttcgttgtaagccaaaacataccaaatggcaggtaaaacacaagccaatagggctatcccgataaaacgcaaaaccaatttccagaaatgtccttttcttatccaaagaaatacgccggctaccaaacaaggtaaaataatccccaccggtcctttagtcaaggtagcacatcccataaacagaatagccagccaggggatccctctcaaatctttttcataccacgaataaaaacggataatagccaacacaataaaagcggtcaataccatatctacccggcaggtgaaaccggcacggtgtacctcgaaacaggtcaacatgacaaaggcggtcaataacccgacagttgcccctttacgtctggcataaaaccaataaatagcggcagccataatgatcagggccaaagcagacggaacccgggaggagtattcggacacttcaccgcacaaagtggaaacagcagccacactccaatgcaaaaaaggaggtttaaaagcaatctcaccatcataattccggggcaaaatccaattcccgtgttccaacatagaataagccacaatagcttcccgaggctcacctttcgtattataatccgttaaacctaaaagagggaaaatggttaatacacatattgataataatatcaacaaattacgattctgttcgttcatcttcatcaatgataaaaaattaacaataaaaactacgatctattttttatacaggctttgctctataatcggataaaaat

SEQ ID NO: 5878 - DNA, 941 bp, Unknown
  gut microbiota DNA sequence
aatgggcgcagaatggcgtttttttgatatcaaacgcattagtgtcccgttaaaatgggacgagttaaataattaatcaaatagccccggaatcaggggatcatttagatctttggcatcattgaaattagtcttgtcgaacaggtcacgcaagtgggttttgtcagtcaatgatatgctgagaatttgcaaaacttcataagttgagcgtttcaacttcatgtcatgttggacaatagccacaagacagtatgtgataatagccacactgatttgtatgcggacggcgttctctgttgtgccccagaatttctttatcttgaggtgctgcttgagccatttgaagaacagttcaatcaaccatcttttcgtgtaaagattggcaacatccagtgcagaaagttgtttcgcattcgtcagaaaagtgaactcacggtcatcttcttcatcgtaatatcggacgagtctgaatgactcaggatatttcttcccggagagataaccggtcagtttcacttccgcatcagtcattatattctttggcatccttcgtttccatttgactgtcttatactttaaattcgttttggctctgacaacaaagaaagagtctgtaagatgtatcctatagagctctttaaaagaatcataagccctgtcgaatatataataagcgttcggttcataatggattgaagacattgctgtagaatcatgctttgatgcagtggttacagtatagaaggcaggaacttgtgcttcaatgtcatataagacatgagccttcactcctcctttcttgcttcggaattttgcccaagggaatgttgcaaggcataacggaatcgttgttgaatcaaacgcatatttctttccggaaatgtcaaggatgttggtcgtccgcttctcgcaggcttctttcatcatatagaatgcaaatt

SEQ ID NO: 5879 - DNA, 5651 bp, Unknown
  gut microbiota DNA sequence
aaagatgcagaaacggacgagaataaattcttgaaatattattccctaaattctttccatttattaaaaacctacggaagtataggacggggacccaatgaatatctaacgccgagggtttaccggcattccccgaataaatttcttattattgaaaaactaagatatactttattttgtaccgatagcttattctccaatcctctatacaccccagagaaaatcaatgtcagagtgggattgacagctgcggattgtgtatatttaatcaacgattcgaccatttttgcaaattcaggtatgtccgattatcaattttccattgccaatatttccagtaatcgatatttattaaattacaagaattatccttccataataaaagaaaaaaagattaccgattttatagccaattcgaatatctatcatgcattttacatattgaaaccgaatacgatggattctgttgccattatttacaggcatttccccatcatcgatattatttcattaaataatttagaatcgacccgttaccaatttcccatcgataaatctgtaaataaagttaccgtcctggacaaattaaatgcccgggttgaagaggaagtcaactactataaaaactatttcagcacggacaactatatctatttattatactgcgattctaaaaataaagatttatcgatctccaataataattttgaaatacaccaattcgactggcagggccgttttttgaaaagatatcgtttgaaccgttatattttaagcttctgtgtcgatgaaaaatccaaccgaatatacgcaatcagtttccaaaacaataagaatttctctccggagatactctgttattcgttatcttcaacgaattaaggatatttgcgaaaacggggaaatctgtcatccgaatttaattacgtacctttcccaacaccaatacaggattatcatcatcggctattgcattataccaatcatggtaaggggaatttgctgattttatcctttcccgaaatttcattgcagaaaaagattgacaaagataatgctcagaaacttcgaacagataatcctccaattcaaagtcaaggtcgtcgaaataaatactctttactttgaataaaccatcgttcagtttatcgaatacataagtttcaggatcccggttttcgtcgtaagtaattatatttttaccaaatctggaatcagccatccggatgaataaacgatcgaataagatgaaccgagaagtttcaactatcatttcaatttcttctcctttttcatcaggcttgaattctttcaaataatatcctgcatgaaaataatattcgggttttcttgtatcggcagttatccgatacaaagtatccgttatccctgacatatagtgaacaaatcctcccgctatccccagataagaatgattcttctgacgctcctcccgacaagtctcttttttaatccctcccaggaattgtccggaagaagtaagggcataaatttcataggctgcatctttcaataacaaaggaatacaataaagaaccgaatcaccggccagtatcatcttcttcggaaatccgtaaattccgggcagggaattttcatattctccatttttcaaattaattacctggatactattttgccttccataatccgaaaaatacaatcgttcgcccggttcatctaccgtgagggctataatattctgatattcgcccggagcacgtccataagaagccaatttacggatataagtaccatcggcggcgaactgatacatttcttcgtttccgtaagtaataatatacttctctccggcccatacccgaaaataatcgtttaacaaagcctcttctttcgtctccaaacgcactaaccggctctcaccgaccaattgactccatttcaaaacagtgtccttttccacagctcttgtatccagtcgtttcaccccggagccgttaccacatcccactaccacccaaataatcatcgaaatcagaatatctttaagcataaatcgtgaacgctttatcctgtactgaaactaacacccaaattcacatccgaaaaaaataccatcctctgagagaagatggtatcttatttcagattttcaaaaatcaaattttatggattactaaaccggaacgaagtttcggttcgaaccaggtagttttcggcggcatgatattaccggtatcggcaatattcagcaactgttccatagaaaccggatacagagcgaaagccactttcatctccccgctgtctacgcgttttttcagttcacctaatccacgtatcccccccacgaaatcgattcgtttagaggtacgcaaatcctgaatatcgaggatatcggccaacacatgtttggaaagaatggtcacatccaatactccgatcggatcgttgtcatcatacgaacctgctttagcggtcagacgataccacttaccgcccagatacatactgaactcgtgcaattttgccggatgataaatctcggtacccatttcctttacttcgaaatgagcgttcaatttctcgagcaactgagcttcggtcagaccattcagatctttcactacccggttgtaatcgataatcttcagctgatggtcggggaaatgtacggccataaagaagttgtactcttctttaccggtatgattcggattctttgctgtatattcggcaccgatacgggcagctgcagctgtacggtggtgtccgtcggccacataggtgttcggcactttcgttgcgaacaactcttccaaccgtttattggtttccggacagttgatcgcccaaaaatggtgtccgaacccgtcttctgccacaaaatcgtagtctgctttctgattcttcacaatatcttcaacgatagcgtcaatttcaggcacggcacgataggcaaaaaataccggttccaggttagcattcacataacgggtcagcaccatccggtcctcttctttatcgggacgggtgagttcatgttttttaatcaccccgttcatataatcctcacaggcagcacaaccgacaataccgtattgggtacggccttccatggtctgagcataaatataaaatttcgcttccggatcctgtaccaaccatcccttgtcctgaaacattttgaaattttcgacactcttattgtaaacttcttccgagtggatatccgttccggcagggcaatcgatttcggcccgggtaacatgcagcaatgatttcggttttcctgcagccatctgtgcagcttcttccgaattcatcacgtcatacgggaggcaagccaattcctcgcatacttcctggttaggagtacgtaagcctttgaatggttttactatagccataaaaatattatttatttactttaaatttagcatctccatgttccaggaaagccacaatttgacgggcagcagccaagcctgcatttacattcgcttcttcagtctgagcacccattttcttcggagtaaagaaataacggccttcgaactgggcatattcagcggcattgtccggagcgatatcggaaatatatttgaaatcgggacgatcggccatcaatttcaccaattcttcttcattgatcacttccttacgggcagtgttgatcaatacagctcctttcggcatgcgattcaacaattcataattgatcgatttctttgtcttctcggtagccgggatatgcagagatacataatcacacatcgcatacatttcttcggcagaatgcaacggagtagcccccgcagccttgatttgttcatcggtcatgaacgggtcgaaagcatacacttccattccgaagcctttggcaatacgtcccacgttttgtcccacgtttccgtaagcatgtacaccgattttctttcctttcagttcatgcccggatttaccgttatagaaattacgagccagataaacagccataccgaataccaattcagccacagcattcgagttctgtcccggagtattcatagccactacgccatgatcggtacaagcctgcaggtcgatattatcataaccggctccggcacgtacaattactttcagttttttagcagcatcgatcacttcttttgtcgctttatccgaacggatgatcatagcatctacgtcggcaacagcagcgatcaattcttccggagaagtatatttttccaataaagccaattcataaccctgagcttccacgatttcgcggataccttttactgccaccggagcaaaaggtttatcggttgcaatcagaacctttgtcataactaccaaaatttacgattaagatttacaatttacgagaggcctcagcacggtcgtaaatcgtaaatctttcatctgaattaatattatttattttttatgtgctttttcaaattcctgcatggcagcaatcaaagcatttacatcttccatcgtacaagcattgtaggtagaagcacggaaaccacccaccaaacggtgacctttcacgcctacgatgtttttagatttacagaaatccaaaaattctttctccagttcttcatatccttcggctaacaagaacggaatattcatacgagaacgtgaaccttcttcaacaacagcacggaataccgtattgcggtcgaattcgctgtacaatgcattgcatctttcgatagcacgtctttccatagcttcaacaccgcccatttgtttgatccatttcagggtctgaccaacggcaaagatattgatacaaggaggggtattgaacatagatccgttatcgacatgagtctgatatttcagcatggtcgggatcttgcggtcagccactactttatccagatagtcgttacggataatcacgaaagtagcaccggcaggtcctaagttcttctggcatccgccatagatcatcatatatttttttacgtcgatcggacgactacaaatatcggacgacatatcggcaatcaagggcacagggctatccagatcttcgaaaatctcggtaccacggatcgtattattcgatgtaatatgcagataatcgacatcggcaggaatctggaatcctttcggataataagtaaaattccggtcctcagaagaagcgatcacttcaacttcaccccaaagtttagcctcagcgattgcttttttagaccaaacgccggtattcacataagccgcttttttacccaggaaattgtaaggaatcatgcagaactgcatactggcaccaccacccaagaaaataacagaataattatcggggatattcaacacttctttgaacagggcgacagtctcatcataaacagcctgaaaatcagctgaacggtgagatacttccagaatagactggccacaattccctaattccatcacagcttttgccgtattttccaatgtcatatccggcaacttacaaggacctgcgttaaaaatatgttttctcattttgtataataattaaaggttttaaattttaattcaatttttcttcaaacgttacaaatatgcaaaatatactgcgcaaaatatcattttataagagaaatattcggatttacttataatttaaaatcaccttaacaaatcggtgccgaatatacctcaaa

SEQ ID NO: 5880 - DNA, 17926 bp, Unknown
  gut microbiota DNA sequence
tcacttctgaaaaataattagaggtattcattttgcaatgataaactttttagaggaattttggtgcgatcgccctgattgtagactaaagtgtgtcaagtaaataaaataattaactttacagacacactttagtctacaatctcgtctgtaaccggccgatcgaagtattttcaatgccggtcaggaatatcattccgagctaaatcttttatctgcaccagggggagaaatccttccaatacgctaaacaggaagggcagatcggatcaggaccgaaaggacccggcctctttgagtatcaatatataagcgaaaaaacgccccgaagggcgttttcattatcctaagtatgttttcaacaatttacttcttgaagagtgtcttaaacgacgaatggccttctctttaatctgccgcaccctttcacgggtcagaccgaacttctcgccgatctcttccaaagtcatttcctgggtattgatcccgaagaataatttgataatatccctttccctttcggtcaaagtagacaaagctctttctacttcggtagaaagcgattcgttgatcaacgtacggtcagcgataggcgaatcgtcatttaccaatacatccagcaaactattatcttctccctcgacgaaaggagcatccactgaaatatgacgtccggatacccttaacgtatcggccactttttctgcgggcaaatccaatgaatcagccaattcttcaggcgaaggacgacgttcgttctcttgttcgaaacgcgaaaaagccttgttgattttattcaatgaaccaacctgattcaaaggcaaacgaacaatacgcgactgttctgccaaagcctgcaggatagactgacgaatccaccacactgcataagatataaacttaaacccacgggtttcgtcgaacttttctgcagctttgatcaaaccgaggttcccctcgtttatcaagtccggcaagctcaagccttgattctgatactgcttggccacagacactacaaaccgcagattcgccctcgtcaatttctccagtgctttctggtctcccttccggatccgctgagccagctcaacttcttcttcaacggttatcagatcctctttaccaatttcctgcaaatacttatccagagatgcactttccctgttggttattgattttgtgatttttagttgtctcatactatcttttatataccactgcaaacgtcctgcaaaggtatggttttttattcattaagcaatttgtaaaattgtccaatcttagtagattaacattttttaatccagcagcgaaaaagcgaaatattcaactcttcccctcggactcactgcagtaacgaaaactccctcatctccggctgctttcagagccctctccaaatcctcgctatcgtagatgaccatgtcgttaattttaacaataatataaccttcggtcaacccagctgattttaatttaccatttttcaaatcggtaatcttaacccctttattcagccgatagcgataacgttctgcctgcgtcaagggttgcacctcagctcccaaaattccggaaccggtcttcaggctgacatctccataactattttgcaaaacaacatctgcaaccttctcttttccatcccggctcaaagtcatctgaaccgtattcccgggggtatattgggccaactgttcctgcaactgtgcaaaagtcttcgcttcatagccattcaactgcaaaataacatccccgactttcactccggccttttcagcagctccacccggaatcacttccgccacataaatacccgattgctctttcaacttgtattctttcgctaaggccggagtcaattcctgcatcttgataccgatcattgcccgctgtaccttaccgtattctttcaggtcactgaccactttacgtgctacattcaccggcactgcaaacgaatatcccgaatagctcccggtaggtgactgaatagccgtattgataccgatcaactctcctttcgcattcaccaaggcaccaccgctatttccgggattcaccgcagcatccgtttgtaagaaagattccaggttcatttttccccccagctgacgagccttggcactgatgattcctgccgtaaccgtagaagtcagattgtaaggattaccgacagccagtacccattctcctaaaaccacatcatccgaattaccgtattcgataggctgtaaaccgttcgcatcgattttcaacagggctatatccgtatcgggatcggttccgattacctttgcttcgaattcacgcttatcgttcaaagtaaccatcaccttatcactccggtcgatcacgtgattattggtaatgatataaccatcttccgtaatgatcactcccgatccgattcccatattccggggcacttcacgcatctggggttgtactcctccaaaccaaaattccaaaggatttccataatactcctttctcatctgtacggtcatcacattgaccacagcaggtactgtctttttggcagccattcgcaggtctaccggcccagcactgtcattaagtacgtcattttcagatttatgaacgacaggacgcacagcgcccggacctacaatttggtgttgcagggtaggttgtatggttttcgaaccgaaattatcagctataaaataagcaatcaggccgcctgcaagccctaacaccaacggaataataaactttgttattttcatattctcttcctgattaaattgttacaatttccaattatctttgtcgtttacaatagtaacaatatctttgccaagtgtttattaataatttcttaattagcaaagcttaacatcacactatgattattaagtttcaaaaatttcaaggtgctggcaatgacttcattatcattgataatcgcaatcaggtatacgaatttacaagagaaattgttgagtatttctgtgatcgcaaattcggtatcggagccgatggcctgatgttattagaaacttgtccgggttacgatttcaagatgcggtatttcaactccgatggcagggaagccagtctgtgcggtaacggcagcagatgcatcgttgcctatgcccatcgcttgggcctgtttctgcaaaccacccgtttcctggcagcagacggtgaacatcagggcgaaattaccctccagggcgtacgggttaaaatgaacgatgtatcccgaattacggtgacccccgattatttcttcctggataccggctctccccattatgtaaaagtagtagccgatgcatttcagacggacgtcgtcacagcaggccgtatgatccgttatgccccttctttccaacccggaggcaccaacgtaaacttcattacccccactccggcatgtatccgaatcgctacctatgagcgaggagtcgaagacgaaacccttgcctgcgggaccggttgtgtagccgctgccctttccgcagccctgttaaatcacgaccactccgggacctatacgttacaaaccaaaggaggtatattgaaagtaagtttcaaacaactggcagacaaccatttcacagacatttggctggaaggtcctgccgaattcgtttttgccggcgaaatcgaaacaccccaaaaccgagacaagaaagcaatgtaagcggagtgccggtcagcctcccacctttaggccttcctgattggcgcaatcttcgattccgggaaaaatttcatcaggaaggctatttcgcttatcagccacagaaatgtcaagccacgaaacatcaatcagagacaggagttcgccgatcgtttttccggccagccggaaaacctttacttagcttcttcggcctttttaaatacagcgactaccttatttttagacaggaaagaaagtttgttgtctttgatcgaataaccgtctacaccatccagcatttggaaaaattccgtttcggtctgtaggtcgggacaagccatccgcgtcgctcccatcggagaaaatttcaaacggctcgactccatttcataattaccgaaaaaacggttacagcccccccttccgttcacccggtgttcggcttcattaaactgaataaaaatctcgctattgggatcggtcaagctcaattctttatcgttaagcgtttgcaatacccatttcactccactcaacttcgccatatttttcgaagagttacatccgacaacagataacgcaacacataacacgagtaaaaaacttttcatgactttttccttttcaatttaaactattaaacttaaaataccatagcaaacgatacaatggtatcccttaatatatcatttctttttcagcaaatatcatgccaacataatccgttatgttcttctccctctttagcttcccattggttttgcgcctacggtctgataccctaacaatctaaaacacataacattataatcatacatatagaagcggatattatattcgtccggcgtctgataaaaattattttgcatagtcaccaaatcaggttttttctccttcgaagggactacagcgaacatataatcataatatccctgtttcagctcggcctgcccgacatacgctttattcttcgcatcatagtccatttttaattcaggcagcaactgccagtctgcaaatttcccatagatataaacttccgctccgggaataggttccggataaagaatagcaaaatgggcgacgatataatcggcttccagatcagaattttgtacattctctgcctcgatgtaaaaattcccccccccgatcaggggtcggaatataacgctgaggaacggtaccaggtaccaggatgaaattatatctcccttccggtcccttcaatacatctttcacataacgggtataataaaccaaactggaacattggaaattacgaaaaggagacaaaccgttgaaaatattatcgctcccgttgccatataccaattggttttgccggacaaaagtgggagtaaaatttctgcgggaattcggatcctggttttgagtcacatacacccgggtatcccgcaccggattatagatctgcaaaccggtatagttcactgtaaaattcagttgccgggaagtgtacaaaaaagtaggattcgtgctattcaccacagatgcagcgataccgaccttattttccacgacagcaaaacgttgtgaaacaaccgcactatccggattctgatcgttgtatacctgtaataaatagttcccggacaatttgatacccacttcttcattcggcaaattcaaggtaaaccgggtgtaaggcacaaccgtattgaaagagtattcgtaattatccagcggattactgaaaaatccggtcaaataagtaaaactgctcaaattggaattattccaatcaggatcgcaatgaacaattttataggtatatgagttcgtctcgctactcagatcgtcgaaactaaaaaaaagctgctgtccactccccaactcgataaccggttcggcaaaaggactgccgacagggtaacactgaacggttctgatctggctttgcgccggtatcatattccctatccccaggataaaaaccgatagattcaaaaaaaacttcatccccaataaattaaaatctaattaacgacaaaattacgtaattggtttgtatatttgtgtcttaattttaggaaaactataacacttcatatttttgcaagccccttatcggggcgaggtaaaaagttatgtggtcagtaattgtaaatacttaattattaataattaaaacacatgtccaaggtaatcaaattaaaaaaaggccttgatatcaagttaaacggagaagcggaaaaagtggtgcaacctgctggtaaaataaccagttgtgcgttaaaaccgacggatttccgggctatgactccgaaactagcagtcaaggtcggcgatgaagtgaaagcgggagatgtcttatttatcgacaaaacacatcccgaaattaaattcacaacaccggtaagtggtaccattgaagccatcaaccgaggcgaaagacgtaaattactggaagtcgtagtcaaggcagatgccgagacccggtaccgggatttcggaaaaacagaagtcagcaaactgaatcgggatgaaatcatcgacaggctgttggaaagcggcgtttggcctctgatcaaacaacgtccttacgacatcattgcagacccgatgagtacaccgaaagccgttttcgtgtcggccttcgattctgctcctctggctccggattacgacctgatcctgaacaatcagagcaaagatcttcaaaccggtatcgattgcctttgcaaactctgcaataaaaatgtaaatctgggcttgcaggaaaatactccctccgcttctgtatttaccaaactacagcatgtagatatcaattattttgccggtccgcatccggctggcaacgtaggtgttcagattcatcacctgaatccgatcaacaaaggagaacaagtatgggtggtcaacattcaggatgtcgctatcatcggccgcctgttcaatgaaggccggttcgatgcacgtaaaattatcgccctggccggttctgaagtgacaaaaccccagtattatcacagtattttgggtgcttctattcaggatctcaccgcaggaaaattaaaaaatgcagtagaacaacggatcatttccggcaacgtactcaccggaacccgagtcgttccggaaggtcatctgggctattacgacaatcaaatcaccgtcatcccggaaggcaataactacgaatttttaggctgggcggccccgggtttcaataaattctcggcttccagattattcccgtcctttttatgtccgaagaaacattacaccctggacaccaattaccacggtgaacgccgggccttcgtcgttaccggacaatatgaaaaagtatttccgatggacatctatccggtatatttgctgaaagctgtccttgcccaggatatcgaccgcatggaacaactcggtatctacgaagttgtgcccgaagacatggctttatgtgaatttgtctgtacctcgaagacgcctgttcagaaaatcctgagcgacggaatcgaactgatgatgaaagaaacgaattaatttacgatggaagatttccgatcatcacccaatagggaggtatcggagctaacatctaaaatttaaaatctaaaattaataaaatgaactttttacgaaattatttggataagcagaaacccaaatttgaaaaaggaggtaagctggaaaaattccactccgttttcaccggtttcgagtcttttcttttcgtgccgaatacgaccacttccagcggagctcatatccgggatgccgtcgatctgaagagaaccatgatcatcgtggtacttgctttgattccggcacttcttttcgggatatacaacgtaggttatcagcatttcaatgctgtcggcggcctggcagacaccactttcttccaactgttcttctacggtttgtggaaagtgctccccatgatcatcgtatcttatgtcgttggattgggcatcgaatttgcagtcgcccaaatgaagggacatgaaatcaatgaaggttttctggtttccggtttactgatccccatgattatgcctgtcgaagctccgttatggatggtggctttatcgacagccttcgcagtaatcatcggtaaagaaattttcggaggtacaggtatgaacatctggaatccagccctgttggcccgtgctttctttttcttctcctatccttctatgatttcaggagataaagtatggattgccggagacacagccgatgccatctcacaagccactccactggcacaaatggctctgggccaacccctgacttacagtacggcagacatgttctggggatttattcccggttcggtcggtgaaacctcggccttctgtattctgatcggagctgtgattctgttattgaccaacgtcgccagttggcgcaccatgatttcggtttttgtcggaggttatctcatggcgctcatattccagccgatttccggtgtcgaagcctatcagcaactgttaatgggcggttttgctttcggagcggtatttatggctaccgacccggtaacttccgctcaaaccaatacaggtaaatatgtttacggtctgttgatcggagcgatggctgtgatcatccgttgcatcaacccgggttatcccgaaggcatgatgctggcaatcctgctgatgaacacgttcgctcccctgatcgactggttcgttgtacaggctaacatcaaacgcagactgaaaagagcgaaagccgttgctaattgacgatttaagatttaagcaatcatagatttaaaagatatgaataaacaaggaaatacctatacattcctctattcagttgttctggtagtcgttgttgcagcgctactatccatcgtatctctttccctgcaaccccggcagaatgaaaaccgccaaaacgaaaagagacagaacatactgagtgcgatacacatttcctccactgctgccaattctgcagaactcttcgacaaatatatcaaggagcagtttattataaacagcaaaggagatagaatcgaaggcaaggcctttgacgtaaacatcgaaaaacaatacaacctaccggttgaaaaacgggaacttcccgtatttgtcgccaatgtcgacggagccaccaaatacatcctaccgatttacggagccggtttatggggccctatctggggatatatctccctggacgacaacaaagataccgtttacggtactttcttcgaccaccagggagaaactccggggttgggagctgaaattaccacgcctgaattcaataaagaattccggaacaaacagattttctccgggaatcagttggttggaattctggtcgtaaaaggcgggaatgcttccggggcgaatgaagtcgatgccatatccggaggtacgatcacttccaaaggagtagagaccatgatcaagaattacttaacctattacgaaccgtttttaaaacaaaaataaaatgagcgcattattttcagctaagaaccgggaattcctgctcggtcctctgagtaagaacaacccggttatcgtacaggtcctgggtatttgttctgcccttgctgttactgccaagctggagcctgccatcgtaatggggctttcggtaacagccgtaaccgctttctcgaatgtgatcctttcgctgatgcgaaataccattccgacccgtatccgtatcatcgtacaattggtcgttgtggccgctcttgtaatcatcgtcgatcagctgttgaaagctttcgcttacgatgtcagcaaacagctgtccgtatatgtcggattgatcatcaccaactgtatcatcatggggcgtatcgaagctttcgccctcgccaataaaccctggccttctttgttggacggtatcggtaacggtttggggtacggcctgatcctggtgatcgtagctttcttccgtgaactgctcggttcgggtacactttacggtttccgtattattccggaatcgtggtatgtacagaacggcggttgttatctcaataacggtttgatgattatgccggccatggctttgattcttgtcggactgattatctgggtacaccgttccagaaataaagatttaatagaaaaataattaaagtaaaaataagatatggaaaatctattaaatatattcgtccgttccatcttcatcgacaatatgatctttgcctatttcttaggcatgtgttcctatctggccgtatcgaagactgtgaagacctctttcggtctgggaatcgctgttattttcgtattgttcatcaccgttccggtcaattatctgttagacaactatgtgttgaaacccggtgctttacaatggttgctcggggatgaagctgccggaatcgatctgagcttcctgagttttatcatgttcatcgccatcatcgccgctatggtacaattggtggaaatgatcgtcgagaaattcgctcccgctttgtacaaccaattgggtatcttcctgcccctgatcgctgtaaactgtgctatcatgggagcttccctgtttatgcaacagcggaactacggcagtgtactcgaagcgacgacattcggtttgggctcaggtatcggctggatgctggctatcgtatgtattgccgctatccgggagaaactgaaatattccgacattccggctccattacggggaatcggtatcacgtttatcgtgaccggactgatggctatctctttcatgagtttcctgggtatcgacctgaataaactgaaagctcagccggcacaaaccgaaacgacggcacaggtatcctcttatggtgaagaagagaccgtcaccggttacctgactgaaaaagatcagatggcttcagcacaaaatgaaggcaatgccgatgcagaataatttaaaatttaaaatctaaaatttaaaattaaatggtactattagcaataaatacaacaatcgtcactaccggcattgtggtattcctgattgtcatcctgattctggtgggtatccttttgtttgccaaagccaaactgaccgccaaaggggatgtgaaaatcagcattaacaatggcgaccgggtcattacaaccgaaccgggcagttcactgttgtccaccctggcaggccagaaaatattcctgccctcggcctgtggtggtaaaggttcctgtggtatgtgtaaatgccaggtagattcgggtgcaggttctatcctcccgaccgaaacaggtttcttctcctacaaacaacagcacgaaaactggcgtctggcttgtcaggtgaaagtgaaagaaaatatcgaaatgcgtattccggaatccgtgatgggaatcaaaaaatgggaatgtaccgtagtttccaaccggaatatttctactttcctgaaagaattcgttgtaaaattgccggaaggtgaaaatctgaaattcaaatccggaggttatattcaaatcgatgtgcctgctctggatgtcgacttcaaggatatgatcatcgatgaaaaatacaaaggcgattgggaaaagatgaaaatgttcgatctgaaaatgcacaatcccgaaccgacttaccgggcctactctatggccaattctccggcagaaggcaatatcatcatgttgaacatccgtatcgccactccgccgttcgaccgtgcggcaggcgcttttgctccggtaaatccgggtatctgttcttctttcatcttctcgcgcaaaccgggagacaaagtaacgatttccggtccttacggtgaattcttcctgcgtgaaaccaacaacgagatgatgttcatcggtggtggtgccggtatggctccgatgcgttcacacatcttcaacctgttccatacgatgcacaccgaccgcaaagtgaccttctggtacggagcacgtgccctgcaggaagctccctacgtggatgaattcaataagatccaggaagaaaatccgaatttccactggacactggcactcgaccgtccggatcccgttgcagatgctgccggtgtggcctacaaaccgggcttcgtacaccaggtgatcttcgagaactatctgaagaaccacgagaaccccgaagatatcgaatactatttgtgcggacctccaatgatgatccaggcagtcaccaaaatgctgtacgatctgggagttcccgacgaaaatgtcatgtacgacaacttcggtggataatcccaataaaaagggactgtctaacaatgaaatgcccccaaaaagttttatgtccaactttttgggggcacttcacttcaagagtccggcagcctgctaatagaggatagctctactttccgaaaattgctttcagttttatatccaattgctttccgcgaataccgttggcgacaatgacattgttttcgtcaagtacaatcacatggggaataccgcaaagcagtttatacatgcctcgagagacatcttgagtatccatcacatggttccaagaaaggtggtcatccgcaatggctttcacccaaggagcctgctggtggtccaatgaaacactcaagatttccaatccatgccggtggtattttttataaagttccaccatgtagggattttccgcccgacaaggagcacaccacgacgcccaaaaatcgaggattttcactttcccttggatggaatacatggacaaagaatccccttcgggtgttggaagcgtaaaatccggagcctttttgccgggggcaaatgcagccatttcgtccaaacgctctaccacttgccgcgtcagtttcatcgctttggcagaagcacccaattgatcgtattcccgctgtaaatcttctatgttctgatattggtacatccgtttgttcaacagataggcagctaaaaaaccatccttatgcgcctcccggaattgttcctgttcacgaccggtctgctcccccaatttccccatggttctcataacctcattcatggtagccgtatcgtttttctgacgggcagagtagtaacggttgcgcaattcattcgtttgtccggccgtcttgttaccgatggcctgataggcagcaaatagcaattgcagctccggaccttccactcggttggcctcaggatttttcaagtgaagatgcgcccggtaatcggcattttcaagcaaaagtatcgcataggttttctctccggtgatataaagtcccgcttccatggtatcgggtagtgaaccggtcaacgtaaatttcccgtcccggatttcagcccgcgccaaggtatccggttttttattccagccaggatagccgacgatgtaagcttcaccgtccactttctcgtccaacgagccttctatggtaaaatgcggtttcgatgtgcaagcggacaatccaccgaaaaaccaaatgcctaaaattgtttttcttatgattcctttcattagttatgacactttatttcaacattactttcaattccttttcaatcggtggaaaacagatgtgtgcgtcacagcattgatagctgacggtacactttgcttccccttgtccactaccggagatttcgtaccggaaaatggcttcatcttcataaacggtggtaccttgtttattatacgacttggcggaagggagtttcggtttaccgacaatcgtccacccctccggcaattggagctctacctgcgtggtaacaaagggatcgctctcagcaacataagcataaatgtgatagcccggatggattttcaggcggaccacaatctcccggttgccgttcgctgccttttcaagccctgcaaccatctgcacaggattccggtcatccgtggcggccggtcgggacgatgtttcctgtaccggttgtgcataacgtgcgctgtaatcgttggcaggatcaggttcgcgagtattcaccataaaaagccagcccccggattccgtaaaaaaaagacgctctttgttcttctcataccaagtccgccactcctgcggagcttcaaagcggcaaagggtatagcgatgcaggatgcggttggccttttcggtctctttccctttttccagcaaccggatggcagtatcaagcaagcgtttgtcgttatagggaatgccaaggctcttcacatcttcgtcaatactcagcacatacatgccttcacctccataaaaataatctatgttctcacggtaataacgggcataggccgcttcgtcctcgccaaacaaatcgaacagctctccctggtaacgtttcaacatatcggcataactcatcggcggttgcggttcatagtttaggaacatctcttccctgcggttcaatttctcaccacgcctctgtttttcctgaaccacttttttcagttttaaaccctctgcagcaaactcttcatcgcttttcaccctctcttgccaagcttcccgggttgacaagtaaagctgctctttcacatattcgcgggtagcaatgcgatcgttgtatttccggacgaagggtttctgtccggcaaaacgggaaatgtagacaatcgcgttggcaaataccgtctttgcctcttccgtcatatctgccggcgaagcggcaaatccccaatgcaggaagttcccgtgacggccaatagccactgcatccaatgttttggcgcaaacgccactggaaatatattccgcgtccggagaatcttcaaagccccaaggacgagccaccatccctacccgaaaaccttcgtgcgtctgataacctttgttctgcactttccacatcagaaccgaatccggtacaggctcatccataaaataggcataatgaaaagcatccgaaggtgtcggacacatgcgtaccgtcatctttaccggaaaaggtcccttgaaaatcgggtgttctgcccgccaatggtgggcatcggcatccaagcacaaacaataccaatcgcttttcaagccgatgccgcgcccgacggtattccccacctcggcaatcgtgaccatcggacggtcaaaactttccggcaaatagaccgcactgtggtaagcgattactttaccggaagcgtccttttcctgccaagcgggtttgatggcttttggccggccatccatcacggtcacatcgtatgcccgggacatttccggcgtccaatcctccgccgcaacgactttcacagtctggaaatactgtcggagcatctccccgaatgccgctgtccgatcggcaatgcttttgcgcaaagccgtactgtcgctaattgtttcgttcaaaacctgtatatccgccgaaccgccgacatacaggactttcaacggttgtttttctattttatccgatgcacgactcatctgcatactgcctatcaacagcaatatgcacaaacaaaataggtttttcataatttcaaagttaaaagccatgccggcataggaaactcctgccgacatagcatctgttgttaaaatggattctgcacaatggcaccttgcgaattttggatatcctgctgcggaataggaatggccaaacgacggtcgtctcctttcacgttaatctgtaccttttgggaggggtctaccccactctgggtaaccttgtaaaattcccgtcggatggttacgtcatcatcgggtgtcacactggcagcaaaacgcttgatatccatcaaacgaagtgtaaaaggcatttcacggcgacgttcaagcaacacctgttttaaagcttcgctctgcgaagcggcggtcaataccgtagccgttccgggaagaaagcgggcttcacgcaacggtgccagtgtaaccaaggcgtcctgccaattggcactacgtgcctgcaattctgccttcatcagtaccaactcagcggcagtcaaaccggaaatggcatagctgtcatcataaagttggttgtagcgataccagtcataagctactgaaaaacggcgattaccatgttccacatagaaaaggtcgaaacggcggtcgttcttcccgtcaacatagcaatccaacaattcctgtgacggggaatgccattgcgtcgccagatattgcagacggatataaatccattctgaccatttatagattttttgcagattccagttgtgggtttcacaatagtgcagtgtatcctccgccatcgtgccagtggcaggataaggcaccggtgttgcccaatccagattgttatagtcatacagtcccggagctaatgccaacgccttgtccacgtaggtagtcgcattgtcatagtcgttcatgtaaagatacacgcgggcaaaagctccgtaaatggcacatttggacgccctccaggcaaagccttcctgtacccggtccaccacacagtatttttccgcctcgcggaagtcatcaagaatccggtcaaaggtcttccccagcgtagcacgcgagatatcctctgtgaaaagcgtacccaaacgcaacggcagccccatctcgctgcggttggcctcactgtatggcagacagtggacggtagccaagcggaaaaacgaccagcctcgcatcaaataggcattgcacaacgcctcgtctttttcttcctgcgaaccgtttacagaaccaacagaggcaatgatcgtattggcattgaatatcttggcgtattcgtattcccaaacgttattgcctgtcgttgtttccataacttcgctgctcaaggcatacaaactcatctgatcagccccaaaagtaatgggactagcatcgtacagtgccaagggcacaccgtaatcatcggtggcatacactccgggataatcgtattcatacgtgtttgtcacataatcataaagggaaagcaattgcgatacctcggtaataggggcgtcgctcgttgccgacggctgcttgtccaaaaacgaatcgcacgcacagaacatactcgccgtgactatcaggaacgataatttcaataaatgctttttcatatctttttcctcctaattattaaaagttaaagctggctccaaaagtaaagctggtgctgggtttgttggtgccaggcaaccattcggggtcgtagttgtttttgttggccgtccataccattcccaagtcacgggcctgtacgaatactttggccttctgcaaacggatagagcgcaaccactgctccgggaggtagtagctcaacgtgacttcttttaaacggatgaacgaagcatcctccacattgccgcgcaagtaaggcaaatagcggccccaacgataacacatgtaatcgcccggtgccggtaaagtagggaaagtggtcccatcgctttccatcaaccgggtaataaacttggagatcgtgtttttcgaattggccaatggaaccgattcggctgtcggcgcccggaacttaccgccgaaattaccggtcatataaacgtaaaggttcaaccctttccaactgaacgagttcgcccatccgaatgaagcgggagcaatggtagtccccccgtaatacatcttatccaatcccaaggttcggttatgcagcgtcaaatcgttgaacgtccattcattcccgtccatagttttcacgtgcggcactccatcgcgcactccggcataatcatagctgtaaacagcacccaccggtttgccctcgatgaaataaccgtttgaaggatcagaagcataagccaattgatggcaataaagcgacgggtagaacagtttctgtactttatttttgttataggcaaacgtcacagtcgacgaaatattcaaaccaatcgaacgaacctgtccctgaccggtcagttccagttctacaccccggttcagaatttcggcattgttgaacctttgttctttgcttccatatacggaaggaacagtcaccgttccgatgatgtatttccccagtcggttgtaatattccaccttaccggaaagtgcatttttaaagaaagagaaatccaccccgacattagtcgtataggtctcttcccaacgcaataagggattaccgtaactggtcacacgagatacgttagttcccgtcgtcacgttggcactggtagaaatcaacgtctggggggaggtgctcttttctgcattaccgttgataccgtaagtcaagcgcagggtcaggcgatccacccaggaagaagcggcctccagaaacgattcattggacatgttccatttgagcccggccgaccacatgggcgaccaccggagggacttgtcatcggttacataattggaaccgtccgcccggatactaaacgatgccccgtatctgccgtcgaacatataagccgcattggcaaaataagagaaatagcggt

SEQ ID NO: 5881 - DNA, 22828 bp, Unknown
  gut microbiota DNA sequence
ccttttcagaaaaatcatatatatcattccatgtattcataccctttttattatacaaacacatgaaatcaaaaaacgggtaacagaaaataactaatatttaaaaaaatctgaaaagaaagagtacaacaaaatcccccataccattcccatgcgttcacggagataggcataagcccgctttttctgcattttcactgtattttcggaaacttccaatagctgtgcgatctcccggactttcaagccctcgaggcttaaattcataacttgtctctgttgatcggacaattcggaaaggaccgaacggaattttgcgatcacactttcttcaatggccaaatcgatagccatttcttcggtataggaaatctcggaagtataatttcccaatagccgacgggcattgtcccgatcacgaatcatattcaaagccctgttgtatactgctttgtaaagccagccagccaaagatttgacattcggaaattgcaaggaagaatcccataacccgatcatacactcctgaacaatatcctccactccgacattttcatgggtcagcttggccacataagtacacaatgccggataaaactcctcgtacaattgctgccaggcagtttctctttttttattcaggtctattataaatcgttcattatcacgcatacttctcctccgattgtgtgacaaatataaagaaaaaaataaaaaacaactctcctctaaactaaaatcagtccagcccccattacttagtgacaatagtaataatggataaaaaggatgctcaccgacgagaacgtagaaaaggaaaatgaaacattacccccgtccctttgtttcgttttttttatctcaggcgcctgagcgaaaagaatgcaaataacagagaagcaggaaactcttttctaagaattttgagtcccaacgaaatatgagtcttgacagtattcacggaaactcccagtatttcagcaatttctttatattttttacattcgataaaacacagccgcatcacttctccacaacgatccgggagctgattgatccggttcataatttgccggatcaattcttcatgttcggaataatcggtctcggcatagagcagatttttatacgattcattctcttcgtgccgggcccttactttcaaatgatccaggtagttcagtgaacggttgcgggtaagactcaaatagtaaggcaacatcggttgagtaaaatctatttttctacgttgcgcccatgttgtcagaaaaacatcatgtacaatatctttggcaatatccgcatccttcacaaagctcatcgcatgaaaacacaatggcttgaagaatcgcttaaacgaatcttcaaactgtagcttaaactcacattcacttacatatcctaacatattatctttgccggaatattgatttacgtgcaaatataatttttttaaggatattaacaaagtatttattctagaaggttccccgatataaaaaatcacagaatcgtatcctttagccacgacacattttcccatcacattccggtggacggtcacctccttgctcatcagatccacaatcgcaaaagaatataccaggcaatctactctttcagttgtttttcttccatattgatccaattggaagggtagatcgaagtatatataattcgcccgattctttttgcggattttcacaaaaagaataacggacagatgataatggacaaatacaggaaaagcctaaaaatgggtgaagaaaaattgaaaaaaattagtattacaaaaaattattaaataacaatctaagtacaaagttcccatataccatccactatttcagcatataactgccattatttataatcgctttatttttactttgaatccaaagatgtatattatcttgtctttgaaatttataaaactttttactacgctgaatttttccggaatatccataaatatatccaataagtcattcgaatacggagaagtccaatcatctattctgcctagagatcatttttccagacagaatagataactgaaaaaaggttattcctgaatccggattccatccagacagaaataggccggagtccgcatacggccggtacctgcttctatatcggtagattcgagatcgaaaactattttatcgacaacacccaaagcagacaaatctacgggataccaatcgttaaccaccctgctccaatccggattttcaggatcacctttacgtgtacacaaataaaagtttaccgttccggttggtgtgttatctttaaatcctttgataatcaatttaaaataatccttgtcctcatcgaccaatttctttactcctccggggacattggaataccatactccttttttgtcggcactcccggggatattcggattggctacgggagcttccggcgtaccgtattgatccccatacaccattgccagataggcataagtagtgttagctaccagtatatgctctacaaccgcaggtttttccaaggtaaaataagcatcgtcgttttttacacaagcgacggcataaacttcattggcattcggatagcgggtatatacactatagatattggaatccaaagcttcctgagtggccgtccaggtaaaagaacggttgttacggttcgaataggcaaaaccgctatacgtgccatccgaattcttgacggtattaaatttcaccccatttgtatgagcagctttcgaagtaaaaccgctctccggaatccgatgcgtaaaacgccccagttccaattcattcatcgtcacatcattcgggatactcaccaaaacatctttatcgtcggaacaggcgatcaaacctgcccacatcatgattatagctaaaaattttctcatcattttaaattttaacatagaaataactcaacttttatttccctaatcccgggttctgatccgccaatttgttcttcaaccgttcgtcttcaggaatcggccagcaatatttatctgccgaaaaatcaacatcttgtttcaacgtataaatccagggtttattctgagccggactggcatcggtatcattgataaaacgtaaagatgcaaagtattcgctcccgttttcaaggaattgttccacacagatctcccggaaaatcgtccgtaacaattcttttttagaagaagccgacaaagcaggcaataccggattggttcgcttggaacgcatttcattcagcggagccaaagcatcggcaacggaataatcgtccagccgggctttcaattcggcttccatcagatagagttcggcataacggaaataataagccgtataaggagcatcgggagtatcgttccgtcctccatgatacagtttctttaatgcccaaacattttttgtatcccaggtttccggagcccgaaccgagtccataaccaccgtatagcggggatcttccttgatccaaccgtcgaagatatcgtaataggtattgttatatcctatagcataagaataggtaaactcactccaggcacaattggtaatatcccccatataacgggtccacaatacttccccggattcccaacctttctcgtacatttcagccagatcggcttccattttccagctacccggagcatctttcttcacagtaagcaccaaatccagcgcatctttcaagtcctgtacatcaccgcgcatcactccccggttcaataacaacttcgctttcaatacctgtgccaattgtttcgataaatagcggggagtagtaaaatcgggtaaatacttcaaccccggttccaaatcttcaaaaattttctgataagattctccgacagtgattcggggaacctgcaaattactcagattggacatctgatcgcggtataaaataccataagcacagtcgtcggcttcccaccagtgtccgaacatccagaataaattagcataagcccaggcccgcatacatctggcctcggcgatcaaagcctcttttgtttcgggcgaaggatataactttacatccagattagtcaaagcgataactgcagcattcgctgaatttaccaacccataccaagattgccaaatcgccccgaaatcattgctgccttctttataggtcatattgtaattcggattattataattccatactccagcctgcgaagcccaccttccagccagttctccaccgaaattagacgatttcgcaataacagaatacataccgttgataatattcttcgctccgttataatccgtcactgcgttctccaaagtcaaattatatttcggactctgatccagaaaatcatcgcaagaagcaaatattccggccaaaagtaatagtagatatatagaacaagttctcatattcagcttattttaatgttaatttgattccaaaattataggtacgggcagaaggataggtactatagtcgattcccatgttataaaaagcactataagtagtactaaaattcccctgtgggtccatacccggatatttcgtccaggtaaacaggtttgtggcctggaaagtgaattccactgcattcaaaatactatttttatagaggtgtttcggtaaacgataagataaattcaatgcggtcatccgcagataggaagcatcgtgaatatatcggtcggtaataatactgttactcccccaaccataatacatcgcccgtggataagatgcatttaccccgggattcaccgtccaggaatccaatatccggttagaagtattatatacattcatatctcctgaactatttttttcttcgtcccaaaaacgatcccctccgacagaataagaaaatacagcattcaacatcaatcctttccaatacaacgtactaccgaatcctccgaagaaatccggattagcatttccgatcacggtacgatccccgtctgccgtgatttgtccgtccccatccagatccataatatacacatctccctgacgttcataattataatcgtcccgataatatttcagggttccggttttcggatcgatggtcttcaaaccgaccagttcttcattagtcataaataaacgaccggcatctttatagccgtagaatctcccggtttcacctccttcttctattttaaaataatcataagctccgccaccgaaataaccgtctgaactgtttaacttttccagggttgtccgattacgggcaatgttaaaatcgacattccaggtcaggtctttttgtacatttttgataatatctacccggacatcgaactcgattccccggtttttcaatgaaccgatattttgataaacactagagaaagaagaggaagtcggtacaggatcgctatacaataagttatctacttttttctgataatatcccaaagtaccccgtatccggtcgtcccagaaaccataatccaaaccgacttctttctgtatctgttcttcccattgcagaatatcatttcctaaagaagagggtacgatgccggcagcaccgttataggttgccgatcccattaatgtccgccaatcataggctcccagattctgtgatccggtttttccgacagatccccgtaatttcagataagaaacgatattggaataatctttcataaaattttcttcggtaatgatccaggcaaccgcaccggaagggaaatatccccaacgtttatccgggccgaactgagaagaaccgtctgcccggaaattcagggtcagtagatagcgattgttgaatttatattccaaacgcgataagaaagaagccaaagtattagaactgtaactactggaaatactattctttttagcagcactgtttaaattagtcaaaacctggtcatcggggaaaccgctaccggaagctcccaacccatctgattcatacttctcgatagaaaagccggccaaacccaccaaactatgcttttccaggtattcacataactcaaagtattgtctcacatgtaagtatagctttcatttttactgacactggccgagctttccgcttcgtcataccaggcaatggaataagtgctgtatttattcacattatattgagccgtagcggaagtacggaaagtcaatcctttgacgatatcccattccagtcccagcgtacccgaaaaattccgtcctttcgcttcatccgtatccatcagtgacaacaatggatttttcacataataggaaatctcgtttatcgtcccatcctccttgtatgccggtacgtccggacgcatatcgagaatttcaccgatcatattgtctttatcgttggcggtacgagccgtcgccctcaaatccagcttaaaccggacaatgtcacgaacggcagcatcaaaattaaaacttcctcccaacattttggaattacctcctttgacaatacctttctgatctttgtaatagatagaagcactataggaagattctttggaacctccgcgtattccgatactgtaatcctgagtagcggcattccgggtcatcaaatcccaccaatcggtatccccgtttccatatgcatccttcagataaaaatcatcagtcaacgtattcaaatcgaactggctgttattgatatgggaattaaaataagcttcgtccacatattttttggtgaaatagtccagtgaacctcttgtaaacaaactcatcgcacaagcagctttcgacacccggatatactcatctgcggtcaatacccgaaaatcattggcattcatcgtctgtattccataacgggcagaaaactccaattggggtttcatgccggcttttccccgcttggtggtcaccagtacaacaccgttggcagcccgcgaaccataaatagccgtagcagaagcatctttcaagatatcgacactttctacatcggtcaaattcaaattatacaacgtattggatacatctccggaagtgctggcattatactcgggaaccccgtctatcacccacaatggctgtgaatcacccgacagagaagaagatccacgaataatcacagacacaggagaagtcggcgaagcagaactgatcatcacatttactcccggtgcttttccctgaagcatagactgtatcgtcgcccccatcggagccgtttccatatccttacttcccaaacgggtaaccgcacccgtcatatcctttacctttgtcgttccataccccaccgcaaccgcttcttccaaacggttcatctcttcttccaaggttacatcgattacatttttaggccccacagtcactttctgtgatttcattcccataaatgtaaaatttagtgccagatcaggcgcctcggggcattccagggaatatttttccttcattatcggtagccacaccgatggtagtaccgtcgaccaaaatagtcacacccggcagaggatctccattcgtatcggtcactttaccggaaatcttcctcatccgtacctgcgggacattttccgactggcggctacgacgaatcacgatcgcattattctcccggacgtatttcaaatcggtaccttccaggcatttgttcaatatcgcatctacctgcgtatttttcatgtcgatatcgattcctttcaccgaagcaatatcctcatcgctatacataaacaccagctgtgtcttctctttcaattcccaaagaatttcttccagagaagcattttgttttttcaaactgactgtttgtgcactcgctaaagcgaacacctgggacataacacataaaagaagtacgaatgtaagcttcatccgtagcagaactttagacaattttcccgaataagagaaactgccgtttcggtttttcttcatacttttgtaattggttaagtttaactatgttattaactaaagaagggccggaaatttttgacgccgattccggtccttattttttatttccaactgaatgtgattacattgcctttcctgtccacaaccactttgtccatggcccggattagttcgagtatggtatcgatatgatcgtaacgccccagattagcggacagacgtaaattcctcacatctgcgccgctataaaacacttcgatatcgtaccaacgggcgagtgtattcattacttcttccagacgttgttttctaaaaacaaacattccttccgtccaatcggtatataaacgggtatctacttctttcacctcgatttgcccggtgagtttatctaaagaaaactgctgggaaggtaaaagccggaaagcacgtatcttgttttccggtccggtaaccgtcaccgctccttccagcaaagttgtatgtacaatttcttcctcgggataggatttcacattaaaacgggttccggtcacttgtatgtgcatatgttccgtttctacgataaagggccattccgtcgcttttttcacttcgaaaaatgcttctccgcgcaaatatacccgccgctcgttccccacaaattttaccggataacgcaattcggaaccacaattcaaccaaacttcggaaccatcggctaaatatattttatagtcggcaccggcagggattttcaccgtattgtaaaccaactcttcgtaggaatcgacggtataagtaagtgtatcctgccgataagccaaataactttgagtagagttgctgatgtgtatgccattttcttcccgtagctcgacaatttgtttttccaaatcgatatgttgtccattagctaaaatcaattccgcactttttttaccgattaattctgcctcccggaccactttcaccgtttctatttctgtcggctgccaaagcataccgatcaggaggaatataaggccactggcagcaacgacacctattctcctcattccccatccgcttttcttttggacatttacttcaaactgttcccactcttttgccaagttgatcatctcccctttatccactctgaggtaagcttcccgatagtctctcactctctcaaacagctgtcggtgatcgttgtccagcagccattcctgaaattttttctctttcaaagtttcaggatgtccaaggtgttccaatagatattccagctcttgaggatctaacaacaacataaaggttcgattctttttgcgggtttccgcaaaaagaataacggacagatgataatggataatggacaattattggaagcttcacttccattaaataaagaaaaatgagaaaagaaaacgagaataaaatcattgacaatcaatacaatatatcctattcttcgggtatactgcttcattgtcgattaaccaggagcctgcggggtccaataactttataaacattatgaactttataaactttcaactaaattaaacgaacgtttatttggtaataaactattcacaataaacacaggaaaggagtaaaaatgggtgaagtaaaattgattttttttattttgaatccccaaaatgaaacattacccccgtccctttgtttctttccatccaaatgcagtaaaaatatttttttacaacggggtggtaactcgtctatcgtcttgaaaagccatcgatagatctcttcttccatgacatcataatcgtccagttccggattctcaggatgcaactgtctgtaagcagcatatttttcctcgacttttttatgctttatttgttctatgaatatttcctctttttgttttcatcctaagctgccaatgaaaaacaaaaataatgctttttagaggattagaaagcaaggagttcatagttaattctaaaaattcaaaagaaaagctgtgtgaatgctcgattcacacagcttcgcttctatttcggacagaactatttacctactttttagcaaacatagattcgatatattgttccatttgctttgccatgtctttatcctcacatttggctaccagtttctgaccgatctttttccaacggttgatctgcagaggagtagctttttcttttgctccggcaattatcgagaatgggaattcttccggagaaaggttattcacttctttttcacagactgtaagcagctgattcggattattggctaagagtgctttagcgatattgatctgccctaccaatgatttttcatttttcaatttcagaccgacaatctctttcttcatctgatccaggtcggcagctgttgtcgatttatcccgtccgtagaaaatcatcatcaatttacgttgatacccgctggacagtcgtttatcgacagcttcttccgtattattttgtgcaaacttctcccggttggccaacaaatattcataagcttcagagcctgccggagctaaatcaggattattgaaaataaaccaataatcagacgatactttctcttcatcggtgagttgtccatataattctgcagctactttcgaagcatccggagaatacatagaaatcaaactttccacatatttaaccaggaattccttatcccggactccttctgcatattttgcttccagtacaccggttgctttattatcgtcgaaagcatcctttacccgttcgataaaccggtccggttcaccaccgccgacaaatttatgacgcacggttccatccgtattcagaatgacaaaagtaggataagcgcgaacaccgaattttttagctaattcaggtccttctcctttttccatatcatatttaacacaaatgaatttcggattcatataatctcccattttctcctgtgggaaaacagtgttactcatatatttacaaggcccacaccaggaagtataacagtcgacaaaaatctgtttacgcatcttagcagccttttctactgcctgttcaaaagtcaggtcctggaaattaacccctacatgagctaaattcttccaggattccacataatactccaggtaatttttcatttcgctattagccgggttagccatcattttttcagcggcagcaaccatacggttataatctgccttagtcgctttatcctgcatagctccgaaagccatcagcatagacgataaatcgtttccggtcaatgtagcagccttttcttccactttagataccaactgattcacatctccctgagccaccaagccggcaatatcacataaagacaacaaatcgttctttttctgaaaatccaatttaccgatctgttgtttcagttcatccaaagatacggtttgtctttctttatttctattaaggtgtggaaataaagcccggctataagcagagaataaaaattcatccaatttttctttccctatatttttttcgaaggtcggaatattggccaaaatcaaattaaaatcgggagttccaaccgtacaagtaccgtcctcaaacaagggccagtattcttttttcaatttatctttctcggtgatctgagacagtaattctttttttacctgctctgcttttttctgatcgtaagcatcatctaaagcgaccttataagccaataattgctttttattcatttttcctttttcgtactgttgattcagatacagcaaggaagtcttttcattcaaccctttctttactctttcgataaaaggttccagttcatctccaccgacgacagcatgttgtaccgttccgtccggacggataataaagaaagaaggataagcccgcacacctaatttgtttttcaattctttcccttctccctgttccatatcgaacttcacacagacaaaacgaggattaaaaaattctccggcttctttcatcgggaaaatctttgttgtcatcatcttacatggaccacaccaagttgtgtaacaatcaacgaaaaccagtttcttttctgctttagctttagctaatgcttcatcaaatgtcagatgctggaaatccactcccgtttgcgcaaaagccattacgcttagcaccaaacacatcatcaaaggaattaattttttcataatatgatttaaatagttttggtaaatgatgatgcaatttacaaaatgggattcaattaaagtctaatttcttccatcttaacctatatttgtgatatccacgatagtcctctaacattttattaagagttgttgtctcttttttttacaaaacccagtctcccaaaaacgacaggcgaccgatacggccggttagaaaaaatcaaaagagaaattaaaataatcgatttattgaaagagtaaaaatgaataaatgtttcctgattcgggctttttaatgtaattttgtcagaagacctgtaacttttacaggtccggaagaaaatatgaacaagatagctgaatatggaagatatacaagcgatcaaacaacgatttgaaatcatcggtaacaatccgggtttaaatcgggccatcgatattgccactcaggtagccccgacagatctatctgtactaataaccggagagagtggggtcggaaaagaaattttcccccgaatcatccatgcatacagcacccgcaaacatgcccagtatatagcggtaaactgcggtgcgatccccgaagggacgatcgactccgaactcttcggtcatgagaaaggggcttttacaggggccgtatccgaccggaaagggtatttcgaagtaacagacggcggaactatttttctggatgaagtgggagaattgcccctacctacgcaagcccgtttattaagggtactggaaaccggtgaatttatccgggtaggttcttccaaagtccagaagaccaacgtccgggtcatcgcagccaccaacctcgacatcccgcaagcggtgaaaaacgggaaattccgggaggacttgtattatcgcctgaataccattcccattaccatccctcctttacgtgagcgtaaagaagatattcccttgttattccggaaatttgccgccgattttgccgaaaaataccggatgcccgcaatccgattaacggaagatgccgttaaagtcctacaagatttccgttggccgggaaatatccgccaactgaagaatgtaacggaacaaatctctgtcatcgaacaggaacgcatagcagatggagccacgttgcgtaaatatataccggaaaacgatccgatgttgccgacactgacaggcggccacgataaaggagatgccagctttgcttcagaaagagagatcttgtacaaaatccttttcgacatgaaaaaggatatgaacgacctgaaacgtctggtttatgatctgatgcaaaacgaacctcagcaagagacggtggtaaccgagccgaccacttctctggtattgcggaatctctataaccaggaaccgggacagttttccccggctcccagtccgacaatgatcaatcaccgggaagatcgtatccaggataccgaagcagtcatcgaagagtccttttccatcgaagaaaaagaaagagaactgatcctcaaagcacttgaaaaaaatcacggtaagaggaaactggccgccaaagacttgggcatatccgaacgaaccctataccggaagctgaaagaatacaatctggaaaattagatcgttatttcataaagcagcttgtaggggtgataaccttgttccagagcaatccgtccgaaggcggatagtgccccatgcaggtaatcgttgccgacgactttgcgaaaaccgaaacagagctgaatccatgtcttccggtagtaaattaacgtgagttcgatgaattatagttgtctgcaaatttgatgattagcgaaaattgctatattcaccgaggataaagttacagaattattttgcatggcagatgacttctgcaagttttctaacgctatgatgggaaatatacgctaaaatcagacaataaacggcagtatcaccgcgattgcgttattctgaattcatagaactcacgttaaattaaattgttacttcaaacaagtgaagtatacggatacaaaagatggtaagttcgatccttctattagcaattcaattttctaatcccggaataaatttttagctttgttgtcaaaatagggttatggagacgaggctattcatacggggagtaaatttgaaagaggatcaggcttggaaagaactgtataattatttttatgctcctttatgttgttattccgcccggctcatcggcgacgaagatgccgctgaagatattgtacagggatgtttactacggttatggcgctcatcgctctgttttcaagatatcaaaatcattacttcttatctttatcgttctgtttatcatgcttctttaaattttcttcgtgaccggcaacgggctcacaagcttcatgaaaaatggatgaagcagacctacgagtctgaagtggcagcaattgcaggagcgattgaagaggaagccatctcccgtttctatcaggccatttcccgtctgccggaacaacaaagagaaattctcttacaaagtgcaaatggaaaaaaaatcagagacatcgctctttcgctcggtatctctgaaaatacggttaagactcagaaaaagagagcttatttctttttgcgggaacagcttggcgaattgtggttgttcgtattgcctctgttgtttaaataacgattccatattttttttaattttttgtcacccgttttttctttcgtggtgtctgtatgtacttttaaaccgaaaatgatgaagtgggaagacataacagatgaagcccgaaaagcaacagaacaggcactgaccgatttattgactgaaaaccggaaaatatccggagatcagttgtcaatccgtctgcaagatccggcttatttggaaaaaaaatcgcaacaacggaaacgttattgcggagaagaggctttcaggcaaatgaaacgtcgggaggcaaaacgccggaaaatccgtttatggatccggtctgccagtgcggcatgcattctgatcgccggaatattggtcattgtgccgaaacaaaaaacagaagtcttaccattggccggtcattctattccggaaatccgttctgccgaaatgaaggctttgctgattaaaaccgatggagaacaagtgatgctgggaaaagaaagccggcaactgaaagaaaaaaacggaatgcttattgccatcgattccggaggactggaatatccgctccagaaacaatttgtttcccataccaccgattacaatgaattgatcgttccccgggcaggaatgtattgtttaagtttgtccgacggaacccgtgcctggctgaatgccgacagtcgtctgaaatatcctgtggtttttgcagaaaacgagaggagaatccgattgagcggtgaaggctatttcaaagtagccaaagatacccaggcaccgtttatcgtagagaccgatttaggcgaaatccgggtaatgggaacagaatttaatgtaaaatgttatcccgacgaaactattatagctactaccttggtgaatgggaaagtcagtttcatcaactcagaagttccggaaaggatactcgcccccggtcaacaacttcttttcgaaagagggaaccaggaagctgaaatccgccaggtcaatgtctgtaattatatcggttggaaagacaatcaactgatttttcataaagaaacccttgaagaaatcatgcggatcttagcccgatggtatgatatcgaagttgtatttgaaaacaatgacttaaaacaattggaattctccgggaacctgaataaatataccgacatcgaaacttttttccgtttattcggaataggcgcgaatgtccgttttcagctttccggcaggacggtgtatatcaaaagtgctgaataaaaacaaagagtgcggtcagcgtccaacttttcgcactctttgtacattccatattactaatttaaaatttataacatgtacgacaaatttatgaaaaaaaagcactggaaaaaaacttttctagtaatgcgtctgagttgctttttggcctgctggctaactctttctgccttcgggacagtcttttcccaacagaagttggtaaatctgaaagttgtcgccgaatcgttaagtaatgtcttgatgcaaatcaaagatcagacaggagtaaaaattctgtacaacgaaaatttactgaaaaattacgaaaacattaatctggatttaaacaatgtggaggttgaagaagctctgcgacaagtgctggcaaacacccgcttcgaatatgaggtgacagacggtgtcattgtggtgaaagaaaagaaaaacagttttccgcaacaaaaaacagtacggatacaaggtaaagtaagcgacgaggacggggcacccctccccggcgtaacggttttaatcaaaggcacgacactgggaactgcaacagatatggatggaaaatattctctgtccgtcccggaaggtaattatattctcctgtttaccatggtaggtatgaaaacccaggaagtaaccctgaaaaatcaaaccgaattgaatataatcatgcaacacgaaacaagcgagatggacgaggtggtgataacgggatacttcaaccaggcgaaaaacagcttcaccggagcagcccgtaccattacggccgaagagttgcaagcaggaggcaaccaaaatatcctaagtgcactacaaaatatcgatccctcttttgtcaagctggaaaataatcagctgggatcgaatccgaatgccatccccgatttccagatccgcggagccggaagcatcagtggcatgcgcgacgagtatagcggtaatccgaatatgccggtgtttatcgtcgacggtttcgaaactacagcggaaaaagtattcgatatggatccttaccgggtggcaacgatcaccttattgaaagatgctgcagcgacagcgatttacggttcgcgagcctccaatggtgtagtggtcatcaccacaacggctccggccagcggaaagatggcggtgagctataatggggatgctacattttatatggcggacttaagtgcctataatttatgtaatccagaggagaaattggaactggaagtactggcgggattgtatgatgtggaaaaaaagcagtatttcaattatggcagtaagtttgcagatcaagccgtcatgcagagagcctataactggcgtttggctaatattagagaaggagtaaacacttattggttggataaaccactaaatagtctgaccgtagcacataaacactctttgcgtttggacggaggaaatgattatattcgttatgccatggaggtgaactataataatacccccggtgtgatgaaagaatccggacgcgaacgtctcggattggggttggaattgcagtatatttacaagaatctgactttccgcaaccagttgaattattcgcgggtgaaagcgaccaactcaccttatggcagtttcagcgaatatacccgattaaatccttacgtaaaatacaaagatgaagacggtaattatatttatgaactggaagcagaagacagaagaagcaatacaggaagctataaattttttatttacaatccattgtataatacgacattggatgtcagagatgaatcgcgctataatgacctgaccaacctgttcggcatcgactggcagattatcgaagggctgcggttgaaaggcagtttctctttcacgttgcagaatacttcggcggatgtctttaaaccggcaaagcatactgattttgctacttatactggtgacgattttgaccgccggggctcctattcggcttcccgcggggatgtgttcgattatgacgcttcgctggtgttgagttatttctggcaggcaaacaagcatgtcatcaatgccaatttaggatggaacgccaaacagagccggacgaaagagttttccgttatggcggagggctttccgaacgaacgcctggattacatcagtttcgccacgcagtaccagaagaacggctctccctcgggtaatgagtacacctcccgtctggtgggtttcctcggcaacctgaattacagttgggacgagcgttacctgttcgacctctctttccgtgaggacgcctcctcgcagttcggtgcggacaagcgttgggcaccgttctggtcggcgggtttgggctggaacctgcacaatgagcatttcatggaaggcgtggattggctgcagcaattcaaaatccgcggttcctacggtctgacgggtagtcagaactacgatccataccaagcaatcacaacgtatgaatacctcacccaagaccgttaccactttgccgtgggggctatcgccaaagcaatgggcaaccgtaacctggcttggcagcgaacctggcaacagaactacgggttggatctgaccttgtggaaaaaccgaatcgatatctctgccgattattacatcaaaacctctaaagacgtattgacagctgttactttagccccatctcttggcttttcttcttacatggacaatctgggagaggtggaaaaccgcggatatgaattgagtttgcgagctacattaattcgtgaccagtctaagaagattttttggagcgtgaatggctcggctatccacaacaaaaacaaattactgaaaatttcgaatgctctgaaagcttataacgaaacctcggatagtgaactggataaagaacctaacactgatggtaagaaatcggaagtcaaccgtcctcgggtacgctatgtggagggggcttctatgaactctatttgggtgaatcattctttgggaatcgaccctgccaccggtaaggagatttttgttgcccgcaacggtgacttggtgactgactggtcgtctgccaattacgttatcggcgggtgtaccgattcgaaggtggaaggaacattcggaagtaatttcacttggaaaggtttgtctttgaacatgacattccgctatcgtatcggtgggcagatgtacaatcagactttggtggataaggtacaggatgtagacccgcgctacaatgtggataaacgtgctttcgaacaacgctggcaagaaccgggagataaggtgcggttcgctgctttccgcactgaattaaacggaatcaatgtggcttatgtgacccgtcctacttcgcggtttgtagaagattacaactatcttgaattggcaaccttgaatctttcttatgaatttggcacagcgaaattacagcgatgtggcattaagcggctaaaggcgatgttttatatgaacgatgtgttccatgtttccaacgtgaaacaagaacgaggtatcgattacccgtttgcccggaatttcagtatcggtttgcaggcaagattttaatagcataaaaacgaaacaagatgaataagaaattgagatatatgatgttatgcctgtcgttgtttgcctttggatgcaatgactggttggatgtacaacccaaatcgcaagtaaaagaggaagatttgttcagttccgaatcgggattccgcgatgcattgacgggtatttatgccttgatgggaagggtagaaacctacggaggcaacagtaccatgggatttatggatatgcttgcgcagacttatagcaaagtggactacgattatgaagatgccttgaagtataattataaagaagagcatgtcaaggggattgtggatacgatgtggagttccaattataatgcgattgctaattgtaactacttgttacaaaatatagaaaaaaagggtagcgtgatgagcgagcgtttacgtaatgtcgtggaaggtgaagccttggctttaagggcttttctgcatttcgacctgttgcgaggatatgctccttcatacaaaatgggcaaagatgaacccgctattccttatgtacgggaggtgacgaacagtccggttgtacaatcgacggtagccgaggttttggaatacattcttacagatctgaaaactgctcaagcattgctgaaaccggtagatccgatcggaccatcctttgcagaatataacgataaactagaatacggaatggacgagtacatcacagatgacggtttttggctttatcggaaatcgcgcttgaactattacggagtgacggctttgatggcacgagtgtatctctgccaggaaaatctgaccgatgcgttggcatgtgcccaggaagtgattgattccaagcgattcgagtttatgaatgattcaatcaacaacgtatacgcttataggaacctttcgtatatcgaaaaaatggcacgccacgagtatgtatcttccctctatgtatatgatttgaaggaaggccgttccgatttgttttttaagaatctcgcaagttgtgaatgtgttattgcagaaggacgaaaggcttcaatctattccggaatgggtcaggatctggatattcgcagcaaaaattggttcgaaacgcctgccggttctgcaacggaatatgtaaacaaatacatgagagggacccagattcctttattaaaactctcggaaatgtacctgattgctgccgaagcatcgggggatatccgttatctggaaaccttgcgggccaatcggggatatgctaccgatccgctaccggcaggggcgaatttacaagacgagataaccaaagaatatcaaaaagagtttattgcagaagggcaattgttttattactataaacgccggaacatggctattttgcctatcacgtctaccagcatgaatcgggctacttatgtactccccgttccggataacgaattggaattcggtaactttaaacagaactgattatgaaaaagatattttatttaggtatactccttggtttgctgtcggcttgccaagagaataaaatggatggtttcgacagcaatggagcggtttattttcaaactaatccgtctgactggaacaatctggcggatagtgtgctttactcttttgccggcaaagatgtgacagaaaaaacacttaacttacaggtaaacctaatgggagaggctgtcggttacgataggaaattccgcttggttgtagatcaggaaaaaacgacagctaaagcaggagtacattaccgaacgttagaagatttttatatcctgccaaaggatgcctatagtgttcagattcctgtgattttacttcggggagatgctcttatggaaaaagagattcttcagctgaccttgaaattagaggcttcagatgatttgcaaccaggcttgacccaacggattgtgactagaatattggtaaccgatatgtacatgaaacctgcatattgggagcggctatggatgtggggagattattccgtcaagaagcattcacttctcttggaactatttgaagtagattttccggaaacagtggatgagtattatgatgattactatctctggtcagcccgtgcgaatatgatcagccaatatgttgaagaaaattatccggttttagatgaaaacaaccaaccgatagaaccgtggtttgaaagttaagaaatatgaaaagaataaaggaaataataggtgtattgctgttggtaacaggaatcgcctgcacagaagacaaagggaattacaattatactcctttgaatgaattaaccattaacggtataaataagacgtatgtagcagagatagactccgtgctttccatctcggtaaacattattggtgaaaaaggtttccgggaagacgattacgaatatttgtggtatgcctggcggaccagtgatgcaaaaactacggatacgctttcgttaaagaaagatttgaatgtaaaactatcgattgatgtaggcgaatacaccttgcgttatgtggttacggaaaaagcaagcggtgtttttttcgagtctgaaatagacctgagtgttatcgataaatattccaaaggagttatggctctgagccggattgaaggagactattcggatatcacctttatcaatgtaaagaacacggttacccaacatgcctataaacaggccaatggcaattcggtaggacgtcacccgaaaggaatcttttatattggaggagaagatgatgttaaaaatgtagtgttgatatcaacagaagaaaggactatcacagtggaaccgaaagattttacggattttatgcccctttccgaatggttttacgtcaaaccggaaggaacaatcgtggaagcctttgcaacagacgcaggtaaatggtatgaatatctgattattgatgggaaggcttataatcgacgtgtattctctaccagagatcctttttggaagttcgatcctaaaatcaaaggagattatcatttagctccgttttcgctatatggtgcaggaaaatttttctatgaacgggataaaagatgtttcatatatgaccgctatggaaccatgatggctccggaagcattgggaagtgcattcaatgccaacgatatgcagatggatatgctttacggtacagccatcggagagaacttacgtgctgtcatggtcgatgacaacggtaaacgatatatgatttcaggcaaggaaatagacgattgggatagggttacctacgaagatattattcaaatcgttgcagagaaaaaactcgaaatgaattataccggtgcggcagaagccacttgtttcgccatttcgacaaaggaacccgactttttgtattatgcttacggaaataaaatcaaatgtgtaagtatgcttaccggtaacgaactgtcggaatatacaatggtgcaaccggtagattacatggaattcgacaaaagtgaaaatccggaccgtttgtatgtggccgtaagtgacggatcgggcactaccggtagcggttc

SEQ ID NO: 5882 - DNA, 10063 bp, Unknown
  gut microbiota DNA sequence
tgattcttggtctccttgcgataatagtttccttccactacaagacggtcatggaacaagcccaagttaatacccacatccaaagtatatgtcttctcccaagttaatttcggattacccaaagcaatcaaagtattcgatggtgtatcgtaataccatttgtcggaagtcttataagtggaaattgccgcataagccgggaagttgacattaccggtaacgccatatgttccacgaacacgcaacaaactaaccaaccaattatctttcaaccatgaatagttatggaagttcacaccggcacccacagaccagaaaggagcgaatctcttgtcctcgccgaacttagaagaaccgtccagacggaaagaagcgtccaacaaatacacgttgttgtaagaatagttaagagaagccagcatacctaacagacggctcttgtcagaagagacagccgacttgcgagtctgctctgcagcataagtaggagagttcaaattactcaactggaatccacgatactctattgcagtcgttttactatgagattcctgcacgttcaatccggcggtagcattaatgaaatgcttgtcgatacctttattgaaatagaacatcgcattggtgttccaagtgaatcccttgtcagaagaagttgttaaagttcctctttcacgagtcggagatcccttgaaactcgggtctttagggtcgctgaagctcttcgtttcagaatcggttcttgtcatagaaagctgtcccttaaacgagaagttctttgtaaaatagatattgatactgaaattgttagtcaagtcgttcaatcttgagcgaccggaaaaacttcccaatttctcagccctgtagagaggattggttgtcttgccgtctttcaatgtctccaacaactcgccgtcgtttgaatacggagcccagtacggttgcaacttagcataagtatcaaaatttccataaggagaatcctgtgatttagtcacattgaacgaaatagagttcataacctgcaaccaggacttattgcggtagtccagattcaaaccaacacctacattgtcacgataagaatcgatcatggctccgttgtgtgttccgtagttcaaatccaggctatatcggatactttcaacaccaccggaaacattcatactgtgtgaatggttgaacacattgtgcaaaggctgagccagccaatcggtctgcacgccacggcgcacctcattcaccaaatcattgtaagcaatatctttctccaactgcatgccaggatctccgctttctgcgatatactttccggacaaacgttccacttctaccttttcccaggcattacacaagttataatctgacaaatccggtaattcaactccggcattaaaattatatgtcaccctcaattctcccggtttcggtgcaacagtagtcacgaccaccactccgttggcagcacgagaaccgtatagagctgtagcggcagcatctttcaagatagtcatactctcgatgcggttgatatccatatcgtagactttctgtacagatacttcaaagccatccatgataaaaataggcaagttcggattgtccttcagagaagttctttgcgaacgtctggctttttccatttccagaccacgattcataccgatactaccctctccgcgaatggtaaactccggcaaagagttcgggtcagaaccaaacaatttattatccttaattcggaatgacggctcgaaagcctgcagagcagcaataacgtttttattatttgtttttaacagctgatctttattgaccgtagttgtattacctgtaaagctctcttttttcagtttcatgtatccggttacaaccacctcttccaactcctccttggcagtcttcatcaccacataaaactcttgctgtcccttatatgccacttctttcggctccataccgataaaagagaataccaatgccagattggctgtttcgggcactctcatggcaaactgtccattggcatcggtcacagcacctacagaagttcccttcaccaaaatggtcacccccggtagcggctcctttttttcatcaaccacctttcctttcaagagcacctccttgactgtcttttgaggtattgtcggtttcaaaacaatcacattgtcttgcaacacataagtcaatgtcgtacccttcagacagacattcagaatagtccggatatcgtccccctgtacgtcaacatccaccttgccgattttatccaaatcctcttcattatacatgaaaacaaacgatgtctggcgttctatcgcccaaagtacatccttcagactggcagccttcatcgaaagcgtcacctgttgcccgttctgcgggtagacatttgcatgaacatgcaacattcccagcagaacaaatacaaatgtccatctaaacataagtcgcaattttttcataaatttgtaatttgatttttatgttgattattttgacaagacaaaatggtcaatcggtagggatgctgcaacatccctacctttttatctgcctcgtctgattcttaaaacttttccatttctatctatttttatacgtccgttcgcttcaaaaatgcgcagaatgggatctatcgattcgtcacgtcctacattaaatccgaagcgataatcctttacttcttggttttcgtaaaacaccgttacatcataccaacgttcaatggcatgcataatatcctccagccgaacatcccgaaaacggaaaccggcatccttccaagccacgatatagctgacgtcaaccgtcttgatttcctgcttcccggtatttttgtccaatacgaactgctcattcggctgtaatatcctctgacggactccgggaccggaaacagccaccttgccttcaaccaaggttgtgtgtacactcatatcgttgtcataatccgccacattaaaacgggttcccaacacttcaatgttgtaatgggaagttttcacaataaaaggccttgccgcatcttttgcaacctcgaaataagcctctccatgcaactctacctcacgggtatcccctgcaaaccgaaccggataactcaaaactgtttccgagttcaaatgaacaacagtcccatcgctaagggtaagtttaaactctcccccacgaggaacagtcaccttattaaaaaccgctttttcgacagcttgcaccaaactgtctttataaaccaaattgccaccctgattaaaaatatttgtagccgattgtttctctacaatcccccccttcgtcttttccaaatccacgactttaccatctgccaacgtcaatatcgcacgcgtaccgccctgcaccacttcattttgtgccaccatgctcccgacttctgttttctgctcccaatataacattgcagccacaccaaccccgcaaaccaaggtcactactgcaacccaacgcaaaacacggcgatgcgtttgtatctgcctgcctgttgttctctgacgccgcttctgtaataatttctcccatccgaccgacctgtcgaacttggcagcattcttttgaaacgcctcacgattacgctcatctaaaatacgttcataaagattccggttgccttccgactccgacaaccattcatccaaactgcttctgttctcttcagaacaatctccagacaaaacatgagcaatctttttcgctatctcaaaatccttttctgtatttatgcccttttccatgttccttataacaaactccgtttataataagacacaaaaaggcatttttatggggaagcccatccccactttttttttcaaaacaacaaaaaaaatgttggcagaattaaatacgcactaaatatgcactaatttaattctgccaacgggtaaataaatatttttaataacggtctccggatgaactaaaagcatcaacttcttttacagaaacaatactagctcccaaatcaaactccttcaataactccggattctctttcatcgttttagcatcgtaaaacagcaatttaccttttcccgtcccaacgaccaaatattcataatctctataaacagtgtaattcatatatgtcactttatcaccactgtttaaagtgataaaaggatggtcgctcatttcgttcttcttcacatagcgtatctcatgaccattggcatacaaaatataattgtttttagggttaacactataagatgatgccccagctgtaagaatcacagaattttcatccaacgaccgtcccggaaactcctcgtcctgaaccccggaaacttttgccaacaacccgtcattattgtttacagcataaataccccaacgcgtcttaccatcagctccattgtaaaaaacattcatcaaactataataaggtccgaaaaaacccgcagaggcaaaacctgcataagaagcataaataaatttaactccatccgggaattgccacgccggacacataccttccatagatactccgggcgttatttttgccggtactaatttagataactggtactgagttccaacaggaaaatttcctccccaaggggtcgacataacatctccactctgataaaaaacgatagtcaacattctgttatttttttcatcataacaagggatacaggaaaaaccgatttgaggttgtccaaaagaagtgactttatatcccttttcatctgccaccaatggtgttgacacgaaattacctccaagattattcatggacatcatccttctgtaaatttttccgtcctccatagcaataaaactttgcacaccggaagttgtcattgatgcataagcatctatacgggtcaccggtttaaaaccggacgggacaggagaaaaatcctcctgcaactctcccactttcaacatactctcgcaattaaattcatacgccacctgatccgtcatcacagaaacagctcccaatacgccgatattggtcagattatttcccatccccatggataacggtttgccaggaatatcagctccataagtattaaaataaatatcatccgacaatttaaagtccatcttggacgtttcctgatttctggaagactttatataagacaatttcgaattcccgcctttctccgataatacaatccagtcaccatgcgtattggtcggacttatctgcacaaaagccctcaccatataagcaatacccgtttccttttcaataatgccaaacgtgccgttcactccggttttgggatattccgataatttaatcagattcatcaatttttccgtctctatttcaaaatcagcctcttcactcaatacgaccccgttcactttccattcataacgtactcctgcagcacgcgcagccgaatctccctgccatgtaaaaaagggagtactcttaaacttcgccatttcaccggcacgacattctacccatattgtattcgaaccctctctcaatttccacaccggctcatcaagtttcgtataatcatacgaacccttatcatccatacaacttaaaaacgccaatgtcaacaaactgccaattagccaattaatatatttcatagctctaatatttactgatttatactttcaatgaatccagaatctttttatattccgcaccatgttccgggtcattcaaatgatccagcaaccattgtttgaattcagtcaccattgcaattgctcttgccggataattctttatcagattttcattgaactctccttcggtatccaccacctgtaagaacaatttatatttttcataagaatatgctcccaatagcgtccattccacttcatgagtccaccaatcaggcttcgcctccacttcactccatacaatcacagccctccgccgctcgtactgtcccaaatctacatctgcattcggcaccagttcgaccaccaatctcaccccatccgtgcctaattctgctaaacggtcactgtgcaaaacagacacctctatcgtatccttcacctccttcatatctgtcgggagtgcccttttacgaaaagtgtattctttttccaacctatactcttccggctttgccgttgttccctcttccaccgttttcaacccaaaatgcaaatctttttccaattccaagccggaaagattcaccaccaacttcacttttatctctttcgtattttccggaaaaaagaaaaaagaagtcctcgtagtatccgcttcttcagtccccggatacaatgcgttcatataaaacttttcaaaatatatctgattccttccttcaaaaacagctatatctttttctccacaggcagaaacgatacctgccagtaaagtcacaataaacaataaacgaattttcatagtattgatttttgacatttataaatccttatttctgatctttcggcaatggtaatgaagcctctcctcttgtcaacttgtgcatctccccattcaaattgaaagctgcatccaaacgtttgtacaagaaaaacaactgtccttcagaaatccactcccttctggcatccccaatcaaatctatcaaaaactcttcccaactgtttcctactgccaggcggtccaattgacgaccggcacgaatattattcagaattccatacgcttcgccataatttccattccgggcatgacattcagccaatatataattcatttctgtcaaacgaataaccggcgaaatttttaaatgctctgcgacatccggatttttactatatacataccattttgcagaaacgggaattacctccaatgccgggaaaatcatattctttgaacggacatccgtagcccactcctcgacacctctattcgtgaacaattccaccctcttcaattgaaaataattgcttgccaaaggtgtcccatcttccgtcttgctactcaagttaaaataagactttattcccgctccctcataagccttttcattataagctgcaaaaatcaaactcgactttaatttaaaatcacttttctggtcaaaatctgcaatagacgttccattattgaccgtcactccggcaaaatcatcctgataaaatagagtcccgctcttttttccatattctacaacctccgatgcacatctaaaggcatcctcattcttcccggcatattgatatactcttgccaataatgctgttatggaataataagtcaatcgataacctcttccggcaaagaaatctccataattaaaagaaggtccggcaagtatattcgctttggacattctcatttttccagaactactggctaaaacaccggcagcggttgtatcaaaatctgctaccagacttttagctttcaccaaatccctcactactttatccaaaaacggagtcacttttatactctccgggtgaatatccggataagtctccacatacggcacatacgcctggccgtcatcattgacaggagccggagcaaacagacgcaacatatcaaaatgcatcaaagcacgacatgcatacgcctctcccattatcattttcttctccatttctcctttttcaaacaaatgagcatctgtctgttcgatgtgttgaatcaaatcgttcgcattggcaatcattttaaaagccactgtccaaatattatctatataatccaccaaagagacatcatcgtattcaaactttgacgctttaatataatgcgtcgtcgtaaaaatatccttattgcttaaatcgtattgttgcgacatacagtcaaccaagccaaaagacaattccctgccatacaaatccggacgtcccatcgcctgatacaaaccatttaatgccgtacggtagccttcgcctttaccatataattgcgaggcggtaatttctccttcctgttgcaaatccagccatttttcacatgaaacaaacgacatggaaattgccaccaatatcattgcatacttcttcatattcatattcttatatacctatattcaacgaaaaactaaaactccgagagaacggataactcgtacctctctcttctttaattgttgaccaacgacaaatgtcattcatattaaagcgcaatcccaagctccttaatttcaatttcgaaatctgctcacgcttaaaatcatatcctaacgacaaactactgaaattaagataattgtaatcttgcacaaagcggcttgtcacttgcgttttagtattatttcccatatcatagaacggtacaacatcgccgggtttcatccatctctgtgtcaatatacgacggtcaacattattatattcaatattggcattctctaccttattcaacaatgtctcgttataagattgagctccccactgatacataaaagatgcgttcagatacaaccccttaaatcccacattaaaaccaatcgaaccctgagcatcaggattattatctccaacaacaacctgatcgttcgcatcccaggtataagtcgacattccgttctttttcaaaaaacgttctttaccattcatcggatcaataccttctgaacgcacggcatacaacgcagttgtagaagcacccttataatataaaattaccggacggctcaatacatcactatatcctcctctaccattattccattcattcaggattttctcattataagccttggtctcttcacccaattgggtaatagtgtttttattagagcccagattggcattcaccgttaccatccaatcgtcatttctaaataccgtagcatttaaattaatctcaaatccctcgttcttaatcgctcccgaattgatgttataagtcttgaagccggaagaatgcctgacactgatttcatctatcaaatcctccgtacgcttacaatagtatgctgcatcaatataaatcaaatccttcaacagagctaaagtaaaaccgacatccaccgtttttgttttttcccaagtcaaacgcggattacccaatgtattgaattgcgctccggctccggtaaaaaaccaactgtccatattcatattataagttgtcgttgccatacttaacgggaaattcacattaccggtactaccataagtggcacgaatcttcaattgactgatcaaccaattatccttcaagaactcataattgtgaaagttaataccggttcccaccgaccagaaaggagcccaacgcttgtcctttccgaattgagaagaggcatcaaaacggaatgaagcatcaaacagataaacgtcatcaaatgaataattcacagaacccagaaaaccaatcaatctgtttttcgaagtggaaatttttgtcttgtcgggctgacctgcagcaaacaacggagaattaatacctcccaatccaaaacccagaaatctcatttgctccgattcgcttgaagtctcttttgcattcatacccaacgtcgcatttataaaatgacgtcctcccaatgtcttgttataataaaacatcgtatttaaattccaattccagttgctggaagtacttctatccaaagagcctttcttgtcatctgtaattccgctatattgaaacgaagcgtctttcggatcaacaaaagtttctgtcttgcttgttgttttcgtaatactgaattgtcctttaaattgcaaaccattcgcaaaatacatattgacattgaaattatctgtaatatcatctgtttttcccttccctctgtaactttcaagatattttacaggatacagaggatttgcagccttaaactctcctgcctgaagattttgcaataattctccattatcgtcatatataggcaaataaggtttcatttcagcataggtactgaacgaaccgtaaggagaatcttctgttcccgtccagttataggtaatagaattcattaactgcaaccatgatttagggcgataatcaatcgtcaagccagccccggcacgtgttctgtgcgaccccttcataacacctttattgctatcataattcaaatccagactatatcggatagtttcctctcctccggaaacattcaaactgtgcttatgattgaatacatta

SEQ ID NO: 5883 - DNA, 521 bp, Unknown
  gut microbiota DNA sequence
tatgaagttctccatgtacaaaactcttgctcaaaagctgaatatgtcagtgagaaaagtcattgaaagataccgcaaggacaatctctttgcagtgccttttgtaaacaagggaggagaaaccaagtacagggtattctataatgagggatatgcccgcaaaacggattgtgaaacagccccaagtgacaatctgccgtacatgttcaaaacgccatcgttgagtctgatagaaaggcttacaacaaaaacgtgcgaactatgtggcaagcacggagaagtggtaatgcaccatgtccgcacactcaaagagttaaaaggtaaaaatgactgggaacgcaaaatgctctatatgtacagaaagactttggtcgtatgtgcggagtgtaacgcaaaaatccagagatgtgtcaagtaagatgatgttacagatggagagccgtatacatggagacgtgtaagtacggttcgggggcaggtaagcgaaaacctaccgctgtaaagcggaaaggcgttgtttg

SEQ ID NO: 5884 - DNA, 212 bp, Unknown
  gut microbiota DNA sequence
tctcacgttttccgttgtttgtattaaagttacagactacttcccttcgccatgtacaaggctttcccttgctcagactactacggaagttccgttaccatatcggatattcaaaagctttctttatagctgtttgttccagcgttccgacttaggtaatccccagttagttctcttaataactattagcacgacatactgtcggatgcgac

SEQ ID NO: 5885 - DNA, 1665 bp, Unknown
  gut microbiota DNA sequence
atctaaaatcgaatactatggatacgcatacttttttcttgataatgcggaatgaaatgaaattgcagatgcgcagctgggtgtttcgtttctttatagtcttgtctttggtgggaatagttgcgtatcagatgtatatacatggagcaggcagtagtgcctggaaaatggtagcacttccctgttccatgcccttgatgaacgcatatctttttagcgtggttcaatcgcttttcctgatagttattatgtccgagtttccgcaacgtctgatacggtcgggattgcgtgacggggtgatggtgcgtccctttagtaacacggtgtattattggggggcattgacgggaatattccttcttttccttttggtgaatgtggtggaggtatttgtggtaattctattagtgaattcagtcaatgctgctccgttatcattgtcgctttatttcttttatattctgactttaaatgtcccttgttttttctttgtgtccggcttagctgcgtgtcttggtgctgttttttcgcgcgtgttcggtctttttgtcagtttagtatggtttgttttcggtgtgttttggttgccttatattttgcatggaacatttgattatttttcagtgggggttcctaatctgttttctgatatggtgggtcatgtaaacctgtgggggtatttgcagcatcgtttgatttatttatttgcaggaattggtttgttgttgttgggtttgtggcatctggggcgtttgcctaatagtcaatcttgtagacgattggtccgtgtttgggggctttgtttttttgtcattggtttgtcttttctatgtagtcttgagtatagttattggcggactgcccatcaacgagagtgttgggtttctgtttttgaacgtcactggcatgcgacaaccagccgggtgaaaacgcatgtcatccatttgagccagtctggcaaacatttgactgcttcgagtcggatggtgctctataatcccggagagacagcgttggatagtctggtgttgttcttaaatccggggctgcatttgtcgcgtgtttctagcgggaaggttacattgccttattggcgggatgagcaggtgtgtgtaataaactgccgtctggaaagcaaagattcgctcgtagtggatatggattatgccggagttctggatgatcggatttgcgacttgtttttgaaccgaaaggattatgaggacagtttttgtggtgaccattttttcccgaccggaaggcgaggagcttttgtcgatgatgacattttacttttaacctcttccagtatatggtatccggtggctcttcctccggtgaatccggtggatcctttttctacactttgggattttactcgcttcagtctttctgtcagttctcctcgtcagaacattgtggtcgcttccggcttgggtaagcgtaatggtgaggatatttcttttgaatcggaacgtcctttgcaggcattgacggtttatggaataaatggtgctagttatgatgttccggtagatagagggctgagtctgcgttgttgcctgtctgcttggggaaagcaatgggcgaaaaagttcaagaatattcaggctaaggacttttctgcttattggaggtcattgaccaatgattatgagaattata

SEQ ID NO: 5886 - DNA, 21173 bp, Unknown
  gut microbiota DNA sequence
atttattctttaaattatcaagagtgttgatatatttgcagcataaaattagtgttttttttgatatggaaaaaaggaggtataggaaatttattcgttattttttgtttaattggttgtctttgatttcattaaatatatttgcccaggacatgataaagccgatcgatcggcctgttttgttgagtggaaatttcggagaattgagggcgactcacttccattcgggtatcgatatccggaccggtggggtggaaggattgcctgttgtgtgtgtgaaagacggtaaagttgtccgggtgagtgtgtctcctaccggctatgggcaggcattgtatgtggagcatgaggatggaacgaccacggtttacggacatttacaacgtttcaacgctcgtatcacagcgcttgtccggcaaattcaatacgagcaggaaagctttaaaatagatgaagaggtgagggacaggcagttgatctttcatcagggagatacgattgcttttagtggtaataccggatcttccgggggaccacacttgcatttcgaagtcaggaatacccgttctgaacataccttgaatcctttgcttttttataagatccgggatagccggattccggtggtgagaggtgtttatctgtatcgtgaatcggcttcgggttgtgtcggattggtgaggcgggtggctttgaaacagtcggcgaacggccgttatacgctcggacagttgaatattccggcagggaaaataggtattgctgtatttgttacggattatatgaatgattcctggaataaactgggaatttatcggttaggagtagtggccggaaaagatacgctttttgccatgcagatggattcctgttcttttgatcagacttgttttatcaatgaaataaaggattttgactgttataagaaaaaggaaacggtttatcgttgttttggtaattatcagggacaggtgatgggggtgaagaatcggaatcagggatggattactgtcggtgaagacagtattgtaccggtgaaaatcgatctgaaagatatcaatggtaaccgggcaaccgtaacgttgaccctgaaaggcaaggaggcacctgtgcaggaagaacaggaggtgttgcgctatgatcgcagctatagcctggacttgtccggggctacgctggatttagaggccggagctttgtcggcttcggtgccgaaagggatgaaaatagaaaaagatacggtttccggaagggatatttttgtattatcggaaaaagatgttcctttgttaaagaaagcccgtttgtctgtggccggggaatttgaccggaaggctttgatttgtgaggtggaccgtgccggcaggaaatacccgcttgcaactcagtggagtgaagagggcctggtggcggaaatcggctatcttagccggtacacgatagccgaagaccggcaaccgccggtgatttcttttttagggaaatttccggatggttctttgaaatttaagataaaagatgatttttcagggattgcaacttatcggggagaggtaaatggccggtggtgcctgttttcctatgatccgcgctataatttgatgcgttgcagtctgaaagaaccggtttttgtttccggtcaggtgaatgaagtgaaggttattgtcgaagaccgggtcggaaataaaaatgaactccttgtcaaagtaaagaaataattatagaaaaggattaattggaagcatatttatgagaaaagaaatacaggaatggatcgaaaaagggaatcggacagaagctgtccgcttactggaagaatgggtcggaaaacatccggcagatgaagaggagtggttgctcttgggagaattgttgtatgccgacgggaaaatgacggaagccttgaataaattcaatacggttctccgcctgaatccggatcaccggaaggcagcgaattatgtggttatgatcaataatattttgggatactattgtaaagatatgttcaatccttaggtatgaaattatatcataaagcctttttattccggcacaaatggatacaaccttacctgcaaaaagtgttgggtgggatagatgctgtcacgtttctggcagccttggccttgattggcggtgtcgtctatgaacatggctttattatttcggaaggagcggaggcagatctcggtgtattgtatcggaccgtatggggcgttttcctggttcagaccacgatgcatatcgggctggcgtatcgggaaacgctgaagaaataccggacatttacatgggtattgaatattttactttatctgactctaattcccgtcatttttttcgaaccggaatcgggggcattgaaatatttctggttatttttaaacaaccgtatttttcagctgattctgttgttgttactttccttattgcgcttatcttcgggggtgatcggactcttgggaaaacggaccaatccctccctgattctggccggaagtttcttccttattatttgtatcggcaccggtttgttgatgttacctcgttgtaccgttgatggtatttcgtgggtaaatgctttgtttgtgtccaccagtgctgtttgtgtgaccggtttggtaccggtagatgtagcgacgactttcacttctttgggacagttggtcattattatattgatacagatcggtgggttgggagtaatgacgctcacctgtttcttcgccatgttttttatgggtaatacttccgtatataatcagttggcggtaagggatatgatcagttccgattctttgtcgtctctgttgtcgacggtgatttatattttatttttcactttagtgatagaaggagccgggatgttggtcttgttcctgagtattcacggtactttggggatgacggtgcaacaggaaatggtgtttgctgcttttcattctatttcggctttttgtaatgccggtttctcgaccttatcggagaatctcggtaatcctttggtcatgcaacaccataatctgctctatataaccatttccgtattgattattttgggaggaatcggttttccgatcttggtgaattttaagcatatcgccggttatcatctgaagcgtttgttttattttatccgtacaggaaaaagggatagacagcgtatccggcatttgtataatctgaatactaagattgttttgttgacgacgctgattttattgaccggtgggactatagcgattcttctgttcgaatggaacggagcttttgcgggaatgagtatgccggataaatgggtacaggcctttttcaatgcgacctgtccccgtacggccgggtttacgagtatcggtttgacctcttttcattacagagtttgttgctgatgttgcttttaatgtttatcggaggggctgcccaatctactgccggcggagttaaagtgaatgcttttgctgccgctgtattgagcctttttgctgtgatccggggaaaaagccgggtggaggtgttccggcggcagctttcggtggattcgatcaggcgttccaatgctaccctggtgatgtaccttatgattctttttctgggtgtatttgtcctgagtgtgctcgaaccgcatgcttcgctattggccttggttttcgagtgtacttcggctttgagtaccgtcgggtcgagtctcggtctgactccggctttaggagaagcaggtaaattattcgtatccttgctgatgtttatcgggcgggtgggagtcattacgatcgtattgggattcgtacctccgcagaagcataccaaatataaatacccggatgataatttgatcatcaactaagcaagagagttgtcgtattaacatgatatacatatgaaatatataatcattggtttgggaaattacggaggaggtttggccgaggagttgatggccatcggacacgaagtcatcggtgtcgatcagaacgaagggcgggtggataatctgaaagacaagattaccacggcttttgtgttggatgcaacggatgaactggctctggaaactttgccactccgagagatcgatgtggtgattgtcgctatcggagaaaatttcggggcttctgtacgggtggtcgctttgctgaaacaaaagaaagtgaagcatatctttgcccgggctatagattcggtgcataaggcgatactggaagctttcgctatcgacaaagtgctgacccctgaaaaagatgccgcccgcgaatttgtacagttcctggctttgggtattcatgccgagtcgttccgggtcgacgaagactattatgtgattaagtttaaagtgcctcggaaatgtgccggttatcctttgagcggaatgaacctcgaagaggattttcatttaaaactgattgctttgaagcaggctgccgaagtgaaaaatatactgggaatgaaaaaactgactaaagaggtgatgacggttattcccgacaattacctgttgaaagaggaagacgaattggtgtgttacggtttgtataaagattttcaggccttgtggaaagcattttaaaaatcggggtaaattttctttcccttttactttttactttttactttttcccttatctttgccgtccattttgaataggtttaacgcattaaaaatcaatccactttggaagggggtgcttaaattcggacaagcggtgcttgccatgaagtagaaaagaactgaaaatagaagacaaaatgacctcaggaagagactaagccggaggttgtaatgggagggtgttaccctgttgttattttatttaatgcgtttattataaactataaaaattagaaatcatgattattgtacctttaaaagaaggcgaaaatatcgagagagccttaaagaaattcaagagaaaattcgaaaaaaccggtattgtaaaagaattgagagatcgtcaggctttcacaaaaccatcagtacgtaaccgggcccagcggatcaaagctgtctacaagcagagtttgcaacaggcagaagaataattttcttcccgggcttgtttttcccggaggaaagtgttaaattgggttcgttttaagaacgatgagtatggaaatagattcatttctgagttatttgaaaaatattaagcgctattcagcacttactattacagcttataaagaagatttgaatcagtttcgtgagttctgtgaaaaagtggaattgatccggcaggatgaggaaattacttccaagatggtccggcggtttgaaatgggattgatgtccggtgggttgaagattggcggggtggacggtgaagaaaagctgaggccgatgactgcccgttccgttaggcgtaaattgagttctttacggacttatttccgttatctggtacgggagggaaagttgacagaagatccgacggagattgtcgtggcacctaaaatgggaaagcgattgccggtgtttgtgcccgattatcaaatggatgaggtgttggataaacacgcttccgacaaggattttgcaaatatccgtgatcggatggtgttgatgacggcttattataccggaatgagacgctcggaactggtggcattgaaattggaagacgtcgatttggggggagcggtgatccgggtgaatgggaaaggagacaaacaacggattgttcccatgttaccggaattggccggagatctccggatttatctgaacaagcgggaagaactggtaggtgaaaaacatcagtttgtattcgttacggataaaggaaaaccggtatacgataaatttatttatcgtttagctgtaaaatatctgggcgaagtcacttcgttgaagaaacgaagtccgcatgtcttgcggcattcttttgctacggctctgttgaataacggagcctgtatcgaggctatccgtgaattactcggccatgccggactggctgcgactcaaatctatactcataattcttttgagagtttgaaaaaggtttataaccaagctcatccccgggcttaaaatttaaggaggaagtactatggaaattaaaattaatgcggttggtttttcagcaagttctcagttggaagatttcattcagaagaaaatttctaaattagataaataccacgacggaattatcggttcggaagttaccttgaaactggaaaaagacgacaatctggaaaataaagtagtcgaagtgctgttgaatgttaaaggccaagaagtttttgcaaagaaaaatgcaaagaaattcgaggaagcagtcgatgagctttatgatgtagtaaagcgtcaattggtgaaaatcaaagagaaagaaagagagtgctgaaaagactaaaggcgagaagatcagaagctaaaggttaaagactggaaagctaaaagcgggaaggttaaaaaagcaggggaggaaaggctggaggcggatgagtaaaacctgagcgagagtcggaaaccgatagtcggataaaaagttgaaacacaaacattcaactttaaagaaaataattttgtagaacagaattatttaattatatttgcacgctcaaaagagtgggctgaataggcttgttgtatgcaggtctttgattcccctgatgagttttagtttgtatatagagttatttgagataaattgtttaataataaaaagtttttaagtcatggctaaagaaaagtttgacaggtcaaaaccacacgtaaatattggaactatcggtcacgtagaccacggtaaaaccactttgactgctgctatcactaccgttttggcaaaaaaaggtctttcagaagtaaaatcattcgatcagatcgataacgctccggaagaaaaagaaagaggtattaccatcaatacttctcacgttgagtattctaccgctaaccgtcactatgctcacgttgactgtccgggtcacgccgactatgtaaagaacatggttaccggtgctgctcagatggacggtgctatcctggtttgtgctgctactgatggtccgatgcctcagacccgtgaacacattcttttggctcgtcaggtaaacgttccgagaatcgttgtattcctgaataaagtggatatggtggatgatcctgaaatgttggaactggttgaaatggaagttcgtgaactgttgtctttctatcaatatgatggtgacaatactccgatcatcttaggttctgcactgggagcattgaacggcgaggctaaatgggaagaaaaagtaatggaattgatggatgctgttgataactggattccacttcctccgcgtgataatgaaaaaccgttcctgatgccggttgaagacgtattctcaatcaccggtcgtggtactgttgctaccggtcgtatcgaaaccggtgttgtacatgtaggtgatgaattggaaattatcggtctgggtgctgatggtaagaaaaccgtttgtaccggagttgaaatgttccgtaaattattggatgaaggagaagctggtgataacgttggtttgttgctgcgtggtatcgacaaaaacgaaatcaaacgtggtatggtactggcaaaaccgggttcagttaaaccgcacagcaaatttaaagctgaggtttatatcctgaaaaaagaagaaggtggtcgtcacactccgttccacaacaagtacagacctcagttctatctgcgtacgatggacgttaccggtgaaatcactctgccggaaggaactgaaatggtaatgccgggagataacgtaacaatcactgttgaattgttgactccggtagcatgttcagtaggtcttcggttcgctatccgtgaaggtggacgtaccgtaggtgccggtcagattactgaaatccttggttaattaatatctgatttgtgattccggtctgcaaacttgtatcgatcggagtccgaatcctgaaggatatttttacggtttacggttaccggtttcccggataatcgtaaatcgtaaattaaaaatccgaaataaagatacgggtgtagctcagttggtagagcactggtctccaaaaccaggtgtcgggagttcgagtctctcctcccgtgctgaaatgttttaattttaaattttaaattgtaaatttgcaggcaatttaaaatttacaatcgaagatctaaaatgaaaataaaagcttatttcgcagacgtttataacgagctggtcaataaagtctcctggccatcatggtctgaactccagagcagtgctaccatagtaatgatagcttccgtcattattgcaattggtatatttgtaatggacttttcgttcagacacattatggatttcatatatagtatgttttattaatcttcagaactacatggcagaaattaaaaaaagatggtatgtacttcgtgtgatcggcgggaaagagaagaaggtaaaggagtacatcgagaatgaagttgccagtctagggctgcaagattatgtttcacaggttttgatacctaccgagaaaatttatcaggtacgtaacggtaaaaagatcagcaaagagcggaacttttttcccggttatgtaatgatagaggcggctcttgtcggtgagattccccacatgcttcgtgatatcacgaacgtgataggcttcctgggggaaactaaagggggcgatccggtgccgatgcgtcaatcggaaatcaaccggattctgggtacagtagatgaactgtcggaacagcccgaggagataaacataccttatgtcgttggcgaatcggtaaaagttactgacggtccgttcaacggttttaccggcgtgatagaggaagtgaacaatgacaaaaaacgggtgaaagtaattgtcaaggtttttggtcgtcagacaccactcgaattgagtttcatgcaggtagaaaaagaataaacaaatattagttcttaaagtttttaaagtttctaaagttcttaaagtgtgttctgctctggttgtgattaaagcagcactgcagttttcattaactttataaaccttataactttataaactttcaaactctaaaaaaaatggcaaaagaagttgaagctcttatcaagctacagattaaagctggtgccgcgaatccttctcctccagtgggtcctgctttaggttctaaaggagtcaatattatggacttctgcaaacaattcaatgcaagaactcaggaccaggcaggtaagatcattccggtgattattcaggtttacggtgataaatcttttgatttcattaccaaacagccccctgttgctattcagcttttggaagcagcaaaactcaaatccggttctgcagaacctaaccgtaaaaaggtggcttctttgtcttgggacaaagtaaaggaaattgcagaaggcaaaatgagcgatttgaatgcttttgaaattgaaaaagcaatgagcatggtagctggaactgccagaagtatggggatcaccatcgatggtgagaaacctttttaatgaattcgtaatacttcaaacgtaatgagtaaactgacaaaaaataagaagttagctttagaaaagatcgaagatggtagagcttataccattgaagaagctgctcagctggtgaaagaaattacttttaccaagtttgatgcgtcagttgacatagacgttcgtctgggtgtagacccgcgtaaagccaatcaaatggttcgcggtgtcgttacattgccccatggaaccggtaaagatatcagagtattggtactttgtacccctgataaggttgaagaagccaaagctgccggtgccgactatgttggattggatgagtatattgaaaaattgaaatcaggttggactgatatcgacatcattattactatgccggccatcatgggtaaaattggtgctttaggacgaatcctaggtccgcgtggattgatgccaaacccgaagagcggtactgttaccatggaaatcggtaaagccgtaaaagaggttaagcagggaaaaattgattttaaagttgacaaatttggtatcgtacacacttctatcggtaaagtaaactttgaagcagaaaagattatggataatgcccgtgaatttatggctacgatccaaaaactgaaaccttcttctgcaaaaggtacttatgtgaagagtgtattcctgtcaagtacaatgagtcccggtattaaattagaccttaagtcattacttgattaattattaacctttaaaggaccatttgtagaatgaaaagggaagaaaaacaagtaatcatagacaatttaaccgagcagataaaagcacacaagcatatctatatcagtgatatctctgaattggatgcagctgcgacacaagagttgcgtagagcttgcttcaaagcaggaattaaactgattcaggtaaaaaacactttgttgcgtgttgctttggacggtttggaagctgactataatgaaatttatagtgctttgaccggttctagcgctgtgatgctgtctgagacaggtaatgctcctgcgaaactgatcaaagagttccgtaagaaccatgacaaacctgtattgaaggctgctttcgtggaagaatgtgcctatgtgggtgaaaaccaactggacgctctggttagcatcaaatcgaaagaagagttgctgggagatatcgtactgttgctgcaatcaccgatgcagaagcttatctctgccctggaatcagggaagaatactatcggcggagtgcttaaaactcttgaagatagagcataaatattattattattttttgaataaaaacattttaaatacttatcgaaatggcagatttgaaaaaacttgcagaagaattagttaacctgacagtaaaagacgtaaaagagttagctgacatccttaaagaagaatacggtatcgaacctgcagctgctgctgttgctgtagctgctcctgctgctggtggcgaaggtgctgctgctgctgaacagaccgagttcgacgtaatcctgaaatcaggtggtcagtctaaactggctgttgtgaagttagtgaaagagctgaccggtcttggactgaaagaagctaaagaattagttgacaaagctccggctcctttgaaagaaaaagtttctaaagaagaagctgcacaattgaaagctcaactggaagaagcaggagctgaagttgaacttaaataagtcataagaccctccatgggtttcgaggtttagagtcaaaagtgactctaaaccattttgttgttattattgtttaggttccaaaaaattattagatgtcttcaaatacttcaaacaaaagaataagctttgcctccacgaaaaatcagttgcaatatcctgattttcttgaagtgcaattaaagtctttcaaggacttttttcaattgggtacgacgcctgaaaacagaaagaacgaaggcctgtatactgttttcaaggagaacttcccaatcaccgacacccggaacaattttgttctggaatttttggactacttcatcgacccgccccgttattcgatagacgaatgtctggagcaaggattgacttacggagctccgttgaaggccaaactgaagttgtattgtacggatcccgaacacgaggatttcgacacggtgattgaagacgtatatctggggaatgttccgtatatgacgcccaaaggcacctttgtgattaacggagccgagcgtgtgatcgtatctcagttgcacagatcaccgggtgtatttttcggacagagcgttcatgctaatggtaccaaactttattccgccagaattatcccgttcaagggttcctggatcgagttcgcgacagacatcaacaatgtgatgtatgcttacatcgaccggaagaaaaaattgccggtaacgactttgttacgtgctatcggctttgagacggataaggatatcttgcagatattcgacctggcggatgaaataaatgtttccaaaacgggattgaaaaaagtcgttggccgtcggttggctgcgcgtgttttgaagacctgggtggaagatttcgtggatgaagataccggtgaggtggtttctatcgaacgaaacgaaatcattgtggaccgggaaactgttctggaaaatgaacatattgatgcaatcgtcgattcaggtgcaaagacgattctgttgcataaagaaaagcaaaatctggcagattatgccattatatacaatacactgcaaaaagacccgtgtaactcggaaaaagaagcagtgatgcacatctatagacagctgcgtagttcagaaccacctgacgaagcgactgcccgtgatgttatcgataaattgttcttctctgacaagcgctacgacctgggagatgttggacgttacaagttgaataaaaaactgggactttctaccgatccggctgttcgggtgctgaccaaagaagatatgatcgagattatcaaatatctgatcaagctgttgaatgcccgtacagatgtagatgatatcgaccacttgagcaaccgtcgtgtacgtactgtaggcgaacagttgtacaatcagttcggtgtcgggctggcccgtatggcccgtacaatccgtgaacggatgaacgttcgtgacaatgaggtgtttactccggtagatctgatcaattccaagatcctgtcttctgtgatcaactctttcttcggtacgaatgcgctgtcacagtttatggaccagacgaacccgctggctgagattacacataaacgtcgtatgtcggccttaggacctggcggtctttcccgtgaccgtgccggattcgaggtgcgtgacgttcactatacccactacggacgactttgtccgatcgagaccccggaaggtccgaatatcggtttgatttcttcactttgtgtatatgcaaaaatcaacgatttaggatttatcgaaactccttaccggaaggtggaggccggagtggtggatctgtcaccggaaggggtgaaatatttatcggcagaggaagaagaaggactggtaatcgctcaggcgaatgcgaagatcgacgacgaaggtcactttgtgaacaaacgggctaaatcccgtaaagacggagacttcccggttgaagagatcgagaatgtcaatctgatggacgttgcacctaatcagattgcttctatcgccgcttctttgattccgttcctggaacatgacgatgccaaccgtgccttgatggggtctaacatgatgcgtcaggctgtgcctatcatcaagccgcaggctccgattgtaggaaccggtttggaaggtgctttggtgcgggattcccggacacagatcgtagcagaaggacctggtgttgtcgatttcgtggatggacgccggatcgtgatcaaatacgaccagaccgaagaagaacgttttgtaagctttgacggggatacgaaagagtatgtcctgccgaaatataaacgtaccaaccagagtacgaccatgactttacgtccgatagtccgtaaaggacagcgcgtagaggaaggggaaatcctgaccgaaggatattcttcggaaggaggtgaactggcactcggacgtaacctgaaagtggcttatatgccctggaaagggtataactatgaggatgctatcgtgatctctgaaaatatcgttcgtaacgatgtatttacttctgtacatgtggatgaatattcactggaagtgcgcgaaacgaaacgaggtttggaagagttgaccgccgatatccccaatgtcagtgaagatgctacgaaggatctggatgaaaacggtattatccgcatcggagcccgtgtgaaaccgggagatatcctgatcggtaagattaccccgaaaggagaatccgatccgagtccggaagaaaaattgctgcgtgcgatcttcggtgataaagccggtgatgtgaaagatgcttctctgaaagcttctccttcactgagcggtgtcattatcgataaaaaattgttccagcggatgatcggcgaccggaaatcgaaagctgcaggtaagacgatcctggctgaaatcgacgaacaattcgaacggaaagtaggcgatttaaccgatttgctgatcgacaaattgttcgaactgaccaatgggaagacttctcagggagtgaagaattacctgaacgaagatgttattccgaaaggcgtgaagtttacgctgaaaaccttgcaaaatctgaattatctggaaatcaatccgaacaagtggacgacagataaacagaagaacgatatgatccgtgatttgctgcacaactttgtgatcaaatacaaggagatcgaaggacagatgaagcgtaaaaaatataatgctactgtcggagacgaacttccttccggcatcatcaaaatggctaaagtttacgtagcgaaaaaacgtaaattgcagatcggtgataagatggcaggacgtcacggtaataaaggtatcgtatcccgcgttgtaagggttgaagatatgccgttcctggccgacggtactccggtggatatttgtttgaatccgttgggtgtaccttcccgtatgaacctgggacagattttcgaagctgtattgggctgggccggtaaagaattgggattgaaattcgccactccgattttcgacggtgcaagcctggacgatatcaatgcctataccgataaagccggtgtgcctcgttacggtacaacctacctgtatgacggtggtaccggtgaacgtttcgaccagccggcgacagtaggagtgacctacttcctgaaactggggcacatggtagatgataaaatgcatgcccgttcgatcggaccgtactcgttgattacgcaacagcctttgggtggtaaagctcaattcggtgggcagcgtttcggtgagatggaggtttgggctctggaagctttcggagctgctcatatcctgcaggaaatcctgaccgtgaagtctgacgatgtaatgggccgtaccaaaacttacgagcatatcgtaaaaggagagcctatgcctaccccgggtctgcccgaatcattcaacgtattgttgcatgagctgagaggactgggattaagcgtgaacttgatataatgtaaaaagctataagctaaaagctataggtaataagcctttagcctttagcttttagcctttaacttcaaaaattatggcttttagaaaagataataataccaacaagcccaagagctttacaaaaattgctatcggactggcctctcctgaggaaattctggaacattccagcggacaggtgttgaagcccgagaccatcaactaccgtacttataagcctgaacgtgacggtctgttctgtgagcggattttcggtccggtaaaggattacgagtgccattgcggtaaatacaaacgcatccgttataaaggtatcgtttgtgaccgttgtggtgtggaagtgacggagaaaaaagtacgccgtgaacggatggggcatatccagctggtcgttccggtggctcatatctggtatttcaaatccctccccaacaagatcggatatctgttaggattaccttccaagaaattggatgctgtcatttactacgaacgttatatcgtggtacaaccgggtattatgtctgaaaaaggaatcgctgagctggatatgctcacggaagaggaatacctggacatcgtagatgctctgcctgccgacaatcagcatctggacgatgacgatccgaataaatttatcgctaagatgggtgccgaggcgattcagatgttgttggaacgtctgaatttggacgatctgtcttacgaattacgtcataaagccaataccgagacttctcagcaacgtaaaaacgaagcgctgaaacgtctgcaagtggtagaagctttccgtgaaagcaaagaggtgaataaacccgaatggatgatcgtgaaggtgctggctgtaattccaccggaattgcgtccgttggtaccgttggacggaggacgtttcgctacttccgacctgaacgatttgtaccgtcgggtcattatccggaataaccgtctgaaacggttgatcgaaattaaggcgccggatgtgatcctgcgtaatgaaaaacgaatgttgcaggaagctgtcgattcattgttcgacaattcacgtaaatccaatgccgttaagatcgagaataaccgaccgttgaaatcactctccgacagtttgaaaggtaaacaaggacgtttccgtcagaacttgctcggtaaacgtgtcgactattcggcccgttcggttattgtggtgggtccggacctgaaaatgcacgaatgtggtttgccgaaagatatggcagccgaattatatatgccgtttatcatccggaagttgatcgaacggggtatcgtgaagaccgtgaagagtgccaagaaaatcgtagaccgtcgtgatccggtggtttgggatattctggaaaacgtattgaaaggtcatccggtattgttgaaccgtgctccgacccttcaccgtttgggtattcaggcctttcagccgaaattgatcgaaggaaaggctatccgtttgcacccgctggcttgtaccggattcaatgccgacttcgacggtgaccagatggccgttcacttgccgctgggtaatgaagctgttctggaagctcagatcctgatgctttgtgcacataacattctgaaccctgctaatggggcaccgattacagtgccttcgcaggatatggtgctcggcttgtattatatcaccaaaccgcgtaagggagctaaaggagaaggattgaaattctattcacccgaggaggtgatcatcgccctgaatgaaaaggcggtagatttgcatgctcagatacaggtgaagatcaaggatgtcgatcatgctggaaatgaatatgtccatatgatcgaaacgactgtgggacgtgttattctgaaccagtttacaccgaagaatttcccgtacatcaatacactgattacaaagaaatcattgcgtgacatcattagtgatgtgttcaaacgttgcggggttgatgtgactgccaaattcctggacgatatcaaggacctgggataccgtatggcattcgaaggcggattgtcgttcaatctggccgacgttatcgtaccggaagaaaaggatgccctgttacaggaaggatatgaccaggtagaagaggtcatgaacaactataacatgggtttcatcacgaacaacgaacgttacaatcagatcatcgatatctggacgcatgtgaacgccaagctgaccaatacgttgatgaaacaattggccgaagacgatcagggattcaactctatttatatgatgcttgactccggggcccgtggttcccgtgaacagatccgtcagttgggcggtatgcgtggattgatggcgaaaccgcagaaatcgggtgctaccggtggtcagattatcgagaatccgattttggcgaatttcaaagagggattgtccgtgttggagtactttatctctactcacggtgcccgtaaaggtttggccgatacggctctgaaaacggcagatgccggttacctgacccgtcgtttggtggatgttgccaacgatattacaatcacagaagaggattgtggtacgttgagaggggttactatcgctgctatcaaaaataacgaagaagtagtcgcttcgttgtatgaaagaatcctgggacgtgtgtctgtacacgatatttaccatcctcacaccggtgagttattggtgaaatcaggagatgaaatcactgaagagattgccgaagccattgagaaatcaccgatcgaacgtgtagaagtacgttctgtactgacttgcgaagcgaagaaaggggtatgttcgaaatgctacggacgtaacctggctaccggtaagctggtacagatgggtgaagctgtcggtaccattgctgcacagtctatcggtgaaccgggtacacagctgaccttgcgtacattccacgtgggtggtacggcaggtaacatctcgaccgagaactctctgaaagcgaaatatgacggtatcatagaattcgaggaattgcgttcagtagaatatacacaggacaacggtcagaaatgtgatgtcgttgtcggccgtttgactgaattgcggattatcgataagaataccaacattatcctgattacgcataatattccttacggtgcgaaactgtttgtgaaagacggtcaggaaattaagaagaatgatctgctttgcgaatgggacccgttcaatgcattgatcattactgaattcagtggtaagatcggttctgaaaatctgatcgaaggagagacttacaaagaagaatcggatgaaacgaccggtttccgtgaaaaagtaatcaccgagttccgtgataagaccaaagcacctgctttgaccattgaagacaaaaacgggaatatcgtcaagagttataacttgccggtaggggctcatatcgtagtgaaagaaggagacgaagtaacggccggtagtacgatcgtgaagatcccgagagctgtcggtaaggcaggcgatatcacgggaggtcttcctcgtgtaaccgaattgttcgaggctcgtaacccgtcgaatccggcagtcgtttctgaaatcgacggagaggtgacttacggtaagatcaaacggggtaaccgcgaaattatcgtaacttctaaagccggcgaggtgaagaaatacctggtttctctgtcaaaacagatcctggtacaggaaaatgactatgtacgtgccggtacgccgttgtccgacggagcgatcactccgaccgatattctgaatattcagggaccgattgccgttcaggaatatattgtgaatgaagttcaggatgtataccggatgcagggtgtgaagatcaacgataaacatttcgagatcattgtacaccagatgatgcgtaaggtattgattcaggattccggagatacccgcttcctggagaatcagatcgtggataagagcgagtttatggaggaaaatgacgagatgttcggtaagaaggtggtgatggaacccggagactccgatcgcgtgaaagccggccagattatttctgcccgtacactccgtgatatcaattctcagttgaaacgccgggatttaagagttgtcgaagcccgcgatgctgtacctgcaacttcggctcaggtattgcaaggaatcacccgcgctgctttgcagacttccagctttatctctgccgcttctttccaggaaacgacaaaagtattgaacgaagctgccatctacggtaaggtggatccgttggaaggcttgaaagaaaacgtgatctgcggtcacttgattccggtgggtaccggtatgaaagaactccggggattggtcgttggatcgaaagaggaaatggagaaaatgcagggtaacaagtaactggagtaagagcaaaacgatcggttgcttttgtaatataatccgatgcggtatcaaatttatttgaatactgcatcggattttgtttgatttctgtgaagcgaatgttgattcattgatagttgattattggggaaaatatcgtttggggatagtgtttcaaaaagtgtgtgtgtgttatttttgagtatgatgtttttactggctccggcaggtaaggtacagcgtaagatttaggatgagacggaacaggaaaagcaggaacggatggtttggtggacacgcgaccgtttcggtaggtttatccattgaggattgtacaccttgcctgccagatatgggtgggtgatgcgctatgagaagattctggtggaagattctgaaaagtatttcgacttgttcgatccggatttgtataatccgcgtgagtgggcaaagatggcgaaggctgcgggtatgaagtatgcggtgatcaccaccaagcaccacgaaggtttttgtctgttcaaaactgattatacggactatcaggccctgaaccctcccttgtgccgcaaggatttgatcagggagtgggtggagactttccgggcggaaggactgaaggtggggttttattacagtctgccggattggcaccatccggactttgagattgaccggattcatccgcaggtacctaaagatccgatcggaattgcggttcggtaaggccaatgcaagtgtgacccacaaggatgaactggacgaaaaggatattcttttggtgttaccggatgtcgggcccgatgttgaaattccggtgatagagctgatattgaattgataaaaagactttctgtcccgattccgggacagaaagaaaaaatgcctgcagttattcaagcctgtcctttcggttccagatcgataggaaatcctgtcggttgctggttttccgaagcaaggcgtatcgtaccgttatcctgttcatatttccagatattgtcctgtaaagccaacatcaggcgtttggcattttcgggagtcagaataatccggctttttacttccggtttcgttactccgggcatcaaacggataaagtcgataataaactctgaagttgaatgtgctatgatcgtcagatttgcataagtgccttgggccacctcgtggctcagatcgatttccagttgggtctgtttttgttcgtccattgtttattaaattgataatcagagtgctttgatttgtgatatttctatctgaacaaatatatactattttatataatgaacgtaaaattttttccggattctgatttgaaaaagtgaaataaaggcaagatggtaattaccggccgattttgtgttatctttgccggagcattacgaatagagcgtgatgtaagtgattgttgtaaataataaaaaacagagaaaaatgactgcgaattggtttgaagcgaaggtgaagtacatgaaggtgcacgaggatgggcgtgaaaaaaaagtaaatgaagcttacctgttggatgcgatgtcgtatacggaagcagagagcaggattatgcatgagatggaatcggtgatttcgggagattattatatcagtagtctgaaaaaatcgaatattacggaactggttccttcggaagatgaaaatgacgaccgttggtataaggcgaaggtaaatatcatcgatgccgatgaagtgagcggaaaagaaaaatccaccggtcagtattatctggtggcagcctcgaata

SEQ ID NO: 5887 - DNA, 4348 bp, Unknown
  gut microbiota DNA sequence
cggtgatttgttcctccgtagtctgacaattaagatggaaagaacatataaaaaagcataaaaagtttctgatttttctcataaataaattagatttcatatctttgcgcaaaattagaaacaatgacagaactattgagtatattatataagctgcggatattcacttcggatgaactttctgaggctctgaaagacaaggtgaaggcggtggaagcgttgcttgctcggtacaagcaacaagggtggattgtggctatacggcgcaatacctattgcatgaaggatattgcatctggcttacctgtttgcgacaagtatgagataggaagccacttgtcacatacagcttgcatcagttatcacacagcattggaatttcatggattggctcatcaaccctttaatgaggtttttgtgaaaagcatgactcgcttcaattccttttctttcgacgatgtggattatacctattgccgacaaacaaaggaaatcgttggtatgatgacacccaagggaaacccttatgtgcgagtaacggatgtggagagtacgttgttggattgctttaaccgcatcgaccgagctggtggtattgaggaattactgcattgcatggagggtatcgtcttgctcaatgaggaaaggctcatcgattatctcgcaaggtacgacaaggcattcctgtaccagaagacaggctatctgttggagcgaatcaaggaacaagccaacatctcagaatccctcctggagctgtgccgagccaagggaaccaaaagcgtcaagtggttgactaacaacgaagagtcggatacatttgtaaataaatggcgcatgtatgtgccgcaagaactaacatcaaaggaagaatatgaactcatataacaaacaagctcttgacatcatcgccaaggagcaaggctttattcgcgacaacctcgaaaaggtgatgcgattggtggagatactcaactatttccatgacagtcctttgctgtctaaatctcttgtgctgaaaggtggcacagccatcaatctcaccgttttccaactgccaagactctcggtagatatagaccttgactttacggtggattgcaaccgagaatccatgctctccattcgccaagaagtaaataacgagattctacgctatatggagtcggatggttatcatcttgcgcctggctccaagacaccgcatacgcttgactcatgggtgttccattataccaatgccgcaggcaacaacgatggcatcaagatagaaatcaactattccgaccgttgccatatcctgcctgccatagagactcatgtgtccattccgtttctgagcgatgtgaaggtacgttctctttcacctgtcgaattgtttgccaccaagataaacgccttgataggtagaagtgctgcacgtgacatttatgatgtctataacatggtgaagcatcagctattcgtgagcgatgaagagaaaacgttgctgagaaaagcgaccgtcttttatctgactgttggctcaagcagaaaagacaacgctacgcctacggaatatactgactttccgcagatagacaagatccgttttccgcagattcgttcgcaactcttgcctgtgcttaggcgcaatgagcattttgactttgaaaaagccaagacagaagtgaaagactttctctcaaagctattggttctgacagaatcagagaaagaatatgtacgggaattcaatgacaagaagtatattccagaattgctgttcgaggataaagagatggtcaatagaatcaaatttcatccaatggctttgtggaagacaaggagtcgttgaatgttttttctgtaaattttgaaaaaagttgttgttttgcttagttttttgattccctcaactgtatatataatatggactataaaaacagagaataggctatgagtaaatatctgataagtttgattttgctttcggtgataagtatgggcgtttctgcccaacgcattacccgacaatataataatgtgtcattctctgcggcattgaaggatttgaatgctcgacaggataagtatgtcatcaactttgtgtatgacgagttggaggatttcaaggtgacaaagaacataaaaaatgaaagtgttccagatgccatcatgaacttgataggcttttatcctatcaagatgaaacaagtggataatgttattatcgttgaatgtatccaaaagacttctaacagaatgatggggcgcattgtagacactcaccatcaaccagtcgatttcgccaatgtcgctttgctcaatgttagtgattccagtttaatcacgggtggtgtaacaaatgagaatggtcagttcgtaattccttgcgaggtgaaaaaggcgattgtgaaagtgagttgtatgggctacaaaacttattgtaatgcatatcgtaccggtgaggttggtgccataaccttggaggatgcaacaattaatctgcaaaaagttgtgattaaagggcatcgcaaatacatatcaagagaaaacggtaaacttacgcttgacgttcaaaattccaatttgaaaaatattggcaaggcaacagatgttatcaaatatattcctgggatgctctatacaaatggaaagtatgaggtgtttggtaagggtgagcctgtcatctatatagatggaagaaagcagactaatacttcagggttgtcactcctttcttctaccaacgtgaagtctgtacagctcataacaaaccctggggcagaatacgatgcagaaacaaggagtgtcataaacatcactaccgtacaccattccttggatggactttctggtattgtgggtgcggaaatatccaaacataagaatttgtctaacaacgaggaggttaacctcaacatccacaagggagctttggatgtattcctcgcatatcaatatgacaatacgagaagtgacatcagatatgatgttaaccagttcaattacgagcaagatacatttcatgagatttctgcttctgaatattccgaccgctctcactctcatgactataatgttggtatgaattatgccataaacaagaatcacactatcggcggaagatatttgggaagcatctccaactacaagatgctcgactctcctttcgactatatgcagacgtacaagaatgatgaactgctgacatctacagacaacaagactgaagaatctgaaaaggaaaggtttcacaatgtcaatctgtattatatcggcaaactaacagacaacctacagctcaacttggatgccgactatgtttatgctcaactgaaacataagcaacaagtgagcgagacaagtagaatagatgctgtctcagaaatcacgcatatgcaaaacgaccagcgaaatcgtgcgactgcactcaaaggggtatttgcttggaacatgaataagaataataggcttgatttcggaacggatttcagtaaaatcagttcatggggtatgtctgtaaacgaagaagggaagatagccgatgaccaattcaagaataaggaaaccaagtatgcaggatttgccacctttagtttgtctgcctccaaatggaaaggaagcatcgggcttcgctatgagtacattcatgccatcaacacagaccaaggagaagtaaagaacaagaccaattattcggacttacttccatccctttctctttccactatgtttgggagagtggggatgaatcttgatttcagtagcagggtcaaccgtccttcgtttcgtcagttgaacaacagtgtgagctacaacaatcaataccattatgagcaaggcaacatttatctgaaaccgcaatacgtgtatgatacagaacttagtgtgaattatagcatattcgacttcaagttggattatcagtatatcaaggattacatccatccgactgtcgttgctgtatccggcaaacctggaacggtaacttggatgtcaaccaacgccaaggatttccagcaactaggagcgcaatgtgttgtttcacctgtttttggttgttggcgacctactttgacggtgggtgtttataaaccttatttcacgctatcatataatggagagcaattagactacaatcatccatacggtctcttcgctttccaaaatgtagtggcactaaggaacgattggctttttcgatgtgatttcttttggaacattaagggacatcatggcatctacgagcaaaacggttattcgtcattcaatatgatggtacagaaacagttacttagggatattcagtaaatagtataaaattagccaactaattcatacacaaaatgttgcgaattagttg

SEQ ID NO: 5888 - DNA, 1785 bp, Unknown
  gut microbiota DNA sequence
ctttcctgcccgtgttggctgccgcggtgaagaccgtttggcggaagaggtcttttgtcatgacctgcgaacaggaaaaggtgaagattaacccaccgggttttacaacctcgattcccttacggttcagttttttgtatccttgaatggcattgtctagcacgttctggtgtttggcaaatgcgggaggatcaaggatgatcaagtcatatttgttgtgtgatttatcaaggaatttgaaagcgtcttccacgaatgcctcatgacgagtgtcgccggggaagtttagttccacattttggttggttaattcgatagctctggctgaggcatccactgaatgcacgagttttgccccacctcgcatggcgtagaatgagaaccctcccgtgtaacagaacatgttgagaacgtttttgtcgtgggcgtattgttctaataagcgtcggttttcccgttgatcgacaaagaatccggtcttttgaccttccagccagtccacgttgaattttaacccgttttcgatggccgtgaagttgtcggtgtgaccgtacaagtagtcattcttggggttaagtccagccttaaaaggaagggttccttccgacttgtcgtatatggcaatgagtttatcccccatgacttccaacagggctttcgtgatctcttcccgaactttatgcattcccacggaatggaattgcacgacggcaacacccgcataatagtcaatgacaagtccagaaagatcgtcaccttccccatgaacgagtcggtagacgttgttgttcgggttggtcgccaaaccgatagccacacgtgtcagataggcctgtcggatgcgttcaacccagaagttatagtcaatttcctcttccttgaatgtgagtacacgcacggcgatactcccgatctggtagtggcccgtggcgagatattcgtcgtcactgttatacacttgaacgacgtcaccttcctgtacgtcccccttgattttggctattgctcccgagaagacccacgggtgcagtctgtataaagatctttctttaccggcttttagaactattttgctcataattattcgtgtcgcaatgcaacgttactggttacaggttgacaagttacaagtttgtctgtgacttgacggggcaaaagtagataaaaaagcgataaaaaaataccgggaacgctattttgctgtttcccggtgttaaaatctttttgctacacgttcaagagttccctggctttgtccaagatggccgtgtcatccaaaacgacaagtccgccgtcagggccttgttcaacatgtatacctgcgcttgatcccccgttgtcataattgtcggctccgaagtagttacgtacggtgtctgtactgatacccaagtcttctgcaattctctgcatgcttccgtggggtagcatgtctttgatttttctcagctcgttaaaagtaatagtataagtcataacgtagtaattttagaggttttatgtgcaataaatttagaaatatattttgacaaaagcaaatagaatgtttatcattcttatttttgttataaaagtatttctatgtattgtattgattgttaggtgtttgatttgggtatttagatgcaatttattttataaataaatttatttcgtgcaagccactactttttgtacctttgtaaccgtatagtttaaaaacgtaacacgtatgggatttcaggatttaaatgtaagtaagcaaattttgatggcgttggaagaggctggtttcgagaacccgac

SEQ ID NO: 5889 - DNA, 33314 bp, Unknown
  gut microbiota DNA sequence
aattatctataaaataaaagtatatcggtttccggggctgtttggagaataccattcattctataacagccccgtttgtttatccaagtccaaatccaaatttttcgttaaacttctgcaaccgatttcgctttacagttaaaatcactacttttaacaccgttttataccgaggtcgttcgatttcgggtgatttcaaatgagggtggatataaatttaacatcaattatagcaaaacatgaacctgatcaaaattatctgtacagggtttctagcccttgttttttccgggctgtcagctcaggaaaatccgctatggatgcgttatccggcgatttctcccgacggaaaaaccatcgcattctgttacaaaggagacatctttctggtaagcagtgaaggtggtagagctacccagctgaccacccatccggcttatgacagccggcctgtttggtcaccggacggaaaaaccatcgctttcacttctgcccgggacgaaggattgaacctatataccgttccggtaagcggcggcacccctacccgcctgacctattattcaggcagcgaaatccccgtatgtttcactcccgacggtaaagaaatcctctatcgttccaatgtcatgcccgatgcagaatacggccagttccccagtggagggcaggtgtacaagatcagtgtcgatggaggacggccggaacagtttctgacgttcgacgccttcgacatcaatttcaacaaaaaaggcgataaaatcatttatcacgattataaaggatatgaagacaactggcggaaacaccacaaatcttccgtatgccgggatatctggattcacgacttgaaaagcggggaatttaccaacctgacgaacaaacaggtggaagaccgcaacccggtattcgccgataacgacgaaaacatctatttcctgagtgaacgtttcggggatttcaatgtatgcaaaatgtccctgaaaaatccttcggacatcaaacaaatcaccaaacacagcaaacatccggtccgcttcctgagcagctctgaagacggcttgttgtgttactttttcaacggagagatctacaccctgcaacccggaaaacaaccgaaaaaattagcggttgatatcatcgccgacaataccgaatcccctattgctaaaatgaattggaaccggggagcttccgagatggctctgtcacccgacggcaaagaattcgctttcattgttcgcggagatgtatatgtagctaacgccgaatacggtacgacgaaaagaatcaccaatacggccactcaggaacgttcagtcgaattttcaccggacggccgttctttggtatatgccggtgaacggaacggtcactggaatatctatgtcgcccggatcaaagacaaagacgataaatctttcgcttatgccaaagaaatcgaagaagagcagatcaccaagggtactaatgcttgtttccaaccctctttctctccggatggtaaagaaatcgcttacctcgaaaaccggaccgaaatcaaggtaatcaatctgaaaagcaaaaaatcgagaacggtacttccggctaaatacaactattcctatcaagacggcgaccaatggtatcaatggtctcccgacggtcggtggatcctggctaaatatttcgaacacggcggctggcagcataacgatatcgctcttgtaaaagccgacggcagcggagaaatccacaacctgaccaacagtggatatagcgatcagaatcccaaatggatgatgaacggaaaagccatcatttggtcgaccgaccgtcaaggtatgcgtagccacggtagttggggagctcaatacgacatctatgccttattcctggatccggaagcctgggatgaattcagaatgaacaaagaagaactggctcttcataaagaaataaaagagttacagaaaaggaaagaagccgaagaaaaagccaaagctgaaaagaaacaggaaaagaaaggtgacaaagcagataaagccgggaaaaaaggtaaaaaagaagagggagataaaaaagacgaaggagaaaaagaaggtaaaaaagcgaaagcagaagaaaacaagctccccgaactcaaaatcgactttgaaaacctggaagaccggatggtacgcctgaccatccattcttcccgtctgggcgacgccgtactgaccaacgacgcttcaaaactatattacctgagcgcttttgaaggcggttacgacctttgggtcagagacttcaaaaacggaagtacccgtatgttatccaaactgaacaaaggaggcggtgctctcgttatgagtaaagacggcagaaacctgtacctgctttccggcggacaaatctctaaagtggatatgaattccggccagttgaaaggtatgagctacaatgccgagttcgaatggaagaaacccgaagaacgggcttacctgttcgatcacgtctggcagcaagtagtagataaattctacgatcctactattcacaatatcgattgggctttctataaaaaagaatatgcccgcttcctgccttatatcaacaacaattacgactttgccgaaatgttggccgaattactgggcgaactgaatgcttcccataccggtgccagctacaaaggaggcggcagttcttcacagacggcagccctgggtgttttttacgacgagacattcgacggcgatggcctgaagatcaaggaaatcctggagaaaggtccgctggatctaaccagtggtaaaatcaaacccggtatgattatccggaaaatcaacaatcaggaaatcaaaaaaggacaggattatttccagatactggaagacctgagcggtaaacgggtaatgctgacaatctacgatccttctaccaaaaaggaatgggaggaatatgtgaaaccgaccacttacggcaaccaaaacggtttactatataaccgctgggtaaaacaacgccaggaaatggttgaaaaactatccaatgggaaaatcggttacgtacatgtgaagagcatggatagtcccagtttccgtaaagtatattctgaaatactgggcaaataccggaacaaagaagcgataatcgtcgacacccgttacaacggcggaggctggctacatgaagacctgttacacctgctgagcggtaagaaatacgccgaattcgttccacgtggccaattcatcggtgaagatccgttcactcaatggaacaaaccgtcggccgtattagtcagcgaaagcaactacagtaacgctcacggattcccctgggcctacaaagaactgggactcggtaaagtaatcggtatgcctgtaccgggaacgatgaccgccgtatggtgggaaactctgatggatccgagcctggtattcggtattcctcaggtaggaatgaaagacaaccaaggccgcatcctggagaatatgcagctcgaaccggacatcaaagtgaccaacgacccggccagcgccatgaaaggccgtgatctgcaactggaagcagctgtagaaagcctgatgaaggaaataaaataatcaggtgccaaccgataaaacggtaacaagggtaatagcaataatgctttccgttgttaccgttttttctgttttatcggtattaaaacaaaaacaccccggctttttcgcattcggtcaatacctcatcgggccataagccggcttgtacctctccgatatgacatttctgcaataagagcatacagagccgggattgtccgattcctccccccattgtttggggtaatttcccttccaacaaaagagagtggaaatacaattttttccggtcccctgcatttttcagccacaattgtttttccaaggcagcccgatccacccggatccccatcgaagaaatctcgaaagcagactgtaatacagggttccatacaatgatatctccgttcaaacctaccgaaccgtcttccgcctcagtggaccagtcgtcataatccggtgaacggtcgtcgtgaatcgttccatcccccaaagctcctccgatcccccggataaaaaccgccccgaactggcaggctattcgttcttccctttccttgggggacaaaccgggatattgctttctcaactcttcggcatgtataaaatgaatccgatcgggtaaaaagggttgtaataccgggaattgttcactcaataaaaattcggtacgtttcaaggccgcataaattctctcgacacaaagctgtaaccgctccggcgtgcgttcttccggggtaatcaccttctcccaatcccactgatcgacatacaccgaatgaatattatcgatcgtctcatccggacgtaaagcgttcatatcggtataaattcccatacccggctgaatatgatgccgccaaagagcataacgtttccatttggccagcgattgtacgatctcggctcgttgtcctcctaatacacgggctccgaaactcaccggctgttcagtaccgctcaggttatcgttcaagcccttccccgaaggaacgacaataggtgctgtaatccggcgcaacttcaattccgcagccagcgccaattgaaaggtgtccttgataaatttaatggcatgctctgtctgccatacatccaagaccgaagtgtagtcttccggtaaaaataattgcttcataagggtaaaaatttaagtttataaccgacaaaaaagcctccccgcatcgggaaggctcatccatatatctgatctgttccgtttttaaccataacctcccctttgcaaccgctctgcattgcaattattattcaggttgatattagaattaaaaaggaccatggctcgtattcattcatgacaaatataaagtaaaaatcgaaaaataaaaatgccgattgaaaatttaacaaaatacagatttggaaaatgacactactgtttcaaattccgataatttagcttatctttaccgaatctaaatagcacagataacttgatttacatattttattcaacacaatgattaccaaatattttcgtttattcctttttttctttctgatcgggaacctcctgatttcctgtaaaaataaatccatttctacccggctggtgagcgtcagtattcttcctcaaaaatacctgacagaacaaatcgccggtgattacctgacggtgaatgtcatgatacctccgggtatgaatccggctacctgtgatctaagtacggaacaactgaagaaattatacgatagcgacctttgtttcaccatcggttatttacctttcgaacaaatccatctatttcctgttctcgaaaaccgcccggatatccaaatcgtaaatcactccgccaacctgcaactgattcacggaagctgtgggcatacgcatgccgcaggtgacgaacacgacggagcagatcctcatatctggctttctccggcacatgcccgcactatggctactaccgtctatgaagtactatcggaaaaatatccggaacaaaaactacagttcgaacaaaattaccaggcccttctccagaagatcgacagcattgccgatcgtgccaaacaagtactggatcataaaaaagacaaaatatttctgatctatcatccggctttgacttattttgctgccgattacgggatggaacaaatctcgatcgaagacgaagggaaagaacccaatccggcccatttgaaaaaaatcatcgatctggccctggaaaaaaatatccatatgatctttatccaaagtcaattcgatgtcaataatgccgaatccgtagccaaacaaatcggaggccaaatcattcagatcgacccgctgaccgaaaactggacagctgaaatgaaccgattgatcgataccctggataaatatttgcctgaaaaataacatgacccccatactcgaactcaaaaatgtaagcgccggatatgaccatgaagtcattcttcatcaagtcaatctgaaaatttatgagcatgactttcttggcatcatcggtcccaacgggggcggaaaaaccaccctgctcaaagtgatactggggttactgaagccttatagcggagaggtcatttaccccgtctccagacaaaatctcttcggctatctgccgcagaacagccgtttcgaccagcgttttcccatcgatgtcaccgaagtagtcctctccggcctgatgtccgaaaagggactttacaaatcctatacccgagccgaaaaacaaaaagcctgggatttactcgatcaatacggtatgggagcatataagaaagcaccgatcggcgatttatcgggcggacagatgcaacgggtattcctttgcagggcggtcattgcgtctccccgcatcctgatcctcgacgaaccgacgacttatgtagacagtaatttcgaaaaggaattttacaccatcctggaagaactcaataaatcgctgagcatagtcatggtatctcacgatctgggaactatctgttcctatgtgaagactatcgcttgtgtcaaccgggaattgcattatcataattctaacctgatcagtgcagaacagttgcaatcgtaccactgtcccatcgagttgatcactcacggaaaaattccgcaccgggtgctgaaggaacacgaaaaaggtaaacagtagcaggcggtgaagctactaaaagctataggcaaagagacgaaaaggggaaagacgaaaaaggagacttgaggaaaaaaggaagaagaaataatgaataaaaagaatcgaagatgctggaacttttaaaatatgatttttttcagaatgcgttgatcagtacgttgttgatcggtatcagctgtggattggtaggtacctacatcgttgccaaacgaatggtattcatcagcggcggaatcacccatgcttctttcggcggcttaggactctcatattacctcggattatctcccatgttaggtgctacagccttctcgattttatctgccctgggaattctgttcctttccgacagtaaaaagctcaaggaagattccctgatcggcatcttttggtcggcaggtatggcgatcggtatcctgtttatttacctcactccagggtatgcccccaatctgatgtcgtatctcttcgggaatatcctgaccgttacccgggaacagattatcctttccgtggttctatgtctgggtatcatcctttttttcgcccgtttctaccgtccgttattctacatcgctttcgataaagaatacagccgtactcaccatgtgcatgtcaaccggatagacatcgccatcacactgatcatcgccctttgtatcgtgctgtccctgaaattagccggaatcattctggtcatttcctatctgactattcctcaggctatcgccggcatcttttacaaaaacttcaaacagcaactattggcttccgccctggtcagtaccgccggttcgattaccggactattcctttctgcctttctgaatattcccaccggtgccaccatcgtaatctgttttcttctctttttcctgatcagctggctgataaacaaaatcagataacaaaaaataaccatccgttcaattgtaaaattaaattagtttataaagttcccggatcctgcgggtgctttttttatgaacttttaagcaacgaaggagcaactttaagaactttacgaactaattatacctacttttttaaattattcgcccttttttccagtttccttgaaaaaatttctaccaaatcggataaagcgctgttttatccctgatcttttattagttttgtggcagcaaagaaaatttaaaacgtttgaaatatgaattacgatttaatcgtcatcgggagtggccccggggggtatgtggctgccattcgtggtgctcaattgggttttaatgtcgctgtagtggaacgtgccgaacaaggaggaatctgcctgaactggggatgtatcccaaccaaatctttattaaaatcggctcaggtactcgaatatgcacaacatgcagaggcctacggaatccagatcgaacatgcagagcccgattttcaggcaatcatcgcccgtagccggggagttgccgacaaaatgagcaaaggcatccagtatcttttcaaaaaaaataacattaccgtaattcccggacatgggaaactgacggcagataaaaaagtagcggttacttcagccgccggggaacaaacgatatacgaagcgaaacatattatcctggctaccggtgcacgttcacgggtattgccggccattcctcaggatgggaaaaggattatcggttaccgtgaagcgctgaccctcgatcatcgaccggcttcactgctggtagtcggctccggagctatcggttcggaactggcctggttctataatgcgatggggactaaagtgaccctggtggaatttatgcctacgatcctgcctgtcgaagacgaagaagtatctaaacaggtgggacgctcgttcaagaaagccggtatcgaagtattggtaaaatctaccgtcgagagtatcgataccagtggtgaattattgaaaatcaatatccggaataagaaagatcaaatcgagacctacgaagctgaaatggtattgtcggctgtcggtatcgctcccaatgttgaaaacatcgggttggaagaactgggtatcgaaatggaaagaggtaaaattaaagtagacggctactaccgtaccaatgtcgaaggcgtgtatgccatcggagatatcgtacacggtccggctctggcccatgttgcttcggcagaggccatttgttgtgtagaaaaattagccggcctgactcccgaaccgatcgattatggcaacattccgggttgtacctatacttcgcccgaagtagcctctgtcggcctgagtgaagcgaaagccgccgaagccggttacgaactgaaaatcggtaaatttccttttaccgcttcagggaaagctagtgcagccggagctaacgatggatttataaagctgatcttcaatgccaaggaccatacactgctcggtgcacatctggtcggtgccaacgtcactgaaatgattgccgaactggttttagcccggaagaaaggggttaccgcacacgatatcatcaaaaccgttcacccgcacccgacgatgagtgaagccgtaatggaggctgcagcagctgcctatgacgaagtaatccatctgtaattttttaattcaaataccgatacaatgaagaaaaccttaatcacaacgaccctctttctggcctgcttcggagttttcgcacaagcgctctccgaaaaagacctgcaggaaatccagagtagtttcaaaaaggatgcttctacgaaagccattcagaacatactgactgccgacaaagacatcaaaggcaatgccctgaaccgtgatctgcaaggtaaaatcgaccattatttcaaataccgggcagatgtgaaaggcattaccaatcagctcagttccggacggtgctggatgtttacctcaatgaacgtattacgcccgtcgatcatgaaaaaatacaacctcagccaattcgatttttcacacaactacctgtatttctgggatatcttcgaaaagtcgaatcttttcctcgaaaacatcatcgcaaccgccaagcaaccgatggacgaccggacagtagtggaatatttcaaagctcctgtaggagacggcggagtatggaacctttattacaatgctgccgagaaatacggagtagtgcctcaggaagtgatgcccgaaaccgctcattccaacaatacttcccagatggtgagcatcatcaatgaaagactgcgccaaggtggttatgaactgcgcgaaatgactgctgccggcaaaaaagggaaggaacttacaaacgctaaaatggctacgctgaaagaagtataccggattctggccctctgcctgggtgagcctcctcatcagtttacgtggagatataaggataaagacgggaatatcaaagagctggccaattacacgccgaaacagttctacaaagaaatcaccccggccgactacagtccttccaactatatcatgatcatgaacgatccgacccgggaatattacaaaacatacgaaattcagaattaccggaataccatcgagggaatcaactggatttatctcaatctgcccaacgaagatatcaaagaggccgccctggcttccattaaaaacaacgagccgatgtatgcctcctgcgatgtagggaaacagttcaaccgggaagaaggtatcctcgatcccgaaatgtacgattatgaatccctgttaggcgtgaaactggatatggataaaaaagcccgtatcctcacccgtcagagcggttcttcccacgccatgactctggtggcctgcgacaccgacgaaaacgacaaacccgtaaaatgggagttcgaaaacagctggggagcagcttccggccacaacggctacctgacattcaccgacaaatggttcgatgaatacatgttccgtatcgtgatccgcaaaaactacctcaacgcaaaagccatcgaagccctgaaaggcaaaccggtacagttgcctgtttacgactatatgtattaaacgaaaacaataaatgatgaacgaaaaagccttttcgttcatcatttattgtatcaattccgagtgtgaccagtggccttatcaaaaataaaaatataataacgcacattaaatcagtattctttccacacatatttatccgcttcatttaacgaacacatgacatttttttgtaaaaacttgtgtcagaaattcttctttagttagaaatccctgacattctcctttatttatgcgataacgaggttttattccttccggaaaaacatcataaacgatcccggctttctcgatataaaaacgacaagtatcctgaaaaatatatattttatctgtaagttgataggctatcaactcatctccctcaaaataggaaagtacttcacgcccggaagaagtcggtacaatatttagcaaatgtcctcctttcactttctctaagaatttggctttctttttaggatcaggcccaaaattcatataaaagataggattataatataaagtcttagccatcctctttttattcgtactcctgatggagattcctttcgaatattcaattctctgagagacattttggctttttagtccccctcgtgttacaaatactttaatcttccacctcaaactcacaaagtggtccccaatatcccggatcacaaatacaatttccggaaatagccggaatatgatcaataaattcttccccaccatcgggaacaaagaccccatttttacaaggatttcgtttgtctatctcccacatttcctaaggaatccaaatattagctaatgctattacagaaaaccccattattactgccagcatagtgactactttttccatgttctttttcatagatctgaattttaaattaaaaccgatgttcactccccggctatttaaggttgaaggaataaaattttgcttgcataattcaagaaaattaattttattttcaaaatatttatcattttaaatcatagaaacaaaaaaaatcccttgttataaaattataacaagggataaaatcaggaaaatacaaatacaatcaagctatttcctttcaaagtttgtataccaacaccgtagcataggccgacaccccttcttcgcggccttcgaagcccagttgttcggtagttgtcgctttgatcgaaagatcgtcgacatccagttccaggatttcagccaggcaatgccgcatatcatcgataaacggtcggattttgggacgttgcagacaaacgacactatcgatattactgatcgcatatccccggtgatcgatcaaggctttcgttttttgcaacaggagcttactatcgatccctttataagccggacaggtatccgggaaatgctgtccgatatctcccaagccggtagctcccaacagagcatcgcaaatagcatgtatcaacacatcgccgtccgaatgggcaacgcatcctttctcatgtccgatctttatacctcccagccaaaactctctaccagcctccagccgatgaacatcgattccaattccagttttaattttcataggtcattctttatcctccatatggagttatccttgcaaaattatcaataaattacaaaggtagtgaagagtgagcaaggtattttacagcttttgaagaaaaaatacaatcatttcattttcatctaaaactttatttatctatatttgtggattaattacgacgtgtgttttataatcaaccataactatttgctaaagacattccacagatgagaaataatggattttttgtttttgcaacgtgttgtctgcttgtgttttctgccacatcctgtcagaaaataaaaggcattttcggaaagaaaaaatcttctaccacaggctggacatacaacgacagtaaaaacggggggatcgagtacaataatgtaaaagcacaaaaaacaggccccggacttgtattcattccgggaggaactttcgttatgggacgtacccaggaagatgtcatgggcgactggaacaatacgcccaaaagagtaagtatcgcttctttttatatggacgaaaccgaagtccgtaacatcgactggctggaatatctgacctggttacgacgggtatataccacctatcccgaagtataccaaaaggcattacccgataccctggtgtggcgagaccagctgggttacaacgaaccgatggtgaaaaattacctccgttttccagcttatgcagagtatccggtagtcggggttagctgggaacaagcaacggactactgtgtatggcgtaccgacagggtaaacgaacaaatcctgatcgacaaaaaaatcctgacccatgatcctgataatcaaaaagatgaaaataacttcaatacggaagcttatacgacaggacaatataccggtacggtaagaaagaactacaaaggcctgagtaaagaaagacgtccggtaaggtgggaagacggattattgctcccggagtatcgcctgccgacagaagcagaatgggaatatgccgcttacggtttgatcggtaatacccaagacgaaagaatatccaactcccgaatctatccctgggacggttcgtgggtgagatatgccgaaaaaaaacaccggggacggatgatggctaattttaccagagggaaaggcgattatatgggcgttgcgggctcggccaacgacggctgggactacacctcaccggtcagatcattctggccgaacgatttcggtttatacgacatggcaggtaacgtcaacgaatgggtagccgatgtataccggactttatctttccaggatatggcggaattcaatccctaccggggtaatgtatttcaatcgccggtactgaacgaggatggcacagcagcccccaaagacagtctgggacggatgcgttaccggaatcagacagatgccgaactggcaaaccgcgaaaactaccgtacagccgacaaccgtaatttcaacgacggagatttgaaatcacggatttccggagatatcgactggcgtaacacagaaaacgaccggggtactcacgatatgtattacaacgacggaaaaggggaaatcaccaccctgatcgatgatgaagcccgggtatataaaggaggatcctggaaagaccgggcctattggctgaacccgggtagccggcgctatatgaatcagaagcgatccagtaacgacatcggtttccgctgtgccatgagtcatgtcgggaatgctaccggcggcaagaaaaataaagtatcgcagaaatagtccttaaattattaacccaacaaaaggttgtcgtagcattcattccagcggcaacctttcttttttcatcagcttatgacaacgatcgaaaaattatatcccgctatccggggtcaccggataaccaccgactcccggcaaattatccggggagatatttttatcgccttgaaaggtgaaaacttcgacgggaaccgatatgccgcagcagcccttgaacagggagccgccttagccattatcgataatgccgattacctatcgccgggttgcgaattagttgcagatagtcttcttttcctgcaacaactggctcattatcacagacaacaattgcacattccgattctgggtattacgggtaccaacggtaagaccacaactaaagagctctgccatgccgtattatcgaaaaaattcaagactttcgccactcaggggaatttcaacaaccacatcggcgtccccctcaccttgctcagtatggacgaaaccaccgaattcggtatcgtagaaatgggagccaaccatccgggtgaaatcaaaacgctctgtgaaattgccgatcccgatttcgggattatcaccaatatcggccatgcccacctggaaggtttcggtagctacgaaaatattatcgccaccaaaaaagccctctacgactatcttttaccgaaaaacggaccagtatttgtcaataccggtgatccgctgctgatgcaactcagccgtgaccacaaacgctacacttatggacaagaaggagatttactcaaaggtgaaatcaaacaaaccgtcccctatctggtctattcgctgaaaacccggaaaggggatttatatgtcaaaacccacctggtaggaggttataactttgacaacgctatggctgcttcggccataggtatgcatttcggcatcgatcccctggatatccaaaccgctatcgaaaattacaggccttccaacctgcgttcccagctgatccgttccggccgtaacactatcatcctggacgcttacaacgccaatccgagcagcatgcgtgcatccgtaggcaatttttgcgagatgcccggagagcataaagtggtcattttaggagaaatgctcgaacttggcacagaaaatgctgcagctcatgaagagatcgtccgcttaacgcagcaaggaaatttcgaccggatatttctcatcgggaataattttgaacattgcgctgataaatgtaactttatcacctggtttaaagatacagaatcgttcatggaatacctgaaatcgcacccattaaacgactcttttattttcataaaaggttcacggggtaataagctggaaaggatcgttgaatatctgtaaatctgataaatagaatataaaatcatatattgtgaacgatagattagttatcattccgacttataatgaaaaagaaaatatcgaaaacattatccgttgcgtattttctttaaaacccgctttcgatattctgattatcgaagataattcgccggatggaacagcgggaatcgtaaaaacactgcaaaaagagttcacaaatctccatatcatcgaacgtaaaggtaagttaggactgggaaccgcctatatcacaggttttaaatgggctttggaacatcggtacgattacatctttgaaatggatgcagacttttcacataatccccgggatctggtgaggctctacgaggcttgtgtgcaaggggccgacctgtcgatcggttcgcgttatgtgacgggagtcaatgtggtcaattggccgatgagccgggtgttattgtccttttttgcttcaaaatatgtaaaaatcattaccggaatgaaagtacatgatgccacagccggttttgtctgttatacccggaaagtattggaaacaatcaatctggacaagatccgttttaaaggttatgctttccagatcgagatgaaattcactgcttcgacactgaaattccggttgcaggaagtacctattatttttacagaccgtacattaggtacttcaaaaatgagtaaaggcattatcaaagaagccgtcttcggggtcatcaccatgaaaatgcgggctctgttcggaaaaataaaaccacggaaagattagaaatgaaaaaggtaattcaaggaggtactatcatcaacgaaggccggcaatttcaggccgatctggtcatcgaagggggaaagattacccaaatcctggctcaggctccggaaacactgcttcaggaagctcaggtaatcgatgccagccattgtttcgttattccgggggtaatcgacgatcaggtgcattttcgggaacccggactgacccataaaggaaacatcggggaaggaagccgtgccgctgccgccggaggtgttacttcttttatggatatgcccaatgtcgtgccgccaaccactaccttgcaattgctggaagagaaacaggagattgccggcaggacttcattagtcaactattctttttatctgggagcaacaagggataatatcggtgaaataaaacgtgtcgatccccgtaccacttgcggtataaaagcttttatgggttcctcgacgggaaatatgttgatagatagtattccggctttggaacgtttgtttgcagagtcgcctttgctgattgccacccattgtgaggatacgcccaccatcaaccataatttagctctttacaaagcaaaatacggagacgatattccaccacaatatcatccgcttatccgtagccgtgaggcttgtctgaaaagctccgccttggccgcttcattggcccggaaatacaatagccgcttgcacattctgcatttaagcactgccgacgagttgactctgctcgatagcggaaaccggttggagaaaaaaatcaccggcgaggcttgtgtacatcatctttggttcaacgacgaggcttatctgaccaaagggaatttcgtgaaatggaatccggccatcaaaaccgaagccgatcgccaggcccttttggaagcagtgaatcagggcgtcatcgatgtgatcgcaacagaccatgccccccataccctgtccgaaaaaaacggtccatacaccaaagccgccagcggtggccctatggtccaacactctttgacggtaatgttggaattagccgaacgcggtatgatctctatggaaaaaatagtcgaaggcatgtgccatgcccccgccgaattgttccgaatcgaaaaccggggatttatccgcgaaggctatcaggccgatctttgtattttccggaaagccccctggacggtaacaaaagaaaatattctctatcaatgtggctggtcgcccctggaaaaccaaacgttcacctataaagtacaaacgacgctggtaaacggacatgtcgtatacgataaaggagatttttataccgaccgtacaggcgaacgactcacttttaaacggtaaatacccgtatcggatgtgaacaattaaaccaaatacgtcagaaaacaggcagacaatagtaatacaaacaccagattgctgaataaagcggtccggcagcaaataaaatactgggcatataaaaaagaaagagggacggcaaacatatacataaaatcataataattgccgggaataatcacaaacgtcaaggacaggaatatcatcatagataccagcgaaagaattccacgccgctgattgacgatcatcagggaataacgggccgacaggtttgtcaaagcaatgatcagcaccaatacgatcatccccagccgcaccagatcgattacaggcagacgatgtatatgttcaccgaccatcaggttatccgtaaaaatagccggcaacaattccaaacgatccgtccagaaataataaaaagcaataaacagaaccggcgtcagaattcccaaccacaaagccacaatatccttcaaggtagaacggcccgaaaagaacaagaccccgaaagcccaagcgatcgacaggataaacttcggataaatagcaacggacagggcgattagaaaaccgaaatcatacagtgcaccattacttttcgtatcattgatcgccatctgcaatttccatacagcgaccgtcacgataaaaacagcgatcaggaggtagtcaaaaccgacattgaccataatgcccgacgtcagcaggatataaataagtgaaggcaaggtcgtcgtttgtcccagcaatttaaaccgttcactcagaaaaaagatcagataggccacccccaacaccatgacaaagccgattgccgataaccaggatttatccagctgattgatataagccatattgatgactcccttcacctgcaccgattggagagactccagagagaaatacccactaagaaaagcgattgccattacaaggaatggcaatacaaaaagcatatataaccgtctggattttaaaaactcattcataccggtatttccccgcaatcattcaatttatttcttctccccctttaacctcaagcttttagcttatagcctctagcttttagcttatagcctctagctttttaccttttacttctatcaaatcctgcccgatatccctacggtaactcatatctttgaaagacagtcttgccacgttagcataagattgtttcagcgcctgttccatctgtgttccgaaagagctcacagccatcacccgtccgccattagtcaggatctgtccatcagcttcttttgttccggcatggaatacaatactcccttcgatattatcgagtccggtaatcacattccccttctcataacttccgggatatcctccggccaccaacatcaccgtcgtgcaatagcgttcgtccagttcgaatgccgaatcggccagtttccccaaagccgtcgcttcgaacagttcgaggatatcggtcttcagacggggcatgaccacctcggtctcaggatctcccatccggacattatattcgatgacagcagggtctcctcccttattcatcaatccgaaaaagataaatccccggtagtcgattccatctttcttcaagccctcgacagtcgggcgcacaattctttcctctaccttccggttaaactcttcatcggcaaaaggcacaggcgaaacagctcccattcctccggtattcaatccggtatccccttctcctactctcttataatctttggcagatcccaatattttataatctttaccatcggtaatagcaaacactgagatctctattccatgcaaaaactcttcgatcaccacccggctactcgctttgccgaacttcccacccagcatctcttccagttcccgctgagcttcctccaattccggaaggatcaacactcccttaccggcagccaacccatcggctttcagtacataaggcggacgaagagtagctaaaaactgctgtccttccttcacccgatcgggagtcaccgtcatatatcccgcagtaggaataccatgccggatcataaattgtttggcaaaatctttactgccttccagaatagcaccgtccttaccgggacccacaatcatcaatcccccgaaacgggaatcggcttccagaaaatcacgtattccttccaccagcggatcctcaggacctaccacgagcagatcgatctgtttatcctgaataaaatcaccgatagccctgaaatcggtcactgcaagactgacattttcagccaactgggctgtccctgcattccccggagccacataaagttttcccaatttcggactttgaactattttccacgccagcgcatgttcacgccctccgcttcccaataacaagactttcatatgagtatctattttttattatgcaaaaataataaagatttctctcttcactactgattatctatcgtataattaaaaaagcggttaaacttgtacattttacgaaacactgcatccactttctgtagtaaatcgtcgctctcgaaccaggcttccggctttacactcatcacatcataatgcttatgttttagtaaatcggcctccgggaaatcggcagggaaaggagccggaactttctttaatttatcatcggtatccaattcaggaaattcggcaataaattcaggttcccggataatcgaagtaaactcttcgatattttcatagatatcctgcctgatccgtttcaacaaagccggttccggacaataacaccccccacccaacatacaacaccccggttggaggtggatataatacccacaacgtccgctgttacgtccccgccaaccacagatataagcggcaaaatgatctttataaggacgcttatccggcgaaaagcggatatcccggtaaatccggtatacacaatccttcgctttcagattcttcacctcctcatcccaaacagcagtttgcgcaatcaatcggtccaccaattcatcgaacccctctttcaatttctgataacggggtttctgaccggcaaaccattcccggtcattattttcctgtaactcccgcaaaaaagtcagtatatctctaatcaaccctttcatctttttcctcctctctctcgcttaaacttatcagcctatagcctttagcctcccagcctttagcttatagcttttagcctttagcttatagcttttagcctttagcttatagcttttagcctttagctttttacttttaaccttttacttcccccccctcacgcaatgtttcatctcgaaaggtatttccatcgacaattccataaaccccataaattctccttccacataccaaggcgtctgataaatcagtttttttacccctttcttctcgatagtataaacattggtccggggattttgtaacatatcggccaacagggaatgagccggctcgggatggcaatccaacacatttttaccgatcagatcctcctgtccgggctttaaaaatgtcttacgcgacttatcgttcatttccaaaatcttcccttctttgtcacatatcgtgactgccaggttaacctctttaaaataatccatcttctatcgtttaaaagttaaactataatttccattatttaccggaacggatttcctattctctcagtaacaacaccgtcccctgcgtcgtttcaggaactcccgactcattattatctccggtccagacctcggcatccccgaagatcgcttctgcacgccagatatacattccctgcggcattcgttcgcccttgaggttacagccatcccagccttccgaaggccgaccgttttccagggctcgggtttcccaaatcttatttccgtattgatcgaaaatctgtagcctataacgggctagtcccatcccaatcccgttaaaacggttgatcttcggattctgactatgcggaataaaagtattcgggaaatacaatcctttgatcaatacccgatgttccataatcgccgtatcccggcatccatatacattctctaccactagttcggcccgatacatcccctgctccccgaattccaccgtctgatcgccgaaagcatggaaggtccccttatcaggtaaattccagatacagtccgaacattcttccgaaagattgataaaggtcactttttgaggattccctttttccacctttttgtccaataacgccctgggtttattgggaacaactactccccgcaggtattccgatttacatcccttatccgtttcggcatatatcatcacccggaaacgctgaaccgtatcggattcatttacataccaatgctccctcgccgaagtcagtcccgaccgatccccataatcccacatcagataagcctctccggtaatctccggctggtacagataaggcgaacattggatagtatctaccggctcgatcgtcaggatcggtttgttataaacgaccacttccttcatgaccgaatcagtacactgatttatctcggcagaaactccgataaccgttaccggaaaggtaccgtatccttcgtacacatacctcaggctatccttgtttcctgtctgtccatctcccaatttccaggttacctgtttcagttcctgatctgaatttacgacaaaggtaaatgtatccgcctcacaaagataatcttcacttttgatttccaagtgcggtaaaggataaattattacaggcgaagaaatcgtatcccacccgcagccgttgtctatcttcagtttcaccagataagtaccttgcttatcgtatttatgtcgtgggctccagacggtatcccgactaccgtccccgaaattccaataggtattcaggatagtagacacggtgtccgtagaattattccggaataagatttcctgattcacacaggcgtaaggattgtccaaaggcgtaaaatgagcactgatctgccggggtttcacaagcagggtatcggtatactcatccacatcacaacgattctcagcccgtaaagtaataaaatagctggtagcggcttcatctgtcgtaaattcatgctccggattacggatatccgtttctccgatcacttctcctgttcgtgaattggtaaaagtccagttgaatacacaattatttccggtagtcgtattctgcaattccaaaaataccggcgaacattcccattcatgcatcaaagcaaaagaaactttcggagccgagaatacagtaatcgtcgtatcgtagctcacggtatcacaaacgttgcttactgtcatccgggcaacaaaggtcgtatcccagctcccggccggataaggcttcggcacaataggcatcaaggtgtcggtcttcgtcccatcaccataatcccaatgaaaagtcaggtaattatgatcgctcttataggtatcgggatcgaccgtaaagaggacctcgaaaggagcacacccctgtaaagtatcgacatcgaaaaaaggtggaggcggcaaattaataatctcgatacgggtagcttcggaagtatcccggcatccataaaccgactgagccatacaaataacatcccgataaccgtacatgtcataactatgcaggatctcgttgtccgatatcccatgaggcgtatcgtcgccgaatatccattcgaatgtattcccgtcaggctgagcgggtgtaaacaacacatccgtatggatacaactccgaggagccaccgtaaaatcggtcgacggcaaaggatgtacccgcatcaccgccgaatcccggttcatacacccacggctatccgtataataatacaacaattgaaaatcccccggaacagtcggagtaaacaaatgtcccgccaacacgtcttgacccgatttccaatctcctctgttgggttgccatacctgccccgctgccgaatctcttcccaccagagtcaccggtggattgttcagacacatcttcaaagaatcaccggcctctacataaggtaagggccatatccgcatattcatcgtatcccgggcgatacaagccccgttccggtaatgatacaccaatccgatatctttttgcgcatagggatcgaagcccggataaaaataactatttccccgctcggtatacaacacttcagccgcttcgggaattgcaggatctttcaacgtccaccagcccccttccggctgtgcacgaagaatccgggcctctgccagttcacagatcgtatcatccggcaatgggatcacaggaataaatttatcgaccttcacctgaaaaacagcctgtcccggtgttttacaacgatttttatatgctgcgactacggtataatcacaggttttgaaatcgatatccggataataagattttaaatccgttccattcaccagtgtatatccctcggaagcataaccttgattctcagtgatcgtccaatgtacctgttgtattttgtcgttccgctgatcgacttctacccgctctctcccgataaaatgaaaaggttcacactgatctgcgatatccccgatcctgacccggggaatggcaaatgccttgatccggaataccgaatcgtcgtcgtgatgacaaccgttggaaaccgctaaccgtacatcgtagtctcccggctccgagaacaagagtttcggagattcactgttcgtatccccctcggcaaaacttaccccctgctgaggtgtaaccgtccaggtataagccagggaatccccctccgaaagattattcagggtaatcacaaacggatcgggatcatccgtacaaccgacagaatctttacctacagaaaagctagcctgctgttcggtcctgagcacattgacttcggtcagaaactcctgttttccctcatccgcacatttcgaaaaaacctcgagtttaagctcataatgcccattatcattgaataatatccccgggaaatcggtattttcccgatctccgcctttccaggaccatcccacctccggagtaatggtccatttcgaagtaagggctgaattccgggtatccacccatttcagataatcggacatttccacgggaataccgtctccggcacagactcgtttcatatatgatgtcaattcgatatcggggataccatgcaccaccaccctgaactcttttgtcacaggcgatttacacgtactacgggtaactactttcacccggtattccccatattttgtaaaccggatcgaaggagccttctgtctgcttcccacagccggatcgataacctggccgtcctgcatatattcatatccctgctctacgtcgctaaccacctcccattcccagctgagcgcaccggcttcttcctccattgtattttcaaaaacgacaatttcctgctcacaaatatcggcaaccgaaggatttcccgcaacaggtgtttttatgacaatatccccgtaaacatccggatcataaatatggtataccgcctcagccatcggatcggtagccggacatcccgcatgaggtaaagttgctttcaccgtataatatccgggacgtttaaattccacccgaggaatcagactcgtcaacccctccgcacccagttcataatctcccggctggtccgtgccgtcctgccgataaatctgccaggttacctgtggggtattattataccatacaaacgtagtatcacccgaaaggacaaaaccggcaggacaagaaaccgtatcttccaatactacttccggattttttttcacccggattcgtaaagtccgcgacacggtatcacaaaatccgaaaaccgtaccggttacttcataggttccccatttcttaaaagtgatcggagcaaccctttccgtattcccccttagaaactcacaatcctctgccgttcccccctgaggttcccctgtctccgggatagtcacttcccagttataagccagctctaaactttcaggatccttttccgatgccgaattggtaaagataagcatcccaccttcgcatacttcatcccggttgtccttctctttgacagtaacatccaaacctgaaatccggaccttcaattctccggtcaattctttccgggtcaaaatacctccatgctcatccttttccggacaccccacctccggcaaagtgaccttataggtatattttcccgattcctgaaaatgaatcttcggctccggcgaatcggacgaagttccgtccacaaagtccactctatccggagtaaactcccaatgtgcttcgggcacatgattataccattcgtaaaaaatacacaactccgtattcaatacatcccggggacagatttctgtcggaaaatcggccaagaaaatagtcggatctttcctgacatgtacccggaaagaaatgcgtttcgagttacaagggacagacaacgagtcggtcacttcaaagtctccatacccattgaacctgatccgaggtccggcagaagtcggagaaccggccaggtattcaacattccaggccggatcgtataattccgtcgtaatcggcttaaccgtccaagaatgttctaatccctctccgttggaatgattctcaaaactaaccgtttcgccgtcacaaatcgagatgttgtctccgacaggggcaggtgtcggaacaatattgtcggtaatcgcaggatcatcgattttcaactctttatggatcgtcaacttggagggatcaccacaaagcacaccgcctaccgaagctcctttcaaagtcaaggaaacctcataggtcgcaccagcctgcaaataaacctgcggatattctttatccgcctcataaccgggtaaaaaatctaccgtaccggtcattcctgccttaggttcgattttccagactgcttctttcgggtttccattccaatagagacggaaataattctccaaattcaccaaagctttccccgtagtaagatcaggacataaagacaccggccaggtaacctccacaatctcgggatccttccgtacgataatagtcgtatcttttacattttgaggacattcgtttgtcaaagtcagtgcaaccacgtattccccgtagccgttgaactgaatgaccggattctccgacttctcgctagtgccgtttataaaaacaaaatcatttgtctgcctaccggtaacattccaataatactgtggattttcccctttagaatggtcggtaaatacaacactttcgcccgaacagacggtatccctatcgactgtaaaaccgacttccggcgattgtatcacactgatcacttttacgattgtatcgttggaacattccagccccctgtagaagcgatcaagcgtacttcatattctcccggcgtatcgaatatcacctgaggatatttttcgaacacagaaggtttatctccaaatttccagatatattctgctattgtattacagtaaacatcccgtccttcaatcgtacggtttattacctgaacaggataaccggtacaccccggggctacgaaatcaaaagccgcttccgggggaataaccacggccgttgtcacggtcgtctgtaaaggtaacatgtagtccgaacactcgttccgagcctccaattccaccgttatcgggcaattatcggtctgaaaagtatgtttcaccgatcccattgttttcatcatctctgcctgtgttaaagtcgaatcacgcccatctccgaaattcacgacataaacggtaccggaagtctgtttatcataatcgataatttttatttcagactccataccgtaacaagtacctttttcattcactttcaatgcgacatccggcttattcagccgaagtacatcatagtttttttcgagtactttactgccatccgatgaagtccaggaaaatttcagtttaaacactttgaattccctataaacatgctccatcgtctcttcggttccccattcttcgacagcagagccatctccccaatctactttaaaagttccttttttgaagccctcatgcacacattgattgtaaaccgtcaacttttgtccgttcacagcatctccattacacaacttaaacccgccgggatcgaccaatttcaaatcgtcctgagtctgggcataaccacctactgccgagcacaaaacagtaagtagtaaagctaagcggtatatcccttttctgtattttttctgatttttcatatctgatcctttttatttgcctgtgatcggcggattttaaaaatgaaaagccttattcttccgtttcattctggctctcttactattgttcggcgaattatcgaaacgctggatgcaacgtttgggaactatcctgtaataccaatgcaacgataaagaatgactggtattttgatacatcgtcccttgatgggtcgggacttcacaggtataaccgatcttccatccggaatcacgtcctcccggaatattcactcctaaatgtactaacaaggtacctacctgcaatccttcgaattgatccccccggacacccaaaccgatcagtccgaaacgctcttcctcccagcaaactccgaattgtaaattccgcataaccgactgcacatcgatcattacgtacggagaaagcactgtattgatctgattccctaaagcaaaaggatgtgcatacgaaacatatcccgaataccggcgattcaacagattttcttcggaagaagcagacccgtgttcggataaaaacgactgagtggattctatgatatgatatacagaaaacccatactccaaactagccaccccatgccaggccacattgaaatcggtctgaccgtaaataccggcggccatatcgaatatcgtcactttatcggcataaaaactcatcaactcaggggagatatccaaaatctgaccgtaaaaaggatcgaactgatctcccagtgtcaacttcgagggatccacgcttttacaatataggctaggttgcagaccgacctgcaacaccgtagaacgtgacagtttcacccgggccgacaaggcggcagcaaacagctgggtcacatacatcaccgaactttcctgatcgcgttgataaaacagagagagacctcccaagccgaaagtccttttctcctgaaaggcataatctgccgaaacaaaataagacctgaaatccaacggcttactccaatatgaccgttgcataccgatattcacacccgctaatccatcaaaacctgaataggccggattattaaaagatttccacataaatggatgagataccttcgtatcctgcgcctgtaaacggacagacaccaccagtaacaaaaatgtcaccgatattattaatcgaatacccacacacattaatttttcatgaataatgaatcgtgacaaatttagcttttttacaactcctttcaaattaatcactttaatttattcctttgtaaaaaaaacaaaaaatcattttttttctgatgaaattttgtcactttcaaaaaaagccatatctttgcatcgcttttgagaaatattccttagtagctcagttggttagagcggcggactgttaatccgtaggtcgtaggttcaagtcctacctgaggagcaaaaagccactattaaggtggcttttttagttttttccgaaaatgggacgaaaggtccgtcccggcgttcctttttcaaacttttgaaacccttgtaacccttataactgctgaaattctttcccctctttccattttatccattgttcccgcttttacatattttaaccccctaattccttacaattgtttatatttggtgcgttattgttaattgtgcgcatcttcgaattattaaacaagttttaaagtaatgccagaaattacattagaagaatacgaactgatgaatcgtattctctcagatactcgcactggatggtggaaagcagattaccgactccagacctattttttttcaaaacagataatggaattgactggtttaccatccgatcgattgtcttttgcagattttctgaacaggatccgtaccgatttccgtttccggatcggtgaagaaatcgcaactttagaacaaccttacgtctacgatatgaccttcccgattctttgcccgaaaggagaaatttggattcatatcaaaaaacttcatcaggaaaaaaatgcgcatggcgattctattatcacaggctcgatacagatcgtcgatagtccggaaacgaccaaatccgagcaagcagctgcattaaggataaataatctcttgtatcagctcaataatatttcatataccttactgtcttttctgcaaaacaacaatacatccgaaatcattaataaaatcttgcaggatattcttcaggtattcaaggcaggacgggcatatatcatcgaatacgattccgaaatcaaaacacagacttgtacttttgaagtagtagataacaatatagagaaggaacagacactgatcaccgacctggcgaccaccgataatgtctggtggaccgaacaaatcatgtcgggacattctatcgtcttatccactctggacgacttaccggaagaagctgcttccgaaaaagaatttttagctttacaatcgataaaatcacttatcgtcgtacctctggtgtctcctcagggagcttggggatatgtaggaatcgacgtggttgaagattttcatcagtggagcgatgaagattgtcaatggtttacttccctggtcaatatcatcaatatttacatagagcttcaaaaatcccggcaagaggcacaaaccgaaagggattatctgcaaaatctatacaaacatatgccattgggctatctacgtgcccggattctttacgatcaacaacaaaatcccgtagacctgttgtttaccgacgccaatctggctgctaaaaaaatcaccggaaaatcaaacttcaacggtcttcgggccagctcgctaggcttggatttttcatccaatctcctccaattaacaacactgtcacccaacaaggattatctggacgatacccattttgtcagcagaatcaataaatattttcatttcatttcctacatgacccgtcccgacgaagtcatctatctgttttcagatataacggaaactttcaatactcatcaggctttggaccgcagtgaaaaaattctgcgtaatatttacgacaatttaccggccggaattgaactttacgacaaaaacggtttcctgatagacctgaataccaaagatatggaaattttcggaatcgctaacaaagagacggtactaggagtcaatttgttcgaaaatccgaatcttcctttacatattatcgaagcgttgcgccgtaaagaagccattactttccgcatcaaatatcctctctctacaatcaaaaattattattcatcgaagaaaaacggtcttcttgaaatatacacaactgcaacagaactctacgactctcagggaaatctgatcaattacctgttaatcaatatcgacaataccgaaatcacacaagtatatagccaactggcagaattcgaaagttcgttctctatggtcagcaaattcggcaaaatcggatattgtagattcgacatctggacacgtaccggctatgggatccctcaatggtattataatctgggagaagaagcaacgacgcccctctctgaaatcatcggtgtatacaaacatgtacaccctgaagaccgggattatatcctgaagtccatccagcaaatgaaagccggagtaatcgaaagctttttcaaagacttgagaatcaccactgccgaaggcaacaaatggacgcggatcaatgtaatccgtaacacaatgaacgatgatccccaaaagctggacatgatctgtgtcaattatgatgtcaccgaattgaaagaaaccgaacaacgcctgatcgaagccaaagagcgggcagaagaaagtgatcgtttgaaatctgctttcctcgctaacatgagccatgaaatccggacacccctaaatgcaatcgtcggtttctccgatttgttggccgagtcggacgaccgggaagaacgtttcggttatttgaagattgtacaagaaaataatgaattgttactacaattgatttcagatatcctcgatctttctaaaattgaagcagggactttcaaatttatcaacgaccgggtaaatgtttatcaactctgcaatgagattgtccggtcttacagtatcaagattaaaaatcatcaagtcaaattgatattcgatgaacaatccccggtttattacataaccagtgacaaaaacagggtgattcaggtactctcgaatttcatcaacaatgcgctgaaatttacttcacaaggtacgattacactgggatatgaactcttgccgaatcatgaactcaaactctatgtctgtgataccggccaaggcattgccgaagaaaaacaaaaagtcatattcgaccgtttcgtcaaattaaatactttcgttcaaggtacaggtttaggattatcgatttgcaaaagtctggtaaaacaaatgggaggacaaatcggtgtaaactccaaagagggcgaagggtcttgcttttggttcacccatccgatctccttgactcaaacagagaaaaaacggaataatcctgaaaattaaagattttttgtaattttacctgttttagtaggtgcaataagactatatttttatatctcatttataaacttaaacaaaagtataatgtattaaactgataaaagaacagtaattaccctcgatgccggagggactaattttgttttcggagctatccggggcaatcaggatgtgatcaaaccgatttctcttccttccaattcacatgatttgggtcaatgcctggaaacgttggaaagaggatttcgggaagtaatcaacgctctggatgaaaaaccggtagccatcagctttgctttccccggtccggccgactatcccaacggaatcatcggcggttatctgcctaacttcccttctttccgggatggggttgccctcggtccttttttggaagacaaattcgggatacctgtatttatcaacaacgacgcagatttatttgcttacggggaggcacttgccggagcattgcccgaaatcaactccaaactggaacgtctgaacagtgccaaacgctataaaaatttattgggatatacctggggaaccggattcggattcggatttaccgtcaacggacaaatgcacatcggagataactcttgtgtggagactttctgcctgagaaataaaaaataccccgacgtgatctgtgaagatggtgtggcgatccatgctttaaaacgtgaatatgccaaaaattccggagataccgatcacaacctcgaacccaaagatatgttcgatatcgcagaagggacccgggaggggaatcgggaagccgtcctaaaaacttttgaagactacggagaaatcgccggagatgctatggcaaccgcagcaacactgatcgacggcctgatcgtcatcggcggcggaattaccgcagcccgtaaatatatcatgcctgctttattaaaagaaatgaggggacaactacaacgcatgaacggtgaaaccattagccggcttcagtttaaagtatacgacctggatgatttcaatgaattcgtcgaatttgccaaaggagggtcccgcgaactgaaaatatacggaaccgataaatcagtagtctacgaccctatgaaacgcatcggtatcaccatctcaaaactgggtgccagccgtgccatctcactcggagcatacgccttcgctttgcaacaaatcgatagacaggagtgaagagttgagagagttaaaagagttgctgagttgctgagttactgagttgctgagttgctgagttgctgagtt

SEQ ID NO: 5890 - DNA, 3785 bp, Unknown
  gut microbiota DNA sequence
gttgctgagttactgagttactgagttattgagttgaaagagatactgagttgaaaagagttgatgaatgactaaattgccatgctgttgatctgggaaaatttgtgaaaggaaggtaaatttaagtattatttgaatcattctgttattgggattaaataatcagtatctaaaaaattcttctgatccaaccatctataccccttcaactctttcaactctataactcaacaactcagtaactcagtaactcagcaactcagcaactcttttaactcaacaactctcttccccctcctttttaatttttacattatccaatcggtattcaagtgccttcaccgatatcagtaactcacggatagagatagcgagagaaatcaccaacaagagtaaagccactccgaaggtatatacagcaaccaattgccatcccacatagataaacagcgtacaaaccacgcacaacagcaagctggatactccgaaaatttgcatcgagcgagccatatacaaccttttccgcaaattgtcgatctgccgttgtgccataggggtcggattttgttcgtgttctgttttcaagctcctgatcaccgatgcataagccaaaaaacgattcgtataagccaacataatcaacgaaatcgccgagaacaaaatcgaaggtgtcgtcagggtcagttcttccataaaatttacggtgaaaacaggtaaaaacagataaaacgggaaaacagttctcttgttcccgttttatctatcgttaccttttataatgaataatgcaataaccatttccgttcttcaggcccattactaccggcaggatagaaagttaaccctttggccggatctttggcccattctttcaggattggatcgataaaacgccagcttaattccagggcatccgtgcgggtatacaaagtagaatccccttgcatcgcatccagcaacaaacgctcgtaagcattagcaatataggtattacacaacgaatcataagcgaaattcatgctcacctgtttaacttcgaagaacgatcccggaactttcaacccgaatttcaacgaaatactttccggcgaatccactttcagtatcaactcattacaagaagaacggggacaaattccgctgaacaaacgatgcggaacattcttgaaatgaatcacgatttcagaccgggattcttgcatgcgtttccccgtataaaaatagaaaggtacccctccccaacgccaattatctataaaaaagcgcatagcgatatacgtctctgtcgtagaatccgccgcaactccattttcctcccggtagccgaccacactctcctctcctgcttttccggcaatatactgtccccgaatcacatcattgggtgacaggggatgcaaagccctgaacaccttcgccacttcatcgcgcatcaggttggcatcgaaagccgaaggagcttccatagcaacgaaccccatcaactgcatcaggtgattttgtatcatatcccgcaatgctccggccccttcataatattttccccggttttctacccctaatttttcagccgcataaatttcgatagaatcgatgtaattccgattccacaacgactcgaaaatctggttggcaaaccgaagcacgagtatattctgtaccgtctctttccccaggaaatgatcgatccggtaaatatcttcttcgtcgaagatcgaacacagttgtttattcagtgcttgtgccgtttccaaactgctcccgaaaggtttctcgacgataatccgcctccaacctccttcttccgacgctttattcaatttacttttacgcagcgcttctgcaatcgggccatatttttgcggtggagtcgccaggtaaaaaatcagatgatccggaatatcttttgctttccgtaattcggcaatcttctcaaccagcaaatgatactcggccgcttcatccgaattgaatcctaaataatgtaccctttccagaaaagcatccaattgtttagcttcaggatgtttccctttcaaaaaagccttcagattatctttctgctgtatccggaattcctcatccgagaaaggagtcctcgcaacacctaaaatcacaaaattttcaggcagcatatcccgagcaaacaactcatacaacgaaggcaataatttacgtttcgtcaaatctccggaagccccgaaaatgaccaatatttgtccatctggttttatcataatcctcgattaataacttttaaacttcatctactaagcattataagttcctgaaacattccctcccgtttcattccaatcggtatggaaaaattgtcctctctccatatctgtcctttcatacgtatgagcaccgaaataatcccgttgcgcctgaatcagatttgcagaagaacgttctgtccgcaaaccgtcgaaatacgtcaaagcggcagccatgcaaggaatcggaatgccactcaacagacagtcggccgtaatctttctccatgcaggcaaagcctcgagtattcggtttcggaaaaaatcgtcgaaaagtaagttttccaaaccgggtaaagcgtgataagcccgggtaatttgctccagaaaaacggaacggataatacagcccttccgccaaattttagccaacatgccgtaatctaaattccattgataatgctcggaagcttttttcaacaaagagaatccctgtgcataagaaatcaatttcgaagcatatagggcgtgtcgcaataaatccggtaaaccggcatgttcatgaatatcattattttcacttcgatacagagccgacgccttcgagcgttcgtcggccatggccgagaggaaacgggcatgtaccgcctctgtgatcaaagtcaacggatcgctttcctcaagagcagcttcggcagtccacttaccggtacccttttgtccggcaatatccaaaatacgatccagtaaatatcctccgtccgtatctcttacccggcaaatatcggccgtaattccaatcagataactattgagttcccctttattccatccggcaaaaatatcggcaatctcgtcattctccaactgtccgtatttccgcaacataaaataactctcagcgatcaattgcatatctccgtactcgattccattatgcaccatttttacataatgcccggccccaccgcttcctatccattcacaacaaggcgtaccgtcatccaatttggcagcgatcccctgcagtaaatccttcaccagcggccaggctgccggagaaccgcctggcattaccgaggggcctgtcaaagctccgatttctccacccgaaatccccgttcccacataaagcattccccgggcctccacctctttcacccgccgttccgtgtccctaaaatcggaatttcctccatcgataatgacatctcccggctcgagatgaggtaacaattcctgaatcatctcatcgaccggagctccggcccggatcatcatcatcaccttcctcggccgcttcagggaagcaactaactccggaatcgagtaagtagcgataaaatgtttacctgcaccacggccacgaagaaaacgatcgaccacattttctttcccgggatgtaaacggttaaataccgaaactgtaaatcccttactctcgaagttgagtgccaggttttcccccatcactgccaggccgatcaaaccaatatcagatgtatgcatatagataatatttataagtttatatacgatataaataagatttttataaatataaag

SEQ ID NO: 5891 - DNA, 19187 bp, Unknown
  gut microbiota DNA sequence
caaacatactactaaaaaacaattattttttttgatttataagaatgaaattttactttcgcaagtacaattttcctacttttgcttaaatttttcaatcatgaaaatatcgatcgatcacaatagtgcgatacctttatatctacaaatagaaaatcaattgaggaacatcatccgggaaccggagtataaaaaagggaagatgttacccaacgaagtagatttgtcgaaacaattgggaatttcccggaatacgctgcgccaggcgatcaacaacctggtcactgaagggttattagtccgaaaaaaagggatcggtactatagtagtcaaccaatcggtcagctcgaaagccaaaaactggttgagtttcacccaggaaatgaaagcgcagggaatcgaaccgaccaactatgaattacataccagctgggcgcttccttcagaagagatctgtcgttttttctccatcaccgatgaaaagaaaatattaaaactggagcgtttacggggtaatccggaatttccgttcgtttatttcatctcttatttcaatccccggatagggctgaccggtaatgaagatttttcccgtcccctatacgaaatattagaacaagattatagttctgttgcaaaaatttcgaaagaagaaatcagtgcccagcttgccgacaaatttctggctcagaagcttgaaatcaagcccggggacgctatactcatccgaaaacgatttgtatatgacccggggggacgccctctggaatggaatatcggctattaccgggccgatagcttcgtttatacgcttgagttcgagagggaagtatgaattggagtttataaaatgccggaagaccattggagcgggaacgagtatccggttcggtttttcgaacgaccgatggtgtctgacggaaacgtaacgtaaagttttttgcgcagtaaggggttccgccgttcagtgagttcttcgaataagcgaaagaaaaacaaaagattttgtttttccgaacaggagaaaaaccgataaaatcaacgaaagtcttaacggaccggtctgacggtataaaatccggaatcggaatagaaagaaaaaacatacctatatttcaggtaaaccggatttactcggcatccacagcttctatctgtccgatcgccctgattcttttcaacaaagagggatgcgaatagtatacccattcgtacagtggatggggggtgagattgcttaaagacttcacagagatcttcttcaagccggaaatgagcgattcaccatcgtaataccgggcagcaaaagcatctgcctgatattcatttttccgcgaccaggcattcatcaccaatcccaatatcatactcaacggcgaatagaggattgtaaaagcgatcaatcccaattggaaacaggcccggtcacctcccagagccattgacaaagccggctggttgacaaaaagcgaaaacaaccaaaggatcacgccggtctgaatcacagatgccagcataaattgaacggtatgccgttttttattgtgtccgacttcatgggccaggacagcaacaatttcttcctcggtcaaatcctttatcagggtatcatacaagacaatccgtttgcggggaccgaaaccggtaaaataagcatttgccttcgtagaacgcttcgatccgtcgattacaaaaatattgtccagtttaaagcccactttctctgcaaaagcattgattttatcccgtaaagccccggcctccaaaggagtctgcttattgaacaaaggcacaatcaactgggaataaaacatagccataaaaaccgagaatacagaaactattccccaggcatacaaccaaaagaaagaaccagcccattcataagaccagacgacagccgacagcaacagtccgccgatcaccccggaaaccaacattcctttgagtaaatccaatccataggtcttcattgtcgttttgttgaaaccatatttttcttcaatatgaaaagtagcataccaatcgaaaggcaaaccgagtagcccggaaaccagcgacaagcccaacataaaaagtaaggtctgtaaaaccgcctgatctgtccaggtcaccacccaggcattccaccaaccgaaacctcctgtacacaaaaacaccatcatcacgataaaagaaaaagtggaactgatcagatcgaaacgattcgtttcgcgcttataattctgaaaacgtgcatattctttttcatcgtaaattcccttaagattttcaggtaatacaggcgccatagcccgcatattcacccattccaaaatccgttctacaataaaatcagcaactaaaaaaacaacgataataataaaaacaacctcagtattcatattcaaaataaaaaagtataaacggataaaactattctgccgttaatttttacaaaaatagtaaaatccatatattcctccgtgatttattcagatcatttctaattacagaaatttttctttaaaactctcgggattttcatttattaattttaatttcgttgcgcaaataatgaattcataaatcaatccagataagtatggcagaatttaagtatcaggaaccgtttcctattgaaaatgataccacagtgtatcgccttttgacaaaagattatgtaaaaacgatcgaatgtgaaggacgtaagattttaaaaatagagcgtgaagggttagagttattggctcgcgaagcttatgcagacgtctctttttacctgcgcgccgctcatttgcaaaaattagccgacatcctgaaagatccggaggccagtgacaacgataaattcgttgcccacaccatgttgatgaaccaagtggtttcggcagaaggggaactaccgacctgtcaggataccggtacggccatttgtatcggtaaaaagggagaaaacgtatggaccgggatcaatgatgccgaagcgatcagcaaaggggtattcgaaacttaccgggaccgcaatctgcgttattcccaggtagtgccttttaccatgacagaagaaaaaaacaccgggaccaatctgccggcacagatcgacctttatgccacacagggcaataaatacgaatttttgttcatcaccaagggagggggctctgccaataagactttcctttaccagcagacaaaagctttattgaacgaagaaaccctgactaaatttatccagcaaaaagtattggatctgggtacttcggcctgtcctccctaccatttagcggtagtcatcggcggcacttcggccgaagcttgtctgaccacagtcaagaaagcctcggcaggctactacgatcatctccccacttcgggtaatgaaggtggccgtgctttccgggatctggaatgggaagaaaagatcttgaagatttgccgggacaaaggtatcggagcccagttcggaggtaaatattgggtacacgatgtacgtgtgatccgtcttccgcgtcatgcagcttcttgtcctgtcggcatcggagtcagctgtagtgccgaccggaatatcaaaggtaaaatcacggaagaagggattttcctcgaacaactcgagaagaatccggcacgttttctgccggcagaaagtcctgctttaactccggcggtcaatatcgacctcgatcaaccgatggaaaacgtattgaaagaactgagcaaatatccggtgaaaacccgtttgaacctatcagggaccctgatcgttgcccgggacatcgcccatgcccggatcaaacaaatgatcgacgaaggcaaaccgatgcccgaatatttcaaaaaacatccggtctattatgccggtcctgccaaaactccgaaaggcatggcatcaggtagtttcggaccgacgacagccgggcgtatggacccttatgtcgatctgttccagtctttaggtggttctatgatcatggtagccaaaggcaaccgttcgatcgacgtcactaatgcctgcaaaaagcatggcggattctatctgggatcgatcggtggaccggcagccattctggctaagaacagcataaaatcggtcgaagtggtcgatttcgaagaactcggtatggaagctgtccgcaaaatccgcgtagaaaacttcccggccttcatcatcgtcgatgacaaaggcaacgattttttcgctgagtgggctcattgataacaagagactatccaacggtttgttgtagttaacctccttttgagggtcattctgccgattggcggagcttcgtttctgatcgataacagggatcaggaaatgaagctccgccaatctttcttttttcaaaagacagctcaagtttgaaaagtcgcttatcgatattccagggcatagaaaccatccatttatttttcacacttatttccggtttgtgaaataaagacaaaaatttttgcacaccttgacgtcatttgtgtaaatatctcatttattgataaataagctatgttgtttcattttattgtcgttattttgtggtcgcacacaaaacacgacaataaattaatagctatgcaagcaacattatcctatgcctgcggaatatcagatattccgttgaaaggagagacaatcggtcagaatctgcgacaaatagcagcaaaatttccggaacggactgctttgatttccgagtatcaacaataccgggccaattacagtgaatttctggaacaagtcgaacaggtagccaaggccttgatggcccacgggattcgccggggcgaccgggtaggcatctggtcaccgaaccgctacgaatgggtattggtacaatatgccacagccttgatgggggctattatggtaaacatcaatccgggatacaaactttcgggtttgcgttatgccctggaacaaagccggatcgatcttttgatcgcttcctcccacttccggaaaaccgattatatcaaaatgctggacgagctccgtccggattgtctttatcccaaacaaaccgtcatcatcgaccgcgactgggcaacttttttatcgagcgcttctcaggtgagcgatgcccgactggccgaacgggaagcctccctgcaattcgacgatcctgtcaatatccagtatacttcgggtacaaccggttatcccaaaggagcgactctctcccatcacaatatcctgaataacggatttttcatcggggaacgcttgaaatacacggaaaaagatatcgtatgtctgccggttcctttttaccattgtttcggtatggtattgggcaatatggctatcgtcactcacggggcctgtatcgttatccccggagaatttttcgatccggaacaggtgttacagactgtcgaaaatgaaaggtgtacctccttatacggtgtcccgaccatgtttattgcagaactggatctgcccgatttcgccaaatacaatttaaaatctctccgaacaggtatcatggcaggtgcaccttgtccgatcgataccatgcacaaggtacaatccctgatgaatatgacagaaatttgtgtttgttacggcatgacagagacctctccggtttctaccgaaagctgtacggacgatccgctggaactgagggtaacgacggtaggtaccgtccacccccacgtagagattaaaatcatagatccggaaagcggcgcaatcgtcccccggggtacagccggggaactctgcacccggggatattcggtgatgttaggctactgggataatcccgaagacaccaaagccatcatcgacgaaacccgctggcttcattccggtgatatcgccgtcatggatgaaaacggctatgtgagtatagtcggacgtatcaaagacctgatcatccggggtggagaaaatatctctcccaaagagatcgaagattttctgatcgtccacgaaggggtctccgacgtacaggtcatcggtgtatacagtgaaaaatacggagaagaagtgatggcctggatcttctccgtcccaaacgttaaactctgttcacgctgttccttttctatgtatctctgtatacctggaaaaggaacggcccctatcagtacttatccgactcacagcaaccgtcagaggcagcacaccggccacggtataccaacactaccgaacaaagctctggccaaagcttaaactatctttacatttctacgtacaacagacattcgaactgctttagaaaacaagatctatgaaaggtgtacttctcgcattatccactgttatcgtctgggccattctaaatgtagtcaaccggttttgtgttttgcaatacgatgtcaatattatggtattcacctcttttatgattttcgccaccggtgtcactttaatgatcatccgcaaacaggtcatgccccaaaactggaaaagcggagtaaaatactcctggctgtacaccattatgcagatcatccgcagtttcacgatgatctctaccttcctttatatcacttcgacagagaccagtcttctgttcaacatagagattataatcacttacattctggcctatgccatttttcgaagaataccttataaaggggatttcctgggcattctcattatattgctcggatttatattatttattttttcccttccagtacacatgcgtgtgattgtctccatcctggtgttgctgtcggcgacagccagttgcatccgctcgatcgtcgtggaggaaaccaccatctggaatccggataccagcgtccggcaaaaatgcggtatttcaggatatacgatgttttacggaggcctgtccctgatcgtctttttctttgccatagctctcctgaaattttttctcggggatcggctccctccttttttgagttttctaacgctcctccccgatctgcccgaaatgatccatccggaaacaattatcagcgcctgtctggccggtttattcatcaatgcatccactacttacctctattatgcaactttaaaattttccacctcagaaacctttatggctgtacgtgcttttcaacctgtgctcacttatttactggaagtgatcgcagccctctattatgccgccatgcgtccacagctggatacccaggattatatttacggaggaatcatcatcttaggttccttactgattctgatcattccttccaaaggcagttacacccatcaatccaaagactttattaccgattaagcttatccctcaccggtttctttccatacgacatcaataccggcataaggaataccagggcgatgacagaaaacagtaaaccgccgatcgtaccgattgcaaatgaaaaccagaactcttcggctttcggtccatccagcaaaaacggcaccagtccgagcacagtcgacaatatagttaataaaactgcggtaatcttatgattataggcttttatataaagccggaccaaatcggttcgattcaagcgttcccgctccctgtttacgaaaccattgtattcgtttatcacatagatagcggcattgaccaccaaaccgctcaacaaaaccagtgaggcaaagcctccggttccgaaattgacccccgaaaaataaaaagtcagaaaagtaccgataaacgaaatcggaatcaaagaaataatcaccagcggttgccgcaaagactcgaacaggatcgaacaggtaaaaaagataatcaccacaatcagcagaatcaaccaatattgggttccctgatcgtcataccatccgaaactctgattaaccgtccggaaaccgaccggtaaagtcgcattgaactcttcagtcgtctgtttgataaactgatcggataaattatacgatcccataaaattaaaagccacctgaagcgaatactcctgattgcttttcgttatccgggtagcagccgaccgcttaccgatttctccgatgtgggcataacacacctgcctgtcccctacgggcagataactgttcatcagatgccacatgtcgaactgatcgcgctgcgacgaatgatagtcgatagcaatccgttgatttttgttacgataggtgccgacatctcctttatccatcaatgcagccaaagtcgcataacattgcctcaaattcaaattatgcaaagcaactttttccatatcgtatttgatatacagttccgaagcagcctcgtcctgcatttgccaataatcggaatttcccaattcgataccgacatctgtaacccgccggttggtttgtaccttctccgccagtatttcagcatatttatacaaacggtcgaaattatatccgctcaatccgatccggtgagatttatgtcctaaccccaacgaattggaaaatccccgttcgctgactcccgtcgtactccaatctactcccccgatcgacaatgcctcacgaatcacctgggattccaggtaatggggaaaagctccatccctgtattcatcggcaaactccacctcgatagaaccgcttttaccgtccacccgggtcacaaaacgtttcacctctttaaatttagccagaaaccgatccatttgccacatcttctgattcagcacgacagcatcatctccttctgtcagccgggcagaaatataaagtttcacctcacggtcccgttgagaaaaggtacgggaagaatggacagacgaaaaaagccgcaacgtccccccgaccatcttttcaagcggttcacgcaaagtactttgataaaaatggctgccgatggttttattataaacctcttcataccatttggtctctgcattcccggaggtacggtaataatcgctcttccccagcctggcaggcaacagatgaacaggaataccgaatgcaagtatgaagagggtgatatatatccatttccgtttttgggtaaaaacgatataacgggaataaaaccgactccatttcaccgtccgcttcaaacgaccgtacctcgtttttgtctgacggcggtacagcccgacccggtcgatgagagccggtacgaaaaagagagcaacaaataacgctacagtcaggttgatgataatgatggccgaaaaataattcaacgcacctttcacataatccggcataaaaaaaacaatcaccagggaaccgatcgtggtaagcagcgccgccaaaatagcgagaaaagctttccggtcgtgataatagctataatggtccaccatcacgatcaccgtatcgatcataataccgaacgagacggccactcccgccaaagaaatcaaattcagttctacatcgaacagataatagaaaataacggatatcaacacattggcaaacaatgaaacggctataaccgaaagatagcgcctgctccggctgactatccaaacaaacaggaagaggatcgccaaagataaaaaagtacgcttaaccaacttcaccagttcctctctcacctctttggcagcatcgttggtcaaagtcacataaaatccatccgtcagattcgcctgtatcttctccattcgttcccgaagttcggcagaagctttgatgatattcgtctccgtatccgcaaagatattcaggtaaatggtattgagaccgttgatccggtagaaactggtctcctgtcgttttttgtaattaaattcagcgacatcactcaaataaacaatcttcccctctatcgtcgtcagcggagttttaccgatatccgcaccgagtcgttcggtctccagcaacaaggttatccgttctttattcccgtcccggtcgatgcgctcgacatccccgacaatagaacattgtcccagaaagttttgaagtcccgatacaatgacattggactccagaccatatctctgcaatgccgtcgggtcgtagctgatatccagataaagcggcatcgccccaccgacagacacctcccgcacatagtcgatttgtgtgagataaggtttgatattacgctctacatagtcttttatattcgcaggatccatatccgcattgatgatataggacaatacctgttgtgtattctgtctgagccctccaccggcatcccctccctgcaagtaaagattacccgctccctgcggtaactttccggctatttgtttcaataaagaggatatttcaaaacgcacagccgacacatttgctttttccttcagtaccaccgtcacacttccgtttcctgacgaagacacagaagaagttttctccacccccaccacagacgataccaggccctccactttagaggtaatttcctgctcgacgacccgctgggaagctcccggccagctataactgatagtcagcctcttcccctgttcgggagaaggatgataggtgattcgcagcatcggtattaaagcggcaccgcctaccatcagcaccaccataatcagaataagtgaaaaggaggggatacgttctaaaaagccctttttattgatatcatgactcataaaaatcagcgtttacggtaaatcacataatagagcagcggaataaagaacaaactgaccacagtcccgaaactcattccgatgataatagaaagcgataacggatattgcagatcggatcccatatccacccggttcaggaaaggagcgatagccagtatcgttgtcagcgaagtcatgataatcggtttcaaacggctatgccctgcaataaaaacggctctgagcagtgacatcccgcttttacgcaggcggttgatcgtatctaccttaagaatagaatcattaataataataccgctcatcaccaccagaccgatcatcgacatgatgttcagactttcaccgaacaaccagagcccgaacaaaacgaaaaaaatatccaccacaatctccgacaggataatcagcggctggatcacactttcaaattgtgcggccaggataaaataaagcaacgatatagcgaccaacaggataacgatcaactcccggatggtttcacggctggaaaaatactctccggtgaaagtaacaaaaaaattctgatcttccctgaccacctcttccaccgtcttcatgacctgtcccacctcccgatcgtccacatcgaacacaaccgggtaataatcccctccgttaccggaatagagttttttaaaatcctcgcctttcgtttcgcggataatcatcgaaagaggaatttcaattccatgccggttgcgcactttacccgataaaatatccgaagtctcggcttgtgtatcccctgttgtcacaggcaccgaatatcccccctggttaatacggaacaatgtattctggctgatgatgtttttcatttttccataaacatcgttaaacgtcacttcatggatagccatggcctctacatcagctatataacggatattttgttccattaccgccggcgggatccctactccgggcaaagctttcttcaccttgtccacgacacgcgtcacctgttcaactgtcggagcctgcccctctttactatgcaattgtgccaccagcgtactccctttctctgcaaatatcatgttgaatatattacctgaaacctgaaatgaagcccgtgctttcggataattcgaggccaggtaatctgaaatgatccgttccacctgcaccaactttccggcatctttggctttcatataaatcacactctccgaaggggtgatctccctggtatgcgacatcagaaactgttgtacgccgaccatcgacgtggattgcaatatcaggctatctacctgtgctaacaatctatatacccgcagatcgttttcttccaaagaaataccgctattccagtcaatcgtcaggatcgtatcgtcatgggatatttcgggaagccggcttttctccaccatccggtaaacaaaataagtcagcgggacaagcaatataaaacaaatcatcattaaccgcccgtgccgcaatacccatttcagtccgagctcatacggacgataataattgaacgtaaataattttgacataaaccgattttccgtatcgggcgaaagtttacgatacatcagataaaaataaaccggtaaaaccagtaccgctgccagaagagaagcgaacagggccactgtcacggccatggcctgatcgtaaaaaagtgcccctgccgtaccgcttaaaaagatcagtggcaaaaagaccgaacaggtcgtcaacacactgctcagcatcggggtaaagacctcgccgactgccctggcaatcgaatcctctaacgtcaatcccgtccgccacttctgaaatatattatcgatcacgataatcgaattgtccacaatcatacccgtcccgagaatcagtcccgaaagcgatatgatattcagcgacatacccagcacatgaaaaacgagcaatgtaatcaccagcgataaaggaatcgtaatcacgatcaataccggcgagcgcaggtctttcataaacagaaagataatcaacgcagccagaacggctccaaccaacagattactgttcaggttatggatggaatacgacaacaattgcgtctggtcgcgggtcagttcaaaacggatatcgggatgctctttctccaaatcggtgatcagcgctgctatactttcctgcaaatccgccatcctggcgtcgctctgtttgatgatagccagcgtgacagccggatcggccccactccgtaccaacccgttccgttttgccggacgctccacgatttcgcacaactctttgaatcggtaaatccgtccgtcatggttgatatagatattttcaatatcttccttcgagataatccgggaatcgaaatggatgctataccggtactgaccgtccttgatactcaaagctcccagggagacattattatcggcaatcgcattttcgagcagcccgatccctacccccatggaagtcagtttcgtataatcgggaatacaaagcaattccggggtaacgacaccgctgatatcgaccatagccgtttgcggcaactgttcgatccgtttcgcaatgacatcccgggcaaattgtcccaactcactgaaatcgatacctgcctcccggggtttaccgggttcccggggagccccgcttttcaaggacaggttgagatagaaagccgggatatcggtcacactggccttaatgactttcggacgttccacatccttaggcaaggccgtgacagcccggtccaacttctcgttcacttcgataaaaatgagatcgatattaccgttcggttcgaaatccatataaatcgcccccgcatccgcccgggcttcagccgttatatttttcagccctgccacctgcgacaactgatttttcaaaggtttcagcagggtattatccacctcacgcaccgataaaccgggagcagaaacctgaatcgtaatctgtgggatatcgatatcgggcatcagcgataccggcaaatatcccatagccacgatactcaacaccacgatcgcgatgacactcatggttacccctataggccgctttaacaattccttgatcataattaccggttattatgaggtgttacatccgtcccgtcggccaggttcaggttgttcgaggtaatcacaatatcattttcggaaatcgtagtctgctttttttcacatcccgtaatcacatgcgaatcgatattcgacatcacaacatcgacatacgtccacaccgctttcccctcccgatagcaaaaaatcacctgaaaaccgtcccgcagcaccactgcgtccttgggaacgacaaaacaatttttaatttcccgttccagcataatcttcacattcattccttctaccagatacctgtcggtattacttacccgcgcacgaatcttaacctgtccgcgttcatcgatcaggggattgatctccgtcacattcccgtaaaatactttttcatcattgataaacggaataatcttcacccgttgtttcagcgcgacttcctctatttcagcttccaatatactgaattcgacatcaaaatacgaatcgtcgatcaaagtacacaacttaccggagaaacggtcatacaccttggcgtccagattggcaatacgcccgctaaagggagcgaacaaaaaacaactttccaaacgtcgtctggctgcctccagctgatccaaagcattcgtataaccggaagtaattttcatattacgcaaaacagcttccggcaccgtagccgtatcaccggtatacccttgtccgatcagtttgtcctgcaaatcgatatcggccttctccatggcccgaagacttttctccaattccaccgtcgcctctttattatcgagcgtggccaatacagcccctttctctacgtaatccccgttccttccgtttattccggtaatgactcccgtaccgtcgaaactcagttcgctttttaaaaccgcacgcaacttaccgttacagacgatctgtttctgaaaagtccgcttttttaataccagtgtatccaccgagatcaaagaactctgcgcctcactctttccgatttctttttccgatttctttttttcaccgccacaagccatagctccggccaagaaaacgatccacaacaggtttctatacaaatttcttttcatcatcatctattttacgagccattatttttcaacaatttcatcaaattcagcacaaatatctttttgggatataaagtcgtacagggacaacttacgcagttcgaaataagcattccagaatgttctcaattgactgatatactgatcactggcattatccaattccttttgggccgtattcaggtccgtcacagaaattcctccgttctgaaaccgctttttagtaatttcatagcgttcctccgccaccgccaatgctttggccgatatacggcattgcgtagcctgattgttaaactgtatcaccttgatccggatatcctgctgaaattttatcacctcctgttcctgttcggtttgtaccaaacgggcttgtgcctctgccattttcacccgtccccggctcatcccccagtcgtaaataggcatcgtcaccgacacaccgaccacttcccggtctttcaactgacgataaactccgaccagggcgtcatcgctttgtgaaagccccaggttggcagtcaattccacctgaatgccacgtccggctttcgcctccgccacatttttcgatgcattgagcttatcgatttccaaagcaatcaaatgggaagaattttgcagggccttattcaacacaaaatcatactccatattcacctcaggcacctccatcggcggttgtagttcaaaaaacgcactttccgatatccccagataagatttaaaattgaaaagcgccacttccaggtcgaccttactggtactgacggccaattctgcattcatcaatgccagttccagttgtaacagttcgcttttattcagcgtagttatggcaaaacgtttttgagcaacctcatacatactacgggtatctttcaggttttcctcgcttttcctgtaagtggtctgagccgacaacacagagaaaaaataagccgaagtctgaacgacaatattttccatcgactccagatactgtttcttggccttttcatattgcaacggctcggtttttttctgccactttaaggaattgaaagaacgtaagggttgagtataactgatcgaaaccggagttgaattgtatatcttcgtatggtaggtgaattgatccagcctgtccagagaggtatacagcgacacttttccccctgtaggagctatattctgattgatacggacggacaaggtgttactcaaggtattattggccacataactgatacgtccgtcgtccggatcacgcacctcgacgagtgaacgattataatttcccaggttaccgcttaaattaagcgaaggcaacaactgtgctttataggagcggaaactccagtactgcgacataaaagtcagctgcaccatctgtgcctgaggcgaacgggtataagcgatcccgatcgcttcttccagagtcatcttcccgatcaccagactttgtccggaagccacactcccgatcaatcctcctgcaatccataaaatcaatttttttctcatcggtatgtcttattcgttagtattcggtttgtcttcaaacattctcctgatttcagctttcatctcgtccacagcgggcgaaggtactttaggccgtttgtccagcaggatgtgcccgtaatgctccattttcgccctatctccccgggccgcccccagcttcgtcagcaaatagagcggataaatacggttcggacaggtgtaataagcccgcaggtaagccgcttcactccggtcatattgctttaatgccaaaaaattattccccatcacattccagaacatcggatcggcactgtgtctcactccttgttccaggacagcattgctctcttcgtatcgccctgttttatgaagggaatgtccgtattcgaataaaaatttatattcatttttcaatgcaggataaagttgcccgtatttttcgactacacctgcataatcctccatggtgtaataggcagacttatttttccaatcccggtatacctcccggagcccatacgcccggagatcggcacacaaggctactccccccatcattccgaatatcaaaacgtttgcataacgcgtcgttccgatccgccggtcggatgactgtgccatcgcaaaaagaaataagatagcaatagagggaatataaaacggataagaaaaaagcgaggcaaccaacaatgccactgccacacaaccataaaccgtcggtctccgtaacttaaaaaacaagacgagtacagccaatccccctcctgttacccccagcaataaaaataaagcaaggggttcgttaaacgccgattccaccactcctgccaactccgtatagcgactatcctgttccaacgcatttccttttttaaaataatcatgctgagcctccgcataagctctctcgaacccatcgatcccaaccccgaataaaggggcttccgaccaggccatgatcgtattttgccagataaatagccgtccgttagccgaatcctttttcaaaccataaaacaacgccaacacgatcatgactcccacaattcctcccccgatcacccaacgacggcttctcttcatccaacggataattcctttacgatacaacaaaatcacccccaccgctgctccgatccatccggcacggctcatggtcggtaccatagccaccaggatcaccccaaacgccacacaagcgatgacgtaacgcacgaacatcagattaataccaaccttccggtatcctttttccatcatagcaacggcaagcacaaacacacctgccaaaaaaataccgcaaggccccggattaaaaaatgatccggtcacaacaaaccgagaatgattggaagcctcgtatcccagcaattgttccaacaccaaataagactggtaaatcccgcaaagcaatacggccaaggctgcataattcgtcagccgcatcccttttatcacgcggaacaccgcataaagagcaaaataagaaatactcagataaaattccctactctgcatagcatgagtcgcccaggtatgcaccagaaagtaaacgaacaacagaaatgccaccacatctccccaataaagtgtccgtggtattttgaccaagcccaccgtcgccaccatcgtccccagcaacaaggtaaagtagttcgaggtgtcgatcccgccataaaaacgatccgcaacctgaaactgactcaggaaaagcagacttacacccgcaaccgctaatatcatgaaatattttctcatcttccctcttttctcctttactattttttcaaacttttcagcaacctgtcccaacggaattctccgctttcccggtcgcgggaatacgtgatgcgggtaactaccccgacgataaattcctccgggacgaatccccagtagcgggaatcgttggaattcagcacctgatcgccgcaaaaaaagtagtaatcaccttgaaatgtataactgtctatcggtttcccacccagcgtcaaccggcgttgagcgtcaacccggagtttttcccccgtctcgtactcgattaccagccgatagagttgaaaattaaccgtatcgagcatcacctgtccccctgcccggggcacataaagcggcccgaattccttgaccgtccagccataatgccggaaatcgaacgggaaagcgtggatcacattatcagcaatcaacgaatcgggcgtctccgacaaacgacgttgttcctcctccactcccaaaacaccatcatagttattattcctgaaatacccgttccggatcctaaccgtatcccccggcaaaccgatacaccgtttagcgtaaacataattgattttaaactccatcttatactttctccggttaatcggaaaattaaaaatcacaatatcgttgtgttccactttgcgcaaacctttcgtacggtggcattccaaccgatcgccctccccgaaatccaaccggtcgtaaatccgtgccccggcaatcagcttgttgacaatcacgtaatcccccggtatcagggtaggacgcatcgaatcggtcgggatcacaaactgatccaccacgtaaacacgcagtgcaataaaaagcccgatcaatactccgataccgataaaggcgtacattacatacaataaaatgtcccaaaaattccacctcttcttcattccgtcctctttttgcgttcataaaataacaacgccaacatcaccacccaaccactaaaaaatgctcctcttttccaacgttcccggctaagttcttctccatatcccctctcgaaacgatatggggtatataacaaattccatttaccgacaatacgatcatccgcaaaagctaccacaccgacaggcgttcgtaaaaccgacttcaacaccactccatccataaaatacaccggaatatcggcataacccggtatcgtcatcccacttccggaagccacaccaaacaaattaactgtcccgtcccggtacgcctcgtacaaagcagcaagtttatcaccgacctccggagtaatttgctcttttataccgatcatgtaagtgggtttaccgccggaaaacacctgatcactcacttcattaaaacccgt

SEQ ID NO: 5892 - DNA, 2007 bp, Unknown
  gut microbiota DNA sequence
cgtcgttgatgatggtgtcagccacgtccggggagcagaccagatcagaagcgcggaggccgcgcttggtcagcatacggatcatggcctccagatccttcaggatcttgccgccggtggcgtcccacttggccgtcggggtgtaggtcgcggggttgctggcctcggagtagaaacggatctccatctcgtcggccttgtcgacgtcgtcggcgatgtgcttcatcacgcagccattggtcagcatggtctcggcggccatcgcttcttcgcggttggtgatgagctcgcccagctcgtcagcgtcgcgcaggatgagggtctgctggcgctgctcaggggtgagctgagagtagagagcctcgccgaagccgcgcttgcgcagctcgtcgagggtcaggacgcgacggggagccacgaagggcggggtgtagcgttccatgttgtagccggcgcgcaggacggtgacgccgcccttgcgaggggccacgaagggcgccagcttcttgctgccgtcacggaactcgacgagcacgtcgtcggtggcgaagatgtcgctcgcgtcgttggtggggaagtagcggtcacgcaggaaggtcgcagcaggggtgagctgctgcacggccatgagcagcgtgtgggtgtcgtagaagttaaaaggcattttgttgtcctccttctcttagtattcgatggcgtcggagagcaggatgccggccttgcgcagctcctcctcgtcggtcgccttcagggtgtagccgcttgcaacggccagcttgctgcgggcgaagtggccggtgcggtaggccagcacggtcacgtccgcggtggtgccaacttccacgtcctcggcgaggatgcagttggcggtcagggtttcgttggtggtcgcggtggagccgaggatcaccagcttgccgtcgccggcggtgccggcagacagggccagcacggtgccgcgcttataggtggctgcggcggtggcctccttgcggatggtcacggtgaacacgtcagcgacgggctcgttggcaacgatcaggccgtcatagccgacgctgccgaggttttcgtccagtctcttgctcattacttcttacctccgttctgagacttggtggagttgtagaggccgacgatggcgtccacctttgccttgtcgtcgttttcgctgccttcctcgccgccgttaggggcagcgccgacgccggcagcgccggactcgtcgttgtcagccttggcgtccttcaggtgcttggcaccgagggccgcctgcttctgcatagccttgagcgcgagctgctcagcggtgcagggggtctcgccgtacttggcgtccctgacgagctgcgcgtcgcccacacttgcggcgatgctgtcgatggcctcgatgcgggcgcgttcctgcgttctggcagtttcggccgcctgctgctcgatctgagccacgacgtcggggtgctgtgctctcatttcttcgagggtcatggtcttgttgtcctccttcttggggccgtcgttcttggcggccgcgtgtttatttccagccgcaggggcggcgtggatgctgttgtcgatggggatcgtccccgggatgtgtctgaagcccttgacgtcgtgccggatgccggcgacgaggagcaccttcttgtcggcgctcagggtgacgtcggggccttcgtctgtgagcagggtgtcggcaaagccgttgtcaatggcctcctgcccgaccatccacgtctcgcgggtcatcatgctgcggagctggtcgacctcgaggccggtcttggcgtggtagatctccgcgatggcccgctcgctcgcgtcgaagtccttctggagcttcttcaggtctgcgagggtgtagtagtcgtagagcagcccggcgacgccgtggatcatcaccatgctgccgggatagacctgtacctcgtcgcccgcgcaggcgatgacgctggccgcgctggccgcgatgccttccacgacgacgaccttgtggccggtcag

SEQ ID NO: 5893 - DNA, 2858 bp, Unknown
  gut microbiota DNA sequence
cgaaccaccgaaggctacgccagctgagttacagtcagccccatttggccactctggtaactgcccttgttttaaagaactctcttttgttttgcgggtacaaatataggacattttctattcgctgcaaaattttaaacacaaaaatacaatgaataatctgtgaaaactctacttattctcccatatcattgaccaccaagctaatatttacttatggtgtttatatacatgtttatcctaactgtacgcttataagtgtaaatatgtatataactgccttacttattattttcttcactttttggcaaccactctgtcatttccaggatttacttttgaaaccggataaatgattaaataactctattatgaaaaaaagtagtattatcggtgtgttaattctctgttttgctttttggggtaaagctcaagtcagaaatgaaattcgtgtacccgatccggaaggataccggacattgaaatgtgatttccatatacatacagtattttccgatggtttggtctggccgacggtacgtgtcgacgaagcttaccgggaggggttggatgcgatcgccctgaccgaacatctggagtaccgtccccaccgccaggatattattgcttcacacaaccgatcctatgaaattgcagagaaaacagcccggaataaccaggtaattttaatcagaggaagcgaaattacccgcccgatggctcccggacatttcaatgccatttttctaagcgactgcgacgccctggaactgcccatgatcggcacatcggatatccatcaacccatccagacagatatcgattttgcacggggccaacaccgtacgatgaccttcgtatttgtccgggaacgttcggctgaaggaatccgtgaagctttattacatcgcaggactgcagtatatatggatgagaaagttatcgccgaagaacaatggctgaaagagttattcgaaaaatcgatcgatatcgaggatataaaacgaaatgaaaaaagcatcgttattaccctgaaaaacaattccgatctgaccttccatctcaaaaagacccggcataatcccggtctcgtttatttcagggaatataccatccaacctcagtgccgccatcgtatcgaaatccgtttagaaaacaatatccagggaggcgatatcaattttgaaatcactaacttatatgctgctcccaacaaaggactgacttatagctacaaagtgtaagcggccttttccccttctgaccaacgcatttccgatgcagatccacaagactccggtcccagaccgtccggacgattctcccatccgcattgaaaatgcgtaaatcggttaccttactgctaccggctaaaaattaatttccaactgggtcggaatcccttgttccggatcgtcgggagaagaaaccggattagatacggtaagtcccatcaaccggatacggtaatgagtcagctgcaaaccggctaacaactgcttggctaaaggcagaatttctttcatcgtatacaattcgtgtcctacactgatgctacgggtcttctgtgtaaaatcgtggaatttgattttcagcgtcaacgtatgtcctttgaatccggctttccttaaacgccggatcaattcatcggccacatgccacagctcaataatcagtgcagtatgggttgtcagatctttttcgaaagtattctcacacccaaccgatttacgtatccggaccacctccacaggacgaagatctaccccatgcgagaaatcgtaatacaactggccggccttcccaaaattccggttaagaaattccaacgaacaattgcggagttgtgctccgttatgtatccccagtgcatgcattttatgggcagtcactttaccgatcccccaaaatacttcgataggcaaacgagcgataaaagcagctgctttacggggatggataacaaaaagaccgtccggtttgcgataatccgaagcaatcttcgccaggaatttattataagagactccggccgaagccaccaaccccaatttctcgcgaatctcttttttaatagcccgggcaatgtctacggctaaaggaatattctttttattttcggtgacatccaaaaaagcttcgtccaaagctaaaggttctatcaggtccgtgtattcatgaaagatccgatggatctcttccgacacggctttataatgttccatacgtccccgtacaaaaattaaatcaggacacaatttaagagcttgcatagaagacattgccgaacgaataccgaacttacgggcttcataactggcagcagccaccacaccccgctcctccgggcgtcctacggccaaaggttttccccggtattcgggatgatcacgctgctcgacagaagcataaaatgcatccatatcgatgtgtatgattttcctgttttccattttcttcattcaaaaataaagttttttctttacaagaaaatcatttttacaaactttagtcttcgatggacgctaaatcatagccacttctatcaacaacacataagcctcactccgtgcctccacctgaaaatggtctgtctccgtgatacccataccatcgcgccgcgacaaatcagtaccttcgatacagatttcaccttcgatgacaaaacaataaacgcctgtattcttctggtgcagatgatacccgatctttttacctttctctaactttcccaatgcaaaccaggcatcctgtaaaataccgccaggagcagtgccatcaggagccactatatagccaaaacgatttttcatgtctacctggcggatatcatagcttttatagaccggcttagtatt

SEQ ID NO: 5894 - DNA, 212 bp, Unknown
  gut microbiota DNA sequence
aggcgcttgagtgattcacggttaaggaactaggcaaactgaccctgtaacttcgggataaagggtcctcagggtgacttgaggcgcagagaatcggtccaggcaactgtttaacaaaaacacagggctgtgcaaaatagaaatatgaagtatacagcctgacacctgcccggtgctggaaggttaagaggagatgtcatcgcaagagaagc

SEQ ID NO: 5895 - DNA, 5542 bp, Unknown
  gut microbiota DNA sequence
aatagcctgggcaatacccactctctgttgatatcctccggaaagatttctaagcagacgcttgctgaaatgactgataccgcaacgttccagcactttcttcacagcttgaggaatttctctatccgggatataacgcaaagcggcacaatattccagatattctgtcaccgtcagatccatatgcaaggggggattctgcggcagaaagccgatatgtcttttagcctccaccggatttttactcatactgatacccttgatataaacatccccttccgactgccgcaacacaccacacataatgttcatcgttgtggatttcccggctccgttggagccgagtaatccatatattccatgcttgggaacttcaaaattgatatcacgaatagcccactgtacactataacggtgtgaaagatggtctacttttactattgtctcttccattgatattataactttatattttttagctctactaattcatacacactccattatcaataccagtcgtgactagttgtatgccatcctatctgtttgatagaagccaccttgccaccgacattcttctcaaaaagcagtacaggagaatttatgtttctgatatcataagcctggatagttccatcctcacaacctatccacaattgatccaagtcaaaaaaggcataagccaatgaggtgattttagaaggaatggtagcattgaattttactaccctcatagagaaatcaaaataaaaatccggacgttgaacaaaatacaattcattgccaacagaataaaaatcacgatattttgcatcctctgcgtactcagaactacgataattagaactaaccaaaaatacagaagaggcatccaatttcaccggtaaagtaagcttacgctcaagtcccgcatacttaaaagcagcgctacgattatcaaatccaaaatctcctataatagtaccgtctgcaccaggttcgttataatatgccgtaaacaacaagcttgtaccggtaaatccccaagagatgtgattcttctgcgaaagataaagcatctctgttccttctgcaaatccggaaacaggcacgtttacatgactcttcaaaggaataactcttgttttatatacagaagttttgttatacatatcttctcccacatcctctctccaggttgtagccataacaactctacgattcttggcatcataacaaggaatattctgtccgtaagtagaatgtcctaacattgtaatctcataccccttggcatcaatatagtaaggttctgtaagatattttcccaccaaatagttggcagatctcattcgtgtaaacaaacgtccgtcttcagtcacgataaaggaagcagaaccttctccaaagctgggactgctgggagccttttccctcatggctgcaattttaaaatcagcaggagctccatccaagaactgatctttcacctcgtccaccttcatcatattctgcacattaacctcatacgccacctgatcggtcagtatcacacaagcaccaccggcgctgacatcgcgggatgtttccatgaccaaatcctttggttttccgggtatatcgtgtccattaatggttgcatagacatcatccttcaatttatagttaaccgtgtttttaccattctccgaaacagtacgcgggctgattacagaaacttttgacttatcgccattttctgacaatatgaaccaatcgtccggagcgaatggaggatagaaatacacaaacagtcgggcagggaacgtaattccggtctttttttcaatcacgctgaaagttccccactctcccacatcgttactatagcgagtcaaacctatctttttcacaacctcgtccgtaggcatatcaaaatccaactcctcgctgattaccactcctttgattttccattcataacgcacctcttctgcacgcattgccgaatctgtttcccacgtgaacattttactgcccctgaacttcatgacttcaccatctcccgcataaccagacatacgtttaggagaacttgtattaaaattatcagaccataacggaggatttatctcctcatacgaatagttcccttcgtcctcaaaacatccggtcaacagaccgaataaaaacaatataatatataatcttatcgatttcatgacatcaacttattattagattaaacttccacagacatcggtaggccattctcatcctccgttggattctccgccagccattgcttgaacaatttcactaatttaattgcctcatcaggagcactctttatcatatttccatccaaactgtatgctcccggtatattctccaggaatgtcttgtatttcaaggatgaatagtttcccagcaacccggcagaaacttccagggtccaccattccggtttcacagcatctttcgtcaaatggataacggctttcgaacgttcgaattgtcccacctgcaattcatcgctcggcacaatttcaaccaccaaccggatgccttcctccaaatcattcaaacgggcactgcggttcatccggatttgaattgtatccaatatcaaagaagctcctgccggaatcggacgcgcacggaaagtatacgaattttccagaacatattcatccggagtagcggttgtcatatctttcacaaccttcaaaccgaagtgcagatccttcgtcaaaggtctgccggccaaggcaactactatttctgccatcacatggtcgtctgtcggcttggcaaaaaagaatgtcacatccgtagaatcggctttagcagtaccgggagcttcctcatccataaaatatttatagaaataaacttcatggcgttctccaaaaggttcgatatcctgttccgtacatgcactgaacaacatcatccccaaaatcgcaaacaatataaagattttcattttttccgtttttaaatggttacatactctgattatcggggataggtagcatatactctgatttattcaactcacgctcctctttctccttgaaataaatctttgcacctaaccgtttgtatagataaaacaattgtccctccgaaatccattcccgctgggcatcacgaatcaaatccctttggaacatctcgaaatcccgtgccacctccaacggctccatcgttttccattcatctccgacttgtgccgtttcagaacgtttctcgcgaatttcattcaagatttcataagcttcagcgaactgatttttccgggcataacattctgccataatgtaacgcatttctgtcgcacggattacaggcagaatacgtatattcttcttgcgaatttctgcattgtcactgcaataccatttaccggaaattttataatttccataaatgctattatcctccggtctatacaacaaaaacctggaacgaatgtccatctcagattcgtctgtctgtccgtccggacttttaaatattttctgattatccaaatcgagcatcagccaatttccctgattcattccatctgctttttttctaaagaaacttcccaaactataattgtcgtaagcctcctcattatagactgcaaaaatcaaattggaaatacacttcaaatccttcttgctttcaaaatcattaccacgcaactcccaaaattcatcttttgagaacatatcgtaagagctgccctgtgtaccggttgctttgaatttcaatacagcatcagccatctgaaaagcctcgtcatacattcccgcatactgatatgctcttgccaacaatgctgtgatagcataataactcaaccggaaaccgcgtccctggaaaaaaccgtctatcacactcgaagattgatgtcccggcataccccattcaaactctccattgaaacgagtcttgccggatgcgctcaaactcataccccaggccgtagtatcaaactctattgtaagttcgcgagctttattcaaatcgcggataaccttctccataaaaggctttacagctatcccgtttggctggatattaggatattcttccacataaggcacccgtttttctccgtcatcatgaatcaacgccggcgcaaacaaccgcaataaatcgaagtgcaccaatgcccgacaagcatatgcctcccctaaaatcatcttacgctcgacctccccctctgcaaaaatatcggcagatgcacgctccagattctgaatcagattatttgcattagccaccacattatatccatccttccagatattgtcgatagtcggtctcaatgcagaattgtaataatcatagtttcgggctatcttatacatattagtcccctcctcgccatatttccaagcccaggtatattgccgtgacatacagtccaccaatccaaactgaagttccactccataaagattacgggatgccatcgcttcgtaaactcccgccaggacagaacgatagccatcacccgttgtaaacagcttatcgctcgtagcctcaccttccggttgcaaattcaaccaatccttgcatgaactcaatgacaacaaggataatagaatcataatttgtatatatattttcatactcaaatattttattgttagaatcctaacgacaatgtaaagctatagttcttcgcataaggatagcttgttccgcgctcctgctttatgttcgaccagcggcaaacatcattcatgttaaaacgcaatcccaacgaagtcagtctcattttgcgaatcaagtcacggttaaaatcataaccgcaagagatactgctaaatgccaaataattattatcctgtacgaatcttgatgtaggctgcgtcttttgtttgttcttcaagtcaaagaacggagctatatcacccggattttgccaacgctgagtcagtacacgacggtctacgttgcttccgtcaatatctgcctcttctaccttgtttttaatggtctcgttataatcctgagcaccccactgatagaggaatgttgtattaacataaaaacctttccaagccacattgataccgaaagaaccttgtgcatccggactcttgtcacccactaccacttcatcagcggcattccatacatacgtactctgaccgtttctcttacggaacagttccttaccgtttgacgggtctataccataagaaggcacagcataaatcgcagttgtagatgctcccacataatactgtgtcaacgggatatagagcaaatctgaataatctccgccctgtccctgattctttccattgtgaaaatcctggatattcttattatatctctcagcctcctgacccaattttgtaatctcattcttattggaagccagagtagcatttacagcaacagtccaattatcattctggaaaacagttgtattcaatttaatctcaaaacctttgttcaaaatcgaaccggcatttgtgtaataagtagaaaaacctgatgatgtgcggacagacagctgttccaactgattcttggtctccttgcgataatagtttccttccactacaag

SEQ ID NO: 5896 - DNA, 10884 bp, Unknown
  gut microbiota DNA sequence
tgttttcaactggtcaaattcttcttttgttagttgaaacataaaatcagaggggaaacgcttgatatttctttgaacggatttattcaaattgccggtggttacctgatacaattcagctaaatcgcggtctatcattactttatgtccgcggatttcatatattttgctctgtatgagttgtaagtctgccataaacacatagtttccggattgaatcctataaatttatgaaaaattctttatttatcaaagagggtaattcttgggattacactagagtgcgggagaagtatataaaataattgaaaaatgagaaagattgattttggtatgtttagaatgttttgtatatttgtaatgtccaacataacacaatggcggggagacctgccgataagagcaggtatttttatacctgttactctccatatacggcggtttcgtacccccgtttggagtgttaatgcacccagctcagccattgtgttgttggacagcgggaaaggcgaaaccgtttgtattttgcttattcttgctggctatttagagtagttgtaaaaagtaatatggatattacaagtattgttacttttttgcatcttctttaaaaggttcattaggaagaaaatctttcggagagcattttagcgcaattgcgagtttatttaaatgtgaaatgttataacgtttaatcccagattctctttcactaatgaatgtattggaaaaaccaacttcatctgcaagttgttcttgagtgagattgagttcttttcttcgttttttgacgctttcgataacgaaaagatctattttttccttttttctattcatttatatctatttgctacaaagaaaaaggataaatatacagattaaaccaccctataaggttgttttggctataaaagtgttgaaagcaatgaaaagataaaatgaggataacataattcagattattagcctaaaaccaccaaccgatgtaagaaagcaagaatttacacgaaaaggaaaatagccaaggccgcattaaaaatatatgaagactggaatttatatcaacgccctattaaataaaaggtatggaatctcctgcctgacttattaacccaatttaaatagagagtttttaattatttttagttataaaccgaataaaactttaattatggaaaacgaacaacatctcgacacttttcaaccgacagagaatcagtattccggcttaggcggagaagagtttcaacctgagaaaccagatctaacgggtaagtgcctgcctttattatctgataaattcgccggatgataaggagaaaaaggaggaaacagggaaagagttgagcaggttggaggcattgtgtaattataagtaattactatgataaaacctgttgaagtataagacaattaatgattttagatagttctttgaaagtttgttttgttatgttagagaatttttgtacatttgttacgtactacatactcgaaggtagggaaacctgccaatcattgacaggcattttttatgcttgtacactccatatacggcggtttcgtatccccgtgcggagtgttaatgcacccgctgccttcgaggtgtagtacaacgggacgagcggaaccgtcttttctattcgcttcaacaaaattttttactatgaaaacagaaatgaaaaatatttgattgatagtatgttattctatgccctcaaacaatttgcttaatgtaattccgagtgctttactaagtttatataaggaagtaagccttatatctatactgccggattcatactttgaaagattactattatcaatatcaacgatagcttcaagttcttgtaaggttaaagattgattttttcttagctgttgcaatttttgaccgaatttgtgtaatattaattcatcatcttccatatcctttgttttaagttcataacaaaggaaaaaatataggttgacactctttctggtttataaaccagaaattgataagggacaataaataagtaaaaaaagattagaatatacattatatcaataactaaaatataacagttcaattatgaaaaataacaaatctccaccgaattaagattatttcctttaggaaatttacaatttatgagacgtgatttacgtcttactatatctaactattataattaaatacaaacatggaaacagatcatcaaaacacttttcaaccgacagagaatcggtattccagcttaggcggagaagaatttcagcctgaaaaaccagatgtaacgggtaagtgcctgcccaaaggatttatttcgacggacaacgaacctttgaaacacttttatctgcaaatgtcccggatgatgtgtccttcggtcaccgcagactcaacggagtgtgaaatattacagatcctttatacccgtgtaaaaaagagctgcaagctattaaaattactcgacacccacccgtggagcgatatcgatcccttcctgatcaaggcctgcagcttttatctgttcatggattcgtcggattcccagaaagagaaacggcgcctgaacaatatcctttaccgtcagagtatttttatgggaaagatttcggagctgcatgacctgatcgcccacgatctgatcttcttctgccgggtaaaaacggacctggaggaaatgttgcgtatcgatccttccgatccggccagtatagatccggttctgtccggaaaggatacagggacgataaaataaacgaaacaatgcaaacagggaaggaggtgaaccggaaaaaaatgaagattccataaaaaaacagcgggggactgggtgacattggcgtgctcgttcagtcctcccgcctcaattaacattattactaatattaacaccgacaaagttatgcaaaaaaacgcatgcagcgttagcctgagcttacgaaagcgacggctgaccgccattattttctgtttattgtctgcttttaccctgcccgtccctttgcaggcaggagtgccgcagcaacaatccacttatccggtcaaaggtctggtgaccgatgctaagggcgttcccctgccgggcgtgaccgtccgttacggaattacgggcggggtgaccgacaacggtggacgtttttcactccgcctgcccgaagagcgcggcaggctgaccttttcgtgtgtgggctataagacggtgacggtgggttaccgtgccggagaaacgctccgtgtgcggctggaagagagccgtgaatcgctggaggaggtgacggtggtcgcctacggggagcagcggcgcggacaggtgtcgggatcggtggcgacggtggatgccgcccggctgcaaaacaagcccgcatccaacgtgctgacgctggccaagggccagatggcgggggtgtatatcgcgagccagtcgggcgatccgggcggcaacgatgtgagcatcatcgtccgcggtgcgaacgacctggcgattgccggcaaccgtaacccgctgttcgtgatcgacggggtgatcgcctcggacgacgccagcctcaaggtgggcggcaacccgctcacctcgctcaacccggacgacatcgaaacattcaccgtattgaaggatgccgcagcggcggccatctacggctcgcgggcagccaacggggtggtgatcatcacgacgaaaaagggccgctacaaccagcaccccctgctctcggccaatgtcagccacacctttatcctgcagcccctgctgccggagcggatcggcgggaatgccgagcggctcgcccgtctggaggcgatgaaaaattatgcgggagtgtactacgaccgggaaacggattcctaccgctatccggaaggttacgccctgggcaagccttacgattatttctggaacgagggcaacggcgcggacatgaccgtgtatcaggacagcctgaaccctttctataacaattccaccgatctgatggcgtattacctgcgccccgcccatgccacgaatgcgaatatccaggtccggggcggggcggagggaatcgcctattccgtcggcctgggcttttacgatgaggcgggaacgctgcggggtacgggcaaccgccgtttttcggccttctcgaacctggccttcaagcctgcgcaccacctttacggcaatttccgcttctacctggcctataccgacaacaaccgctcgcgcaaaggggtggatgccttcaatccggcgccgacggcttattccacgctgccggactttcttttcacctcgacggtgctgcccggtcccggaacgccttatttcggcgagctgacccgccgctatgagagcaccagggagaagaacgacagctacaagctgcgcacttccttcgacctgacgtacgagatcgccgacggcctggcactgaaatcgggcgtggcggtcgattatctccagaacaaccagaacgttttcctgccgaaggaggtgaacgaatacggtaaaacctatagcagcggcacgatcgcccgccatctgatggtgctcaacgagaacctgctgacctaccgccggacgtttggcagcagccatacggtcgacctgctgctcggtttttccgtgcagcaggacgagatgaacaataacacgggcaaggcgctcggggctgcctcgaacaccatccattacgccccttggtactcgcaggtgtacgatgcggaggcccggctcgacctgaaggattattattcggattatgagaaaaagacgatggtgggcctgttcggccgcctgaactacaattacagggagcggtattatgcgggcttcaccctgcggcgcgatgcttcgtcgaccttcggcgaggatgtgcgttggggctggttcccgtcgtattttgtggggtggacgtttacggaggagccgtttatgctggcgctgaaaccttggctgaattacggtaagctgcgcttctcacaggggcgtacgggccgtatcttcgaatatccctatctggcacagggcgaactggatcagggcgctccctatttggggcatccgactgtggttcccgaatggtgggcaggtgtctcgaacagcggcctgacctgggaaaagacgacggaatacgatgcggggctggacctcgggttgctggacaaccgcatcggcctcactttcgattattacctgaaacggacgcgcgggttgctgtacaatcccccgactcccggcacgcatacgggtttcctggccccgtggcggaatatgtacggcatcgacaacgagggtgtggagctggaggtgaagggtgagctggtgcgcgggaggacctggcagtggaacctgtcgttcaatgtaagcaggaaccggaaccggctggctaagagtttgaacgggcgcgatttccagaatacggcggcccgctttgcgaacaacctttcggtgatcgggctgccgctttacgggatttatgccttcgacgaccgggggatttacggccgccggagcgacgtgccttcttattatgaggacggggtgaagaaatacctccgcggagaggggagcgcctactaccgggcgggcgaccggatcatcacggacgtggacggcaatggtcagatttataattacggtacgctggcggaggaccgtatatatatcggttcccccctgccacagtttcagggcggtatttccacggacctgatgtggaaggggctggatgtgaccgtgctgttcaatttcgtttgccgcaagtgggtactggatgctgcccggggggcttctctgggtacttaccttgcgctgaacccggcggatatggcgcgtccttatctgacgggtagtctcgacgggctgttctgggagcatccgggcgacggtgcgccttatccggccaaccggatggagaacgggctgtataatttcgccactaacctggcctcgaacgctcagcggatcagctacctgaaactgcaggcggtgacggtggggtatacgctgccggaagcggtgcggaaagcgacgggtttcggtgcgcggatcttcataagcggtgagaacctttttacgctgacggactaccggggcggcgacccggagacggtggacccgtatacgggagtggacaattacaacgcctatccgctgtcgcgccgctttacaatcggactaaccttaaatttttaaacgatgagaaaacagatgatcggatatatcgcagggctggctttattcctcctgtcgggatgtgacagtttcctgacgcagttgtcggagaataatacgacggtagcgaaccatttccgtagcgaagcggatgtggaagcagcggtttacggcatgcacgcccagttccgtgaggtgatggggagttttacgcaggactaccgcgaccgcggtctgctgctggataatttcggccttgcccgttggcgggaggccaatgagcataacctttcgggctatacggctacagccgtggagttcagctggatgtacgaatataaggccgtgagcgcggccaatctggtgatcggtaatctttaccgggccggtctgccggaggagcgttaccgtttttatatgggtcaggcgctgtgtatccgtgcctgcctgtatttccagattatccggttgtggggggatgcgccgctggtgctggaatacgaggatatctcggagaaggggcgtacgccctggcgggagatcgccgggcatatcgtggcggacctgctgctggcagcggaatacctgcctcctgcggatcagttgaaggatccggagggtaaaccacttacggcccgtcagatcccggggcgggggacggcgtatgccatattggccggggtgtatgcgtggatagcgggctacgggcaggaaccggaatattatgcgctggggatcgaagctgccgggaaggtgatcggggacccgaattaccgtctggtggccagcccggaggaggtatgtacggaggtgcttcccggaaattcggaggaagggatcttcgaggtgtgctatgacgacagccggggggagtataaggatttcgggagctatatcggggggacggtcgaaaaatggccggtgttgaaagggacgacccctgcttcgcggcgtaaattctttatccgcaacgagacggtggaaaggctttacacgccggaggatttgcgtttacaggcctattttgccgatttcttccggatgaaggaagagccggtgtctgtgacacaaggagctgcctatgttcggatgtggcgggaggtggaatactactcgggcggaatttatgacggtacgccgcgtacgctgttagcgaacgatatcctgatccgcctgccggatatcctgctgctgagggcggagatgaaagcggcgacgggtgaccgggaaggggccgttgccgacctggatgttgtccgccgccgtgcgggcgtggccggttattcggaggcggagggtgatctccggcgggcgatacagctggaacgcgacagggagttgctgtttcagacgggggtgcggtatttcgattatatgcgcaatcacacctataacctgctgaaagggggcttccgtgatctgacggaaacggatgtggcggccggggctttgttcctgccggtatctctggatgcgatgaacaataacccgaaggtgaaacagacggcttactgggtaggaaagttttgagccgtcgatttataatctgtgttttcctgccgggggatgcctttccggcgggaaaacaataaaaaatatatggaatatgaaaaattatatgataggaataatgttcgtcatcgcttgcggaacaggcggttgtgaaaaagatacgttccacgatacaggcctggccgacggggttttcgacggtacggcctgggaatatatgcaggcggggcacggcaactgggactcgctggtgatcatgatccggaaggccgggttggcggacctgttcgacggtaaagacccggattgtccgcagatgacggtgttcggtctgacgaatctgagtatcgtgcagttccttttgcgaacgacggacggggagggggagctggtttaccgctcggtggcggatatgccggatgcattgtgccgggagattctgttgtcgtatgtgattgcaggacggcatgtgcgggtggatttcccgtatgaggtgcagggtacgctggaagggggaacggtttttgaaaccctgaacggtctggatttgcgggtgtaccgggtgaaaggcagctggcaggggatgccggacatcggagcggacggcatcggtttccacttcctggaatcgggtcatacggggcacgtggcctcgggggatatcatgaccgataatgccgtggtgcattcgttgtcgaccacctttcagatggccgacccggtggtagacggtggtgaggagaggacaggaggacgttgaagggaaattcggttaaaattcaaatgataaaagaatatattatgaaaataggaatattaggaatgctgatcctggcagggatcgggttttacagttgcgatgatatcaccaagggatatctggaaacgggcgaagccgggtatgtcaccgatacgctccggattgcccttgctccggacagccgggattcaatcccctatcaatcggagaagatacagggggtgatcggtacttttcccatatattacgaactggcagccttgcgtgatgactcgggccgggaagtggaggccgtgatcgcctcgcaggtagaggtggtattgaccggggtgttccggatcgcgaaggatcatacgatcccagtgggcacatacagggccgacctccgggtgtggaacctgggacgtagctttgtgttgccggggatatacacgatagtggtggagcctgctgccgaaacggctgcttccggaagtagggaagaagggtagcaacagagaaaaccttgccgcgatggccgctaatagccatcgcggtttttctttttgtcagtttctgtgttttattggattttgattattgctttacaataattttttttgcataaatcaattctgtgaagtatgaccattctgacaaatctttggtgaggattatgcttttacttgctagggaggttgttttagattaaaagacgatttatcgttagttggtaatatcttccaatttaaatgtctttaagcagtttacaggtgatattacccaggaatttgaacagttgtctgttattgttttaaaaaattatttactttctcatgctattgtcaagcctttaggaaagcaatcggcatttcatggatatgccagggctaaagtaaagcagctgactaaagaaatgaaggtggaagttgacgaggaatatattgagaccacttctcctaaaggtactcagtatttaggtggtgatctggctgtctggggcttgtttccagatgatgtaggaaattatatttcagtttttggtcagtgtgcctgtagaaaaaactggcctcataaattatcggaaactaaacaatacaatcgttttctgcgaatgtatctgaataaaatttcctatgctctttttattccctattctttggtagattaccaaaagtctaagttttttgaacatcattgttttggagaaaatattctggtttttgaacgaaaaagaatcttatctcttattaccgatgaaagtgttgtaacttctttggagacacagaaaatcgtaaaggaatgcattgtttttgaggaaaggattgtctgagaaagaggggaaagtttttttctgaattttattgttgattacagcttccggttttagttttccgtactaaaagtttatctttgtcagtaataaactgactgttatttgtgataatgaagaaagataaatcggtggggaatatactggagtttccggagaaaatattcatcggagatataaccggacaacgtgtatgtgtaaaaatttatggtcctgaatcgctggaaaatcaattggcggtggtaacccattatttgcataatcagaatactcacgcagaggatacttataaagaggatggaattgcagagataaagcatctggttcaatatttctttcctgatttggtaaatccggatcaggtggctgaagatgcacggcagtatggtttgttccgggatgtctttgatataccctatccggttccggaaaatccccggtttacttttatagatttgtttgccggcatggggggattccgtttggctatgcagaaacatggcggacggtgtgtttattcttcggaatggaataagtatgcccagaaaacttattttgctaattttggggaaatacctttcggggatataaccaaagaggaaacgaaaaagtatattcccgatggctttgatattctttgtgccggtttcccttgtcagcctttttctattgcaggggtgtcgaagaagaatagtctgggaagagcaaccggttttctggataaaacgcagggaacgcttttttttgatgtggcagaaataatccgccgtaagcgtccgaaggcttttttccttgaaaatgtgaaaaatctgttatctcacgataagggaaatacatttaaagttattgaggggactcttcgggaactggattattccatttattataaggttttagatggtcagggatatgtacctcagcaccgggagcgtattataatcgtcggttttgataacagatattttcacggtaaagaaaatttttcatttcccgaaaaaccagattcggtggcttgtattgctgaaatacttgatcctgaagttgaaaagaaatatactttatccgataaattgtggacttatctgaaaatgtatgcagagaaacacaaagcaaaaggaaatggtttcggatttggtttggtagataagaat

SEQ ID NO: 5897 - DNA, 63337 bp, Unknown
  gut microbiota DNA sequence
ttttcgaatgggaaaaagagggtgaaaaaccgggctacgcaacaggtgattttggatcgtttagagtggctggtgaccggtgataaggccgattctttagctgtgttttgccggaaggggaaaaggggatatctgaattgttataccggtgaagtggtgattcctgcacaatatgaacgggcctgggtgttttcggaaggattggcggctgtgatgtcgggagggaagatcggttttatcgaccggcaaggacggacggttatcccgccgacctggagctatccggtcggtagtcaggagatggattatctgtttaaaggaggctattgtgccgtcttcgacaatgcccggcaatgtggtttgatcgatcgcaatggacaatggaaagttgcacctcgatacgattatatttatatgcccgaagaaggacttcggatacttcaaaaaggagatcggtggggggttttgggtgattcgttacaaatccttatgccagtggaatacgattggctgaaaatagtacccgaagggatagtctgtattcaggagggcaagcagcaagtgatcggaaaagatggaaaaacggtggtccggccttttgtatatgatgctatccttcccctgtattattctactggagaatatttcgataatggagaagaaaggatgaaccgaagccgctatttttcttattcggtttggaatcccaaaggaaaccggtatggactgatggatgcagaaggtaaacggattacagaggctctttatagtgatatcgaggccttgtcggatgatctctatctatgctctatagaggatggactttaccggataaccttgaattataacagataaactttttcaaggctgctaaacaggataaatctttgccagagaatgaatttattttgtaaatttgacgcgaattggtaaataggattggaccgacaaaaagtgtatacttatgaaatatctggcaagatttattatgtggctggccggctggaaatacaaaggtgaattgcctgcagagaaaaaagcggtgattatatctgttcctcatacttcgaattgggatttcttctggggagaactggcttttttgagtcagggtattccggcttttattttgatgaagaaggaattcttcttttttccgctcgggatgattctgcgggcattgaatgtgataccggtggatcgcggtaataaagatagtcagttggtagagcagatgattaccgagtttaaacaacgcgattcgatgtatttgtgtatcacccctgaaggaagccgtaaaaagcggaagaaatggaagaagggttttttggttattgcgaaagcggcaggcgttccggtttatttgggccgcatcgattataaaggaaaatattgtgaagtggggcctttgttttatccgacggaggatgtggatgctgatttagcctatattatgagtacttaccacgatgctaatccaaagtatccggagaatttttctaatggtgattagtacgctccggagaatagtttttttcggtagcgtatgtatttttcttggaagtgccggaggaggtagcggtaaccaagaaaagaggcagaagcctgttttgacagaagaagtaccgaaaatcaccgttgagcgtgtcgctgcggataccaccggacaaaaagaagattccggaaccgaacggcggatgcgccaattaggattggtggatatcggggaggtcgatcctacgattgctgtacatttggtgtatgctacatccgataattttgccggaaaggtgctgtatcgggatatccggaaagcatttctgttaccggaggccgccgggcgtttagcagaagcccagcgaaagttgaaacttctgaggccggaattgagtctgctcgtatatgatgcagcccgtccgatgaaggtgcagcaagaaatgtgggatttggtcaaagggactgaaaaccgggtgtatgtcagtaatccccggaatggtggtggattgcataattacggtgctgctgtcgatctgactttggtcgattctttaggacatgttttgccgatgggaagtgagttcgattatttcggggaggaggcgaggcctgaccgggaggaggcgatggtgaagcaagggcggattattttacctcatttgcacaaccggaggttattgcgtaaagtgatgaccgatgcgggattccgggttcttcccagcgaatggtggcattttaatctaatgtcgagggcagaagcgagggtgcggctgaaagtgatagaatagtttatataaatctgattgaatgaatacgacgatcatcggtgttgccggaggtacggcatcggggaaatctactttggtaaaaaagttgcaagaggcgtttgaaggagaaagtgtcatcacgctttgtcatgattattattataaagcacatgacgatttgtctttcgaagaacgaacaaagctgaattacgatcatcccggtgctttcgataccgatatgatgattgaagatatcattaaactgaaaaaaggacgatctgttttccggcccgtttattcttttgtcaatcataaccgtacggataagaccgtcaaagtcgagccggcacaggtgattattatcgatggaatccttattttggaaaaccggactttacgcgaattgatggacgtgaaagtatatgtagataccgatcccgatgtgcgcttaggacgccgtttgttacgggatgtacaggaacgagggcgtagtatagagtcggtattgacccaatatttttgtacggtaaaaccgatgcacgatgagttcgtagaaccttcgaaacgttatgccgatattattatcccggaaggagggttcaattctgttgcggtcagtatgttgattcataatattaattcattgattcaccacgaatcggaaagggataggagatgaaaatagcattggtacagtcccctctggtctggggaaagctgcaggagaatttacagaattttgacaaaaaaatggcgaagagtgaggattgcgatgtaattctactccctgaaatgttcacttcgggctgtatgatgataaagaagtcggcagagatggcatttgccgctaaggaatctgtcgcaaatgcatatcctgtcgtagaagaaaagatgctggcttgggcgaaacgtcagcatgctttggtaatgggatcgacggtttaccgggaaaatggaaaatattataatcgcttgattgctgcttttcctgagggaaattgccggtattatgacaaacggcattgtttcagaatgggcggggagaacgagcattttactcccggagaccggcagttgactttcgaatttcggggagtaaagatagctgcttttatttgttatgatttgcgcttcccggtttggtgcaggaacacacaaaattatgatctggctgttttcgtggcgaattggccggaatcgcgccgcgaagtctggaaaacattgctgaaagccagagcgattgaaaatcaggcttttgttgctggcgtcaattgtgtcggagaagatgataacggtttgacctattccggtgattcgatggtcgccgatgcccgggggagggaggtcggaagtacctctcccggaaatgaagccattatccgggtggaactggatatagagaaattgaggcaattcagaaaaaaatttccggtattggacgaccgggatgactttcttttccgggagaaatgaggctaaaacggagtttttgttatctttgtgcacctttattcaaacgtttgttataattttaatcgatataaaatgaaaagtatattaatgacattcatgggagttggaacaataatgaatctgactgccgggaatttgtcggaagaccggacagatcagccacaaaccggtggcggtaaggtattgactatggaggaagcggtacttgggtatcagctttatccgaagaatttgtatattcaatggcagggagaccggaacgtactgacttatccggaagggacgaacctgatgggtgaggtggccggaaaagaaaaacccgaagtattgatgacattagctgaactgaatcgtttgctggaggcggatttgaagggatggccccaatatgaatggaaagatggccgtaccctggtgattatgcgccagggaaaaagatatgagatcgataccgataaaaaagtgttggcgtatgtttttcctattgccaaaggagcacagaatgtgacctctaacggacaggaattactggcttatacgaaggctaacaatttatattatgtagatgctaacgggaatgaatttgccgttacttccgatgaagatccgaatatagtcaacggacaaacggtgagccggaatgaattcgggatcaacggaggcattttctggtctccggatggcaaacaacttgctttctatcgcaaggacgaaagtcaggtaggaaccttccctttgctggatatcaattccaggatggggactttgcgggagatcaaatatcctatggcaggaatgaaatccgagcaaatcagtctgggggtttatcaggttgcttcgggtaagaccgtttttttagacgtagatgacttcgggcgggaacaatacctgacgaacatagcctggagtccggcttccgattatatttatgtgcaggtactcgacagggctcagaaacacatgaaattgaatcaatacagtgccaaaaccggtgaatttgtgaagaccttactcgaagagcagaacgagcgctatatagaacctttgaccccgatcgtgtttttgaaaaacgatccatcccggtttatttaccggacgaataaccgggatggctattttagtctttatctgtgtgaggctgcaaccggaaaagtgttgaaaaggctgaccgatgtgaatgccgatgtcgaaatggtggggcaggatgataagtttgtgtattatacttcggctgaagtaagtcctgtcgataatcatttgttcagggtggaagtgaaaagcggaaagaaaacccgtttgacacaggccgaaggttggcataaagtgacgatgagtggcgatatgaagtattttgtagacaattatagtagtctgaaagtgcctcgtgtgattctgctggtacaaaatgacgggaaaaaagtgaaagaattgttgaaggcggaagatcctaccaaagattataatttcggtgagattacgttgggtacggtaaagagtgccgatggtaagttcaataattattatcgtctgatcaaacccatgaatttcgatgcttcccggaaatatccggttatcgtttatgtttatggggggccacattcacagatggtaaagaatacctggcaggcagaaatgcgtcgttgggaaatgtatatggcacaacacggttatgtggtttttgtcatggataaccggggtacttcgaatcagggggctgaatttgaaaaagcgattcacggacaatgtggtcaggctgaaatggccgatcagatggaaggaattaagttgctgaaatctttaccatatgtcgatgccgaccggatcggtgtacatggatggagttacggtggttttatgacgatttccctgcttaccaatcatcccgacgtatttaaagtggctgttgccggcggtccggtgatcgattggaaatggtacgaagtgatgtacggcgaacgttacatggattccccccataccaatccggaaggatatgcaaaggtaagcctcattcataaagccagggatctcaagggaaaattactgatctgtcagggagctatcgataatacggtggtttgggaacatagcctgagttttatccgggaatgtatcaaaaataatatacaggtagactacttcccgtatccctgtgccgagcacaacgttatgggaaaagaccggattcacctgatgcaaaaggtgaccgattattttgaggattatttgaaataaaaaggagaattgtaatcagaaaggatgaggctatccgattttgaagttgtccttcaatgggatagcctcgtttttaagaaattttattttcttccgtgatgacggataaagaatgagcgtaagttcaaattctttttatcagaagggagtaaagaccgtactttgagattatcactatcattatcaattgcaacataggaataagagtacggagagccattgatatattccgttttaatggttttatccgtatttaaaacgtatgtcatgttttcgctatattcgttttcgtaattttgttccgaatctttctcgtaatattcctccgtatacgaaaccgggaaataagccgatgccttccctagcataccgactaacgcaaaaacatcggcatcctccatatcaaggacctttgcctgtcccaaagtatattgtcccagttcattcttttcttccccatactcgattgtacaagtagaaccgtattcatatttttctccatcttctgtactttcttccttggtaaccaccttgatcaggtttccatctttccaggtgtaagtcgccttgtagcttccttgagaagaaaagctttccccatcctccttcccactctcgctggaagattctatataagatactaactgaccgtttccgttgtatgaaaatgaaatcttaccgctacctttatagctgtaaccatcctcattataattccaggatgcgctgatgcctgtgacgtatccgtcactgttaaacgacactttggcttcttcatcatccatgatcacaactcccttgtcataatcgatctcgccatacacgtaagaattttttttaacttgagtgcaacgattgttatcatcgtacacgaaagtgtaatccccgatacgggaaggtaactttccggcgtatgtgattgccggcccttgtgggattttgtcatcatcatcatcgttacaagctgaaaataagcacactaccatgagtgctgttcctcataataattttttcatttgtttttctattaaaaatttataaataatctgtttgcaaaattaattaagcccattgaaaaatccaattcataaatttttttatataaataggttcggtcaaaaaaatcggatacactctgattttcactttttatatctaactttgcaatttaaatccatcataaaagaagttatgcgtatcgatatattaagtgtggtgcctgaattactgatgagtccgttgaaccattcgattatcaagcgggcgcaggataagggaattgtagagattcatattcacaatatccgggattggtcgaaagataagttccggaaggtagacgattaccctttcgggggagaagcggggttggtgatgatgattcaaccggtattcgattgtattaacgagctgacttcacagaggcagtatgatgagattatctatacagctccggatgctccgacctttaatcagaaaatggcgaacgaattgtctttgaaggagaacatcatgattttgtgcggtcactataaagggatcgaccagcgtatacgggattatctcgtaaccagggaaatatcggtgggggattatgtcctgacgggaggagaattgcctgcctgcattatgacggatgcgatcgtaaggctgattcccggggcgatgaacgatgagagttcggctttgagtgattcttttcaggatgatctgttagcgcctcctgtatatactcgtcctgcggaattcaacggttggcgggttcctgatatcctgctgtccggtaatcatgctaaaatacgggaatggcaggagaaggtcgcttatgaacggacgaaaacattgcgtcctgatttactcggggagcaaggagatttttgatcgtttttttataaaataattaattgtaaaacagattattattcttacctttgcggccgtattcaaaataatgtctaactcattagataggaaacaattaaatttatgtcagaagaacaaaaagagatgcaggtggaagctgcagaaaaagccgcaaagaaagtagctccggtaacaaccgctgagccggaagaaaattttgattgggatgcctatgaaaacgacgccgtggtaccggcatccgaaaaagatgcgttaactcaaaaatacgcagaaactctttctaaagtaggagagaaagaagttgttgaaggaaccgtaatctctatgaacaaaagagaggttgtggtgaacatcggctacaaatctgacggtatcatctcattgaacgaattccgttacaatccggaactgaaagtgggagataaagtagaagtttatgtagaaactcaggaagacaaaaaaggtcagttgaccctttcacacaaacaggctcgtgctctgcgcagctgggatcgtgtgaacgaagcgttggaaaaagacgaaatcatcaaaggttttgttaaatgtcgtaccaagggcggtatgatcgttgacgtattcggtatcgaagccttcttaccgggctctcagatcgacgttaaaccgatccgtgattacgatgtatatgtcggtaaaacaatggaattcaaagtggttaaaatcaaccaggaattcaaaaacgttgttgtatcacacaaagctcttatcgaagctgaactcgaacagcagaagaaagacattatttctaaactggaaaaaggacaggtacttgaaggaactgttaaaaatatcacttcttacggtgtattcatcgacctcggtggtgtagacggattgatccacatcaccgacctgtcatggggccgtgtaaatcatccgaacgaaattgtgacgctcgatcagaaactgaacgtggttattctggacttcgatgatgagaagaaacgtatcgctttaggtctgaaacaattgactccacatccttgggatgctctgagtgctgacctgaaagtaggggatactgtaaaaggtaaagtagtggttatggctgattacggtgcatttgtcgaaattgctccgggggttgaaggactgatccacgtttctgaaatgtcatggtctcagcacctgcgttctgctcaggatttcatgaaagtgggagatgaagtagaagcagttgtattgaccctggaccgtgacgaacggaaaatgtctttgggtatcaaacagctgaagtctgatccgtggcaaaatattgaagagaagtacggtgtaggtaccaaacataccgctattgtacgcaacttcacgaacttcggtgtatttgtagaaatcgaagaaggggttgacggattgattcatatctccgatctgtcctggacgaagaaagtaaaacatccggcagaatttactcagatcggtgctccgattgaagtcgttgtattggaaatcgataaagaaaaccgtcgcttgagcttaggtcacaaacaattggaagaaaacccatgggatgtattcgaaacgatcttcaccgttgattccgtacacgaaggtacgattaccgaaattttcgataagggtgctgtagttgcattaccttatggtgttgaaggattcgctactccccgccacttagtgaaagaagacggaagtcaggctaaagtggatgaaaaattggaattcaaagtgatcgaattcaacaaggccgctaaacggatcatcgtttctcattcacgtgtattcgaagatgctcagaaatcagaagagaaagcaaagaagaacgctgaagagaaatctactaaaaaagcggttaaacaggtgaaagaaaaattggaaaaaaccactttgggagatatcaccgagttagctgctttgaaagaacagatgactgccgatgcagctgctgctaaagaagagaacaaagattaatctcagatttcagattctggatttcagatgagatgcatttggaaaagtcttcgtaacttgcaaacgaaatctcaacctgaaattgcagatcggaaatgaagtttgaattaacgatattgggaagcgggtcatccattcctacttccaatagaaactctgccgctcaggtacttcatgtacttgggcggtattttcttatcgattgtgccgaagctacccaacatcagctcaggcgttttcatgtgccttataataagatcaatcacatctttatttctcatctccatggagatcatttttttggattgatcggttttttatccactctttctttacaaggcagacggggagaaatgcacatttatgcagagccgcgtttacaggaactgttcgggtgccagatgaaaatcttgcatagccgtttcacttttcctttgttttttcatgccttatcccgccgcgaagaggtgatttatgaagataacgtggttactgtgacggctttcccgttgaaacatcattatgacacacccgttagtgggtttcttttccgggaaaaagaacgcgaaaggactatcctgaaagatcggactgcggcctggaacgtaccgatagcgtttatgcaatacctgaaacggggggaagattttataactccggagggagagattgtggctaacgaacttttgacggtagcgccgccaccggcccgttccttcgcttatatgacagataccctgtttcgggagcgttttgccgattatgtcaagggggtggatttactttatcacgaagcgacctatatgaatgctgatgctgttttagcgaaagaaagttatcacagcactacggggcaagcagcccgtattgctgagttagccggagtcggaaaattattattgggtcatttttcggcccgttatacagaatgctcggaacttttggctgaagcacgggaagtctttcccaacacttttttgtgttctgacggagatctttttgaagtgcctgctgtaaaaagaagaagctgatgatcgatacccggagaaagtgtgatatatttgcgctgaattaataatctgaaaatattttttgaataagaacatgtgctttatttctgttaggggcatggatgtgttgtgtggcctgtacctctgaacaaaattcgaaggtgaatattaatgttgtacgtgccgattcgttattgaatcaggtgctggctctttatgaagtgaaagaatatgggttattgctggagaattatcctccgaaagaaaacgaacgagcgacctatctggccgatgagacacagcagaaaaccaatcaaagagtctcttatctttggccgtattccggtatggtatccggttgtgtttcgctgtataagactacaggagatgaaaagtataaacaattgttggaaaatcgtatactacctgggttggagaaatattgggacggtaaacgggaaccctattgttaccagtcttatccgatgcaattcgggtatagtgaccgttattatgatgataatgactggttggctatcgacctttgtgattattatgctttgacgaaagatccggcggttttggaaagagcgaaagagctacaccggtatatttacagcggctgggatgaagtattaggaggagggatttattggtgtgaacagaagaaattgtctaagaacacttgttcgaatgcacctgctacggtcttatgtatgaaattgtataacctgacttccgatcctgattatctcgatctggtcaagaagacttatcgatggaccaaagaaaatttatgtgatccctcggatggtgtgtattgggataatattaatctggaagggaatatagctaagcagaaatatacctataatagcgggcaaatgattcaggccggcgtgttattgttccaggcgaccggtgacagcacctatttgaaagatgctcaggtgacggcaaaaggagctcacggatattttcggaaaatgcagcctgttcaggggggagaagcgatgttttataccagttcgccttggttcaatgtgatcctgttccggggattaaaagctttgtatgaagtggataaaaatccggtatatgtaaaggcgatgatggaaaatacagattatgcctggaaagagacccgggatgaacatggactgttgaatggagattggtcgggtaatcacaaagacgaacacaaatggttgctgaataatgcctgtatggtagaaatgtattcggaagcggctcagcttgactggtgatctgtaaatttgaatgaataatagtgaaccttcgttgtcggtaccgatccggacggaggttcatttttttaaggactgggaatacccgggcagggatattttttactgtcaccgaagagtaaaaacaattctttgcgggctttttccagattctgacgatagtttttttgtccgagtttgtcgattttatttgtaagtatataattatccggataataggttttcccatcgttcatcctgaattgcgtttccagctgcatatagtgattcaggtcaccgactgctttccgggaatccagaaggggaggcaggcggtgaaaaaaggcggaatcatattttccggtcggatagcgttgagctaaatgaattttgaccaggacagggtctgtctgataggctgtttttatcttattctggccgaacaggtggaaagcttccttttcgatcaggcgattgataccgggttggtgccgggaaggttgttcgatcaggataaaatcttttcccaggttgtatttccaggtggtttgttgatggcaggaagagatatagttttgtccgcaactatcataaacgaaggtgagttgggcatgggtcgaaaaaggtgaactggtttttctccggttggttaataaagtttgtcttaatagttgataatcgatataatcgaaggtcatgttttttacataatagttttctctgtcgataatcagcgtacctttacatgaaatccgggtacgttcgggataggccgaacggcgggtctggaaggtaaaggtataatccggatcttcggtgtctatggcccggatatcgtaagagtcgattccgtcgaaaaggggaccgaagagttggatcgcccggagaagggtgaaaattttccgggtacctacatcgaaccggatatcttcgtaagtcagaaacatcggtgacagggtatcgcttccgttattggtcagattaagactacgggcgatatactggggtaccagataagaacggtaagtttcatcccaggtatttttagcttttatgttgcctgaagtgaagtaaaaaccgaattctctccggtattcgactgtcgtatcccggcagacggtgatcttttcatattgtgccggtccgtaataacggcaaacgggtaaacgtcctgcttttattttttgtaatttttcgatggctttctttaagatttctttcggagatatgcccgtggctgtcgcctcctgtaggttgtattgcagctcctgcatagtgaaggccggatgccttttcagttcctgtaaactgtattggaccgttgcatatcctatgccttggaatacaatggtatcggaaggttgtaaagaattgaccgggaaagttccttccccttccatatcggaagtagctaaaagtgtaaattgtttttttaaaataaagtatactccaaaaatgggtttttggttctcgtctgtgatcctgatttttatttcttcgttggcaggattggcataaatatttgctgagacagacaggagtaatagaaaacccagataccattttcgcatattcagatgtatttttaagttgagcgaagtttttctgctgcaatcggtttggttggaaaatcattatatcctgtatttaaaatacgtcttgtaaaaataggatttttttttcaacctgccaaatatgaaaagcggttgctgtcttcatccaggctattctctccgattaggttcacatcagcttccggttttccgtcaaaggtcggtctcacgttttccggaatgaagttgttcccatttttgtattcaccgtttttctgaacgtagaacttgttctggcgacgcccgttgcttccgtaaagtgtggagattcccccttgaaaggagcgttttctgaaaggaagcggagactgctatgatagcccgctgtttctgctttttttgtacgatccattaatttgcaaaactaacggttttaatcatcactcgcaatacctacgaataatgatttgcaagtataaacaccatgtatatttgttacggataccaggacagaccgtcttattcctccaaccactcgtctgagagcccgaaactcctgtcgcgaaacaattcagccagacctgagatttgcttgaaacggagtaactcgttcttgtccatgcctgtgttgcgcatgatccagctgtcggacatactactgtcacaacaatcaaaggcaaaaatgcatttttttttactacttttaaagcgctattaaaacgtttgattcatggaactatttgaattagatattaacgctttatccaaaggtaaaaaagaagcttttttcatattgtacaaaaaattcttcgttgctttgtgcctcttcgctcagaaattttccattgggaaggaggcagcagaagatattgtacaagaaatattctataagctgtacgaagaacgccagatattccataatattcttacactacaatcatacttatattcttctgttaaaaatagttgtctgaattacattcgtgatgaaaaaagacgaaaactccgtgaaagttattactgtgacgaaatttataataatgacactacatttattaacgacgttatcgaaaacgaagtgtaccgagaattatatcaacttctagatgaactaccaccacaatgcagagtcatctttgagagagtcctgcaaggagaaacttcagaaacaatagccaaatccatgcacctgtccattgagactgttaagactcaacggaaaaaagccaaacatatactaagagaacgttacaaattattattcaatattatcggaatctttctataatttttttcatatataggatacccacttttttgtttggcagtgtctttataaaaaaataagaaagtggaaatatacctaaaaatctcaaaattgcttcttgcacacaaaactcaaaacatcagtgcgcaagaaacagaggaattgttagcttggcgacaagagaaaactgaaaacgaagaactttttcaaaaaatcagccaggcagatggctttgaacaattccgccagcaatacgaagagtacgattttactccaaaattccttttgttagagcaaaaaatcaaacaagaaaaacgtaaaagaattatcaaacgtttatcctatgctgctatcctgcttcccttcatatttgcaatatgggaaattatccaatttcagaatcaaggaactaccccaacagaatactcatcgattgctccaggtagttccagagctattttaaccattggtaaagacaaaaccatttacattgaaagagattccaatataaatatacataaaattgactctaacgtttttattcaacacaacacattacaatataaaaaaacagcacaagcaaccgacaacgagatacataaattaaacattcccagaggaggagaattctttgtctgcctatcagatggaacaaaagtatggctaaattccgagagtgaattaaaatatgcctccgaatttgtaggggaagaacggcgcgtatatttaaccggagaagcctattttgaagttgctcataatcctaacaaacctttttttgtagaggcaaaaaatttacagattcaagtattaggaacctcttttggagtcagagtatacaaagacgaggattatgccctcacaactctggaagaagggcaggtcaatatccatacagcaacttcatctgtaaccttaaagcctggagaacaggcaaaacttcatgataatgaaattacggtcaataaagttaatacctgttcatacaccgcatggagaaatgggaaatatattttcatcaacgaaccattagggaatatcatgaaaaccttggcacgctggtatgatataaatatattttacacatcatcaaaattagaacaaatccaatttacaggagaattaatcagatataaaaatatagaagaattactgagtaaatttgaaatattagaaaaagtgaaatttgaaatcagaaataatactgtaaccatcaaagaatataaaaaaggcagagattgctggtaacaatctctgcaccaataactaacaaaagtagatattgtttaattaaaactgttttacaaagctatgaaagaaaatgattttttcctacctcctaaaaagaaaaatggagatgtagttttatttatgtttttatttttcttgcttttacctggcttctcaatagcccaatacaaagcacaattaaatattgacataaaaaatgggactctcgtaaatgtttttgagaacattcaaaaacaaagcgcatacagattcatgtattccaatcaagatgttgcagccataaaaaacatctccgtgcagagagaaggcgtatccgtacaagaaattttggatattgttttaaaaggacataatctaacttatttaatagaggataaaataatattcattaaaaaacagtctcaaacctctgtcaccaaaatcagaggacgggtaactgacactaaaagtgaacctcttgcaggagtaacgattcttatcgaaggaacatgtatcggcaccacaacagacagcaacggtaactatgtctttactatccccgatatagacaagataaacattatatattccttcatcggcatggctccttacaaagttgcctacacaggccaagaaaacatcaatgtcattttgaaagaatcagcagagaccatggatgaagtagtcgtaacaggttaccaaacactcagaaaaagtgatgttgtcggttctgtaagcaccgttaaagcctctgacatcatgatgccggtttatacatcggtagaccaaatgttacaaggtcgggttgccggaatgatggtaatgaacacaagctcacgcgtcggcacttccccaaaaattcgaatccgagggacatctaccattctaggcaaccaagaccctttatgggtagtagatggagtgatccaaccagaccccattccattaaaccaaaacgatttaatggttgatgatttaaaaaatatcctggggaatcaaatatcttggctaaatccggcagacatagaaacagtgacagttttaaaagacgcatcagcaacagccatttacggttcaaaagctgccaatggtgtcattgttattactaccaaacgtggtaaacaagaaggaatgacagtaaactataatggaacattttctttccgttctcgtccccactatggattgtttaaccttatgaattcacaagagcgtattcaattcagccgtgaagcctttgccgcaggagccatctataatgaagcccctattgcctcattaaacacctacgaaggtatcatgagcatgttctataacaaacaaattaccccacaagaagcagagaatgcaatacacagattggagcgcaccaatactgattggtttgacatcctaacacgcaattcatttagccataaccataatctaagtgtttcaggaggcagtgaaaaagtcatttataacgtatctttgggttatagcgatcaatctggaatagaaataaataatgatgctcaaaacctaagcggacgagtaaatttaggaatccgactacatcccaaggtgcatgtagacttaagcttagtaggaagcattaataaaacctggggatatgctgcaaacgtaagtccgttggaatacgcaacagaaacaagccgatctgtattggcttataatgaagatggaagcagacattttcagggaatcagaaccaattatgcttataatgaaaatcctgtaattttaggatacaacattttgaatgagatagaccatagttactctctaaacaaatcatctcaaataaatggaaatataaatttttcatgggatattcttccgtggttaaaatatgaatttgtaggagggatcaataataacatcggaacatcagaagcctatgctggagaacaaacttactatatagcttcgaccttccgaggttatgatttcggatctgaagcctatggttccgagaaatacaaggctgcgatactcccatccggaggcgaattatataatggaagttcagatgtacagggatggaatattcaaaataaaatcacattctccaaaacattccaagaagaccatcgtctaaatgttttaatcggtaccgaagtcacctcaaccaaaacagcaaacaaatcacagaaaatgtttggttatgtaaaagaaagaggggaaagcgttgtaaaaccgacacccttaaatgaactagtccctatcggtaacagaccagcaccaggcttaggattatttgaagaattatataatgggaacgggtggttgcgtaatacattaacagcaaatcaattctcaatatttgccaccttagcttattcattcaaaaatcgttatgtaataaacgcaagtatgcgtaatgacgcttcaaaccgcttcggtcaagaccaaaataaacgctttgacccgacctattctttcggagcatcatggaatgtagcacaggaaccatggttacaaaacatttcaaacatcataaatcagttcaatttacgagcatcatatggaattcaagggaatgctgtaaactctatcagtccggaattgatactgagaatggatgaaatcaaaccatattatggtgactatatgtctaaaatttcacgtatacctaatccccacctaagttgggaacgtactaaaacctggaactttggtttggacattcaggtaattcgatggatttccatgaatattgaatactatacaaagaaatcgaacaatattgtaaaccaatctattgcactcgaatatgggcgtgtaggaactgaagttaacggaggacgcgttgtcaattccggtgtcgaatacactttaaatatcacacctatccgtaccaaagactgggcctggacaattggatttaactcatcgaagaactggaataaagctaagactcaatccatcagcgaaatcagtctacaagactacatttccggttcctcagacaaggtactgaaagaagggtttgctctctctagcttttggtcatacgatttcaagagactaagctctgtagatggtagtcccgaatttaatcgtctattccaagaagatgcccaaggcaacattttaaaaggcgaagacggagcccccttgttgaaaggagtaaatgaatacacggacatgcttgtgtattcaggaaaaatggaaccggatttcacaggaggactcacaacccgtctcaggtggaaaggtttaaccttcggagctaatttttctttattattgggagccaaaaaaaggctacctaatccttatcccaatttaggaaacattccattgtccaatgtgaacctaagtaaagacttgattaatcggtggaaaaaaccgggagatgaagcatacacttacattccgggagtgtacaccggtcggattgccaattattggagattacaagacgataggacatacaacatgtaccagatgtggggagaatcagatatcatggtagccaaagctgatttcttacgctgccaacaaatatctttaacttggactgcaaatgacaaaatttgtacaaagatgagagtgaaaagtctctcaatcaatgctatcatgaataacgtttttgttgtagctgataaaaaattccacggtttcgatccagaattaggagatagcgtacagcctaaaacatattctttcggtataactgtcggattttaaaataaagaactatgaataaaataatcaaatatacattcttgcttttagtggtattcatcacttcgtgcaatagttttttggaaccaaagtcacaaagcgagttcgtacctcagctgattcaatcattggatgaattattattaggagaagcctatatggggccaggcctaaatgacggaagatttttcagtgttttaggtgtttttgacgatgatgtaagcatacgtcctaactggaaggcagaaagctcagaagaagggaaagtaaaacaaatccgtttggcttactcatggtcaaaagacatgaaagaccaatttagcaactataatacctacgctgaagtatacaaaaaaatcttaggctgcaattctgtacttgactacatggacgatgtacaaggcagtgaacaggccaagaataaagtaatggctcaagcacttgcactacgaggatatttttatttgcatttggtgaatctatatggaaagccctactctgcagacaaaaatgctttaggtgtacctctaaaactaacttccgagatgggaaccagcggtatgcctcgtaatacagtaaaagaagtctatgaacaaatcatcaaagatttgcttgaagcagaatctctcttcaaatctttaccggcttcagaacaaaatttacggaacaaccgaataaatttaccctgcacccaactactactttcccgtacttacctatatatggaagaatgggaaaagtcagtaacttatgcagaagaagtcatcaaccaatatgattatgatatcttagatttaaatacaattgcagaacccaacccatacaattctcctgcttatatgaattattatacatggagcaatccggaggtaatattcttatttggcaatcaggcagatgtttgcgaacttccgcttacaagaatcacatgcgtagaagaatcgaagcctggtcaaataaattacaagagttatgtacctgtcattgcatcggaaagtctcatcaatacatttgataaaaacgatttgcggaaaactcattatttaatttgggaagaaatcgattacaacggcactcctgtatatcgtcaaccgacaagtaaatacgacgttcaacgtcgatacaaaatagaatacagatatgaacggggagtgtggggtactgcatttaaagtaacagaggcttatctgaatgctgctgaagctgcagccatgctttacaaagaaaataatcaaagtgaatatcgaaccaaagcacagacattaattgatgcgttacgcattaaacgtttttcacagacaacctacaaaccaaccacgattagcgagggagaacaactggtatcattcattcgtgacgaacgacgcagagagttatgctttgaaaaccaccggtggtttgacttacgccgttatggaatggaagaaataaaacatacatggtatgatacatcaggcgaacccattgaatatatcctagaaaaaaatgacccgggatttacacttcaattaccgaatgaggcttttgaacataattcaagtttggtacaaaatgaacctagaaaataatgtttaatattcaaataaaaagatatgctgaaaaaattcaaaatattcatatggacgcttatcctgtttgggtctgtttcttgcgtcgacaatgataacatcggtcctattgaaaaagttaacttcctccaatttgattttcctcagggaaatgctctttgggacaaagaaattgagcaaattgcaaaagattggggtatgtatatcatctataaaaatgtcgacagcacacacctgaacagaatgtggacgataccctattacacagatccgatttatgtatgttccgaaccaagttctgaagatattcaaatatatttggatttggtacaagaatggctattgggcagtttggacaaaaccaaagaggaagataaaaaacaattgccatattatctctatttggtaaatgacttaaatgacggaaatcctcaatcacagacctatcaaaaacggcatattcagtttaaaaaagacggtttggactattggagtctaagctttaccagtgaagaattggctgccggtctgacaccagaaattattcatagtgttgcttgtgcattcagctatcccagtttaaaagtacgttttgaaacaaaagaatacaaaatagctcccggattcgctgaaatgagcgattatgaaacagaaattgggagacgttatctcagctatgaacagtggaaagaagaaaatccctatatgccggataaaggatattacgacaactgggatattgacgaatgcgacaaagacgagtataatgcctatcaaagtagaggatttgccgtacaattaggagaagacttcaagcctatcacaaacaaaaacggagaacctacatacggtgcccctacttggatgccatggattgttacaatcagttatggtgtagagttagatcgtaatcctggtccggtagctgccagcattgaagaacgtgtaatggaagattttatgaatatgatcagaacagctatgacctattcatcggagcagatcaacgagaaatatcccctagatatagaagatcctatcaaacaggccggcaataaaattatcatcgataaatataatttggttatagaatacatgaaaaacacctataacattgatctaaccaaatatgctgaaatcttaaaccaataaatataatacaacaaaattgatataacatggaactatttaaattcatccgattaggaatcattttcataggagtaggtctaagtaattgttcaacacctggcgaatacaagatacaaggcactgcaaccggtatcggacaaggaatggtttgtatcatttcctatcttgacaaaaaagcagacacgttggccaaggcagaaatcaaagaagaaaaattcgaactaaaaggtaaagtatctaatttgacaattgctaccttgcaaattccggggaagggtataggacatgctccaatctatttggaaaacacagactacaccgtacgattaaatcctcaaaatttagaaatgagtgagataataggaggaggagaaagtcaaaaaattgcacacggtttatttttaatagatcaaaatttatctcaagcaattgacagcattcgggacgaatacatcaaagaagctaacaatccgcaaagcacacgttttcaagaattaaatacattcttagattccattcaacaaactattgaaaaacaaaaagaagcttttttacaaaaaaatgcaaccacttacgtagctcttaaccatatcgcacagaatgctgatcggatgaatttaaaagaactaactgaaagatatgaattattccctgctgaattacaaaatagccttttaggtcagcaaataaagacacaaatcaaaaaaatgcaaacattggctcctggacaaattgctccagattttacagtacaaactccagacggtaaatcatttaacctccattccatcaaagcaaaagctaaaatcattgatttttgggcctcctggtgcgctccttgcagagcattgacccctcagttagtaaaactctataacgaattccatgagcaagggcttgaaatcattggaatatcattagatgacaaaaaagaagcttggattaaagcgattgaagaggaaaatattccatggtttcaaggctctaaattagatggtttcaaacctgacaatccattaaatcaattatatggaattcatggaataccacatatagtacttcttaatacagataatcaaatagttgtaaccactactgatattaaaattttacgcgaagaaatactaaaattattcaaacaataacatcataaaccagtttatatgaaaataatcattggaatacttttaataagctgcttcctaggaagaacaacagctcaaaatgcaaattataagcgtgctgaagaaacgaaagcattttcactaccttggaaatatgaccgtttaacgccattcttcacagaaggcagtgatgatttctggtacagtctgcaaaccaatgatggtgaaaaatatttctatgtcgacttaaaaaacaaaaaagttgaagaattcattgatccggtctacttagccactgaaatggaaaaagcgacaggaagaaaatataaccctaaaaaattaggtttatggaaaatccatttcaaaaaaggagggagaatattatcatggcgagacggcagagtcatcttcaactataaccgcatcactaaaaaattaggttatacaaacctgccttcggaatctgatatgccacctatacacggtttctttgattcgggaatgtcccccgatgggaaatatcaggtattcgggaaaaaccacaatgcctacatccgcaatctagaggattccacagttgtacaactaacttttgacggaactcttgaattcagctatatgacaggctggggagacgtcaaagaagaagttccattagctccggtttggtttgaagattcaaaaaacttctatcttttccgtcagaattctcataaagttgctgaaatatcaaacatgaattacctgaaaggacgtcccctggcctacaacacacaagcagtattggccggcgactccattgtcttgtatgatgagatttcattatttgatgtggaaaccaaaacccagaaaaaaatcaagattgacaaatggcaagaccaattaaccagagttctccattcagatactaaaaataacaaactctttttggagcgtagaaccagaagaaacaatatactagaagtatgtgatgttaatttgaagacaggagatgtaaaagtcatcatacatgaagaaggcgacccgtatattggaattgaattagcgtcaatacattttataaacaattacaatgatattatttggtggtcagaacgttctggatatggacatttttaccattatgaccgtgaaggcaatttaaagaatgcaattacttcaggcgaatggacagccggaaaaattgtggaaatagatgaaaaaaatcgtaccattttctttcaggcttatggtattgcacctgatgaaaatcccagctatgcgaaaatttgcaaagcaaacattgatgagaaaagcaaggtaacaatattaacacctgaagaagctacgcatgaagtcattttttctccgagtaaacgttacatcatcgacgcttattcacgcccggatctgccatgtcggttttcagttagagatattcgaggaaaactaatcgcttcgctaggtgaagtcaacttagatgatttatataaaaaaggttggaaaatgcctgaaacattctctgtcaaatcagcagatggagagacagatttatatggcgtaatgtggaaaccttttgattttgattctactaaaaaatatcccattatttcatgtgtatatcctggcccacaaaccgacaacgttccactaatatttggagtaggctcaactaatgaagcattagctcaaattggttgtatcgttgttgccttcaatcaccgaggaggcattccattccgaggaagagcttatcattcatttggatacaacaacattagagatcatgcgctggctgacgataaatgtggattagagcaactaataaaacgtcacccatacatcgatggaaacaaagttggtatatacgggcactctggaggaggaatgatgtcaacggctgcaatttgtacttaccctgatttttataaagcatgtgtatcatcggcaggcaatcatgataataatatttatagccaattctttgtagaaagccattacgctattgatgaacaaatcgttaagacacaagattcgataaaaacagccaatggcaaagattctgtagtaacaaaaacaaaaactgtttacacaacaaatttgccaacaaacatggaattagcaaagaatctcaaaggccatctgatgctgattgttggaaatatggacgggaatgtacatccagcacaaacaatccgtatggcagatgctctgataaaccatggtaaagattttgaacttgtatttttacctcgcggacggcatacatatgatggtgtttcagagtggtattttgaacataaattacgttctcattttgccaaatacttacttggagactttacaaacacaggtttctatgacatcaaaaccaatgaatatgatcaagtaatcaaataaataataaaagaatatgaaattaaagtatgtatttagcagtttaggcatattgatttgtctaagcgtatttgcagatggggtaaaaccggcaaaagtcggcgaacaatcaccggatttccaatttgccgacaaaaatggaaaaatgtattctttaaaagattttaaaggacaatacgtattcattgatatttgggctacacactgttttccatgtaaagaagagattccttacttagaagaaattcaagaaaaacttaaaaagaaaaacattgcatttattggcatcgcaacagacttggacaaagacgaatggattaaatttattgaagagaaagctttaaaaggcactcaactgataatggaccggaaatggatttctttcatgcacagttatgacgttgcaactattcctagatatattttactagataaagagggaaaaatcatcaatttaaatatgcctcgtccatcaaatccccaatgtatgaaaatactcaaatcattaaagagataaggtctataacaaatagatgaaatcactagagatctgtaaatctaatctttataagaccaagggactgaataacattttattgttagatagtcccttgggattagatatcatagcagattccggtctgatgaacaaaagtaatgtggctctgttgcggcaagctggctataagtatatccttggcgtacgcatcaggagcgaaagagttcccattaaacaagggattttttcattagagagaaaggataagtcctgttgcgaatacaagcgtaatggagaatgactaatctgaaaggatacattaccaatacagatattgacgctgaacgtgttatcgctgaatatcacggattatgggtgtggaacgtgttttcagaatttcaaaagggacattggaaatgtaccccatgtttcactttacagaaagaaggattgaggcacatgtatgcacctgcttcatcgtctgcaaaatatacaaggaattggagagacttgttggctttaacaagattgcgatgagtgttgatcatgtgcttgatgcggcaaaaaccattacaacaattagaataaagatgccagagaatggcagctgctttacgaagactctcttcttgactgagaaacatcttgcaatcaagacactttgtaaccagcccgagagtgtctcctgattttggggacgcattgacgaagtcaggacgataaagggttgtagatgactgaaacgttgtttagttctgtccatttgattttatctttttcgctcagtacgataaaccatttcaattttttctgcattgggttttctaggagagatgacggacggaattccggatttccgaaggagagatattcagattttgacaaaaattggtaatgtgctgaatattgaccggtggttcgtcagtgggggcttttagaatatagggcatctgttcgaagtcttcatctgtttcagagaaaataaatgggatataaaataaatcctaaaaattttgtgtccaacttttagggtgcacttcacttgtgaagccctatcttcactgatacaaagatagggtgcaggattgacaattctcttttttttcagttataaattttgacaagattgttgtatattcgggttgaatagaaaaacaatttcctgaatggagagaaaaatcgggaatatttgtaattttgtacaaaatttaaaagttgtataaacaaaataaattatgcagataaatccggcagaatttaagttacttgtagttgatgatgttcaaaccaatgtacttttgttaaaagctttgcttggtaaggaagggtacggcattctggtggcgaataacgggcaggaggctttggaagtgattcggaatgaaaatcccgacttgatattgctggatgttatgatgcccggaatggatggattcgaggtggctgaacgcctgaaatcggaagagttccgctgtgagattcctattattttcctgacagctttagatgacacccaaagcattgtcaatggcttcaaactgggagtgggcgattttatatccaaacctttccggaaagaagaattgatggtcagaataaaacaccaattgtcgttggtggctgcccggcggattatagaggaaaaaaatgaagagctgaggaaaaccattgccgggagagataaaatgtattcggtgattgctcatgatttgcgctctccgatggcttctatgaagatgttattgaataccattatgatgagcgtggagaaagataagatcgatccggatattttcgatatgcttgaaatgagtaacaagacttcggaagaagtattcagcttactggataatctgttgaaatggacgaaaagtcaattgggtaaattgacggttattccgcagaaattggatatcagtggactggcggatggggtggtggaagtgatgaactctgtcgccgaagtgaaacatatcaaattgatccgcacggatcatgagtctttttttgtctatgtggatatcgaaatgatcaaatccattttgagaaatttaatatctaatgcagtgaaattcagtaatcctgattcggagatcaaggtcgggattaaggcagaggatgggaaagtgatcgtatcggtgaccgattcaggtaaagggataaaaaaagaagatcagcataaattgttgaaagatagtactcattttaccacttacggtaccaatagtgaggagggatcgggattaggattgttgctttgccgggatttcgcccgtaaaaacggaggagaactttggtttgaatccgaagaaaatctaggttctgttttcagtttttctttaccgcaattaatagcttaaaatagagaatccgatgaatcatattattattatggccggtggagtaggaagtcggttttggccgatgagtactcctgagagaccgaagcaatttatcgatgttttagggactggatatactttattgcagcttacggcagatcgttttgaagggatttgtccggtggaaaatatatgggtcgttacttctgtccggtatcgggagctggtgaaagctcaattacccggaatcccggattccaatatattgctcgagccctgtatgcgtaatacggctccttgtattgcctatgcagcctggaagattaaaaagaaagatccgcaagcgaatttgattgtcacggcggccgatcatatcgtgatggatgtgcctgaatttaaacgggtgatccgtgaagggatagattttgtgaaaagcgaggatcggattctgactatagggatgtggccgacccgtccggaaaccgggtatggttatataaaagtaaaacaggaagaagacggtgcggaatccggagcaaaagtaatcagggaggtggaaggatttaaagaaaaaccggatttgaaaacggcagaagcttatctggcggcagggggatattattggaatgccggaatttttctgtggaatgtgaggacggttgaaaatgctttccgccggaatgaacccgaaatagcggctatattcgattctttgaacgatatttattattcttcggacgaacagcaggcaatcaatgcaaaattccccgaatgtaagcatatttctgtcgattacgccattatggagcatgcttccaatatttatgtttttcccgcagctttcggatggtctgatctgggaacctgggggtctttgtacgaacaattaccgaaaggagatggaagaaatgcggttgtcggcggcaaggtatgtatggtggagagtgaagggtgtgtcgtgcatgtttcggctgataagaaaatattgattcagggattgaaagattatatcgttgccgaacaggacaatgtgattctgatatgccggaaagccgacgaacaacggatcaaagaattttcaacccaacttcgataaacatttttcgtgatttttcgtttagaaaataaaaacgaagagtcatgaaaatagaaacttttactttacgtagcaacgataccgggggtgtggctgcgttacggcaggtacatccggattgtggcggacagaatatctctcccgggctttcctgggtgaatgcccccgaaggtacacgtagttttgccattaccatgtacgataaagatgctcctaccggaggtgggttctggcattggctgatgttcgatattccggctagtgtcggtgaactgcgtccggatgccgggaatacattcggccatttagcaccggtttcggcaatacagagtttgaatgattacggtacttatggttatggagggcctaatcctcctcatgggcatgggtggcataattatatgattaccttgtatgctttggatatcgaatcactggaaatgtccaaagatactcttcccgcacaggtcggatttaagctttggaaacatactttagaaaaggcttctattgttttctattaccgtacttgaaaaagaacggacattttttgttccttggggtaagttttgttttctttgtgtgctaaatacaaggaaaagattatggtaaatgtaattgatacccggaattctgttttaaatacttttttgtctgagatcagagcggtcgatattcagcaagaccgcatgcgattccggcgtaatctggaacgggtgggggaagtgatggcttatgaaatcagtaaaacgttcgattatagtgcccggacgatccggactccgatcaatccgatttcggtgatgttgccccggcaagaagtggttatcgctacagtgttgagggccggcttgccttttcatcagggatttctgaattatttcgatcatgcaggaagtgcctttgtttctgcccgccgggcttatagccgggtagagggacaaatcgaaatccggttcgattcggtttatacccccgatttgactggaaaacaacttttactggtcgatccgatgctggcaaccggtaaatccctggtgatcacttaccgggaattgttgaaacaggggagtttgcctgctcatacgcatatcgcttcagtcattgccagccggcaaggtgtggaatatgtggaaaaagaattggcaggagagccgttgactttatggacagctgctctggatgaggctttgaccgataaattctatatcgatccggggttgggagatgccggtgatctggcattcggagataagaaataaggtcgttttttgcgaagtaaaatcagcacagaggtgaaaaaaatagcatactgttttttctatttatatggatcggtcttcccgtgtgggcacagtataaaacattgaaggatatttcttatgtacctgtttccgatacggatgcttaccggaaagaacgttgtaaactggatttgtattatccggagcagcagaaaggttttgccacgatcgtctggtttcacgggggaggattggaaggtgggggaaaggaaattccgcctgtttttcagggacggaaaatagctgtggcgggcgtgaattaccggttaagtccccgggctacccatccggcttatatcgacgatgcggcagctgctgtggcttgggtgatgaaacatatcggggaatatgggggagatcccacccgggtatacgtggccgggcattctgccggaggatacctcaccctgatggtggggttggataaagcctatctggcacggtacggggaagatgccgatcgtttggccggacttttcccggtaagtggtcagacgaatactcattttacgattcggaaggaacggaatatcccgttcgatattcctgttgtcgattgctatgcaccgcttaatcgggcacgtaaggggatacctcctttggtgatgataaccggagaccggcagttggaaatgacagcccgttacgaagaaaatttgcaccttgaagttatactgaaagctttggggaacgacaaagtcaccctttatgaattgcagggattcgatcatggatcggtatatactcctgcctgtcatttgattttgaatcagatcaaaccctgaaagcttgtaatagcttgcaaatctgagtgatcagccgttgcaggtgggtagcggcaaattcgggatgcatggatttttccagagtcaccggacccggggcgatggaaaatatgccactgaatcctgcggtatacaaggaaggggtatctgcaatatggccggctaccagaaggaccggaatgttttgtttgcgggcttcccgaagtatgccgtaagccacttttcccatagtcgtttgtgcatcggcacttccttctccggtgatgatgagatcggcattttggattcgcttaccgaactgaagatgggttaggatcaagtcaatcccggacattaaccgggcattcgtaaaagccagaaaagctcctccgactcctccggctgctccggagccgggaatccggccgatgtcttttccggtagtttgggcgataacggcagctatagcttgcatgcctgcttccagatgctctgtcatttcgggggttgctcctttctgtccggcaaatatccgggtagccccacggggaccgtaaaaaggattatcgacatcgcaggcgatggtgaaactggcttcggacagagccggatgaaccgccgtggtgtcgatagcagcgactcgcgataatatttgtcctccggttcctaaaagcttattgtcgtgatcgaaaaagcggaatcctaaagcttgtaacatgcctaaaccggcatcgttcgtggcacttccgcctattccgataataaagtgccggcatcctttgttcagggcttctgcaatgatttctcccagaccataggaggtcgtgagcatgggattccgccgggagggaggtaacagtggcaggccgctgatccttgccatttccaccaatgccgtgcggccgtcttccgagataccgaattgcgtagttattttttgcataagtgggttatgggcgacaagcggaacggtatggccgtggaaagcatccgtcaggatttccagtatgccttcacccccgtcggctaccggaaaatgcagtacttcacactgcggaaagattgttttgataccttgttctgctgcctcgtcggcttcacgggaacttaaacttcccttgaaagaatctattgctacaacgattttattcatgtttgtgacggattaaatttccatatgtccggcaaatataagaaaagtattatttgggccgttatatacatattgggacttataaaagtaggtttatttcgttagtaatccgtcttcggtgatcgtgtttggggacccggtcgcttctgtcggtcgtctacctttttctatcactgaccggcggaccgttccgggcgaaccggtctgacggcacaaaacccggaatcggaatagaatgaaaaaaaattgaacctacattttaggatacacaggaagctaccgatcatttatctgttgattttctttcggaaacatttttaacttcttgtattttcccttatatttgtcacttgtggaaatgaacagatatttgatcgctgcattgtatgttatggccggttgtgccgtaacgattcctttaaaggctcagggttgtggagagtctttgagaggggaaaggtgtagattgatcataaccaatacggtaaaggtcgtatctgtttatttggaagaagaagaagaggaacaggttttttgttccggtttgcctccggattattttcaaatccccgtcgtcgaggcgcttgccgatgattttactttcgataaaacggtccgtgtcaatatcggatccttatgtcgtattgcccataagatcagggctcctgaggtttaatctgcaaattataattaagatttacgagggtagtctatctcggataaacgagaggaaattcaattttctgaaagattgacgaagtgtcgtcgattaaaattttactgtttacaatttacaatttataattaaatgggttttaatgatattttaaaaagcctgttcggaaataaatccgaccgggatatgaaagaactgatgccgattgtggccaaagtgaatgcagagtgggagaagctgaaaagtatcagtgccgatgaattacgtgcagttgctgaagatatgaaaaaggaagtacgtgaatatatcggagaagaagagaatgagattgcagcactcaaacggaaagtggaagaggaaaggcctgcgatcgaagaacgggaggaaatttacgatcgtatagataagctggaagaacagatcgacaaaaaggtagaagaagttttgaccggattgatgcctaaagcctttgctgtgatgaaggaaaccgcccgtcgttttaaagagaatactgaaattgaagtgacggcgacccagttcgaccgggatttggcggttactcacgattttgtcgagatagaaggtgacaaagccatttatttcaattcctggcttgccggaggaaatgaggtgacctgggatatggtgcattatgacgtgcagctgatcggtggtgctgttttgcatcagggaaaaattgcagagatggctaccggtgaagggaaaaccttggtggctactcttccggtgttcctgaatgctttgagcggacgtggtgtgcatatggtgacggtaaacgattacctggccaaacgtgactcggagtggatgggaccgctttatatgttccatgggctttctgtcgattgtatcgataagcatcaacccaattctccccagcgtcggcaggcttatatggccgatattactttcggtacgaacaacgaattcggtttcgattatctgcgtgataatatggctatcaatccggaggatttggtacaacgtaagcacaattttgcgattgtcgacgaggtcgattccgtattgatcgacgatgcccgtacgccgttgattatttccggccccgtacccaaaggagacgatcagatgttcgatgaatacaagccccgggtggagcgcctcgtgaaaatgcaacaggaatttgtgatgcagacttttaaggaagcgaaagagctgttggccagcgatgattctaaaaagagaaaagaaggggggatattgttactgagggcacataaaggattgcccaaatacaaacctttgatcaagtttttgagtgaagaaggcaataaagcgatcctgatcaagacggaaaacgaatacatgcaggaaaataaccggagaatgccggagattaccgatcctttgtattttgtgatcgatgaaaaactgaattcgatcgacctgaccgataagggacatgataccattactgctgcaggtgaagatccgaaattctttatcctcccggatatcggctcggagattgcagagatcgaacgggacacgaaggatgataaagaaaaattggcgaagaaggatgaactgatccagaattatgcgatgaaatccgaacgggtacatactgtcaatcagttgttgaaagcctataccttgttcgagaaggatgtagaatatgtagtactcgataataaagtgaagatcgtggatgagcagaccgggcgtatcatggaaggacgccgctattcggacggtttgcatcaggctatcgaagcgaaagaaaatgtaaaagtcgaagctgccactcagacttttgcaacgattactttacagaactacttccgtatgtatcacaagttagccggtatgacaggtacggcagagacggaagccggtgagttctgggatatttataaactggatgtggtggtcattccgactaaccgtccggtgatccgtatcgatgccaatgattttgtgtttaaaacgaaacgcgagaaatacaatgcggttatcgatgaaattgtccgtttggtagatttaggccggccggttttggtgggaacgacttctgtcgaggtgtccgaattgctgagccgtatgttgaaactgcgtggtatcaaacacaatgtattgaatgcgaaattacatcaacgggaagccgagatcgttgccgaagccggtaaatcgaagacggtgactatcgctaccaatatggcaggacgtggtacggacatcaaattgagccctgaggtacgtgaggccggaggtttggctattatcggtaccgaacggcatgattcccgtcgtgtcgaccgtcagttacgtggacgtgccggacgtcagggagacccggggtcttcccagttcttcgtatcgctcgaggacgacctgatgcgtttgttcagctcggaacgtataatccgggtgatggaccgtttgggacatcaggaaggggatgtgattcagcattctatgattaccaagtctatcgaacgtgcacagaagaaggtggaagaaaataacttcggtattcgtaagcgtttgctggaatatgacgatgtgatgaattcccagcgtacggtgatttacaaacaacgtcgtcaggctttgttaggagaacgtatcggtgtggctgtagcaaataatacttacgatgtttgtgaggcaatcgttatggaataccagccggtgaacgatccggaaggtttccggatggaagtattgagggtattgtccgtcgattatgaagtggatccggaggaattccagaaagcccgtcccaatgaattggccgaatcgttgtatcgatatgtacgggaggcttatcagcgtaaagtcgaacatatcgctcagcaagcttatccggtgatcaagaatgtattcgaaacacggggagatgtctttaagaatattgtcgttccttttaccgacggtcaacggatgtacagcgtggtgaccaacctggagaaggcctatcgtacgaatggtgaagatttgatgcgttctttcgagaaatcggtcattctggctcatatcgatgatgcctggaaagaacatctccgcgaaatggacgatctgaaacaatcggttcagaatgctgcttatgaacagaaagatcctttgttgatttataaattcgagtcttataatttgtttaagactatggtggaaaagatcaataaagggatggtgtctacactgatgaaagggcagattccgatgcaagaacccgagcatgtacgcgaagctgaagaaaagcggaccgatttgagtaaactgcgggaaagtcgttcggaggctcaggctgctgccgccaaccgtgaacaggtgcggcacgaaccggtgaaagtaggaccgaaagtggggaggaatgatccttgtccatgtggtagcggactgaagtataagaactgccacgggaaaaatgaataaactgatttttgaaaatcataacgtatgttgtctttatttattaattgggatattagtcccgagatcttcaatttggggggtatttccattcgttattacgggttgctgttcgctgtggcctttattttaggttataaggttgaagagaaaatgttcaagtccgaaggattgcctatggcctggttggataaattgtggttgtatgtagcgatcgcgacgatagtcggtgcccgtttgggacattgtatcttttacgactgggcttattatagccagcatccgctggagatgatcctgcctgtacggttttcgcccgaatttaagtttaccggttatcagggattggccagtcatggcgctgcaataggtattatagccggattgtggtattattcacggaaagtcagcaaaaaatctatattctggattttagaccgggctgtgattccgattgctttagccggcttttttatccggacaggaaatttgatgaactctgaaattgtgggattaccgaccaatatgccttggggattccgcttcatgaatagtgatttaccgaatccggaattgccgcgccatccggctcaattgtatgaagcaatttgttacctgtttagtttttttgttttgatgtatctttattggcgaacgaacgttaagaagaaaatgggatttatcttcggcgcttttttgatcctgatcttctctgcccgctttattatcgagttcgtcaaggaagtacaggaaccctgggaagctggaatggccttgaatatgggacagattttgagtattccttttattctggcggggatttttatgctttggtatagtaagaagttgccggatgaaggggagaagaaaggaaaaaaagggaaaggctaaaggctgtaagctataaactagaggtaaaaagaatagaggttagaggtggaagagagaggggacgggaaatatgaaattttagttgagaggttatgtacgaagagaagtttatgagagaagctattcgtttggctgtagagaatgtgaaacaggggaccggggggccgttcggcgctgttgttgtcaaggagggaaaaattatcgcagcttgtgccaatacggttactccggattgtgacccgacagcacatgccgaagtgaatgcgattcgcgaggcttgtcgtaagttagatacttttcaactcgggggatgtgagatatatgccagttgtgagccttgtcctatgtgccttggtgctatttattgggcaagaccttcccgggtatattatgcctctacaaaagaagatgcagcacttgccggattcgatgattccctgatctataaagagattgccctccccgaggccgatcggagtattccctttttgaatgagaaagaggatacggctggagaagaattcagcttgtggaaagaaaacaaagacaagactgtttattaagttcgtttcttcaaaatagaatgcaaaatgtcggaaaaatcaaccttttagggggatttttccgacattttgatttttccaataattcctgtcctcttttctaagactttttctatttttattcttttatttaatctatttgaaaatcttcgatagcccattcgctccccggactttccattaataatcctgtcaatttccgttttttttacagacgaggtaaatttttttcaaaaaaaatgaaatttctgtcataccaaatcctgcttcatgcattttatcattgaatgaaccgaaaaaacgttcgattctttttgcgggaatccgcaaaaagaataattgccagctgaccaatgacaattgacaattacctggaagcttcgcttccattagaaaatattaagaaaagaaaaatgagaaataggatgaagaaaaaaatcattgattatcaaacaaataaagaagaaaccacagattggaaaatatgtggtcaattgtcacgcgacaattgtcaattaactaagtgcccgcaggatccaatagctttttaaactttatgaactttcaactaatttaatcgaacgttttttaagatgcaaaaagataaatttgaccgacaggttactcttttgagaaaatattattccgggacattggagaaaagggaaaagcaggaatttcgggaaatgttgaacgatcggaatttggaaaatgtgtttcggcagttgagtcagggagatattttggctgaaaagctggaggaatataaacaatacgatgcccggaaagctttcggcaaattcagcaggcaacaaaaatcgcttcgtcataaaaagaggattatccggattcttactgcagcagtggtggttttacttttaggaatgagttggttactgaatcttggattaccggaggtagaagttgttccaccggcacagcaggagacgattcgccccgggagttacaaagctatattacgactgacaaatggcgagacggtgaatctcgagcgggattccatgcaggtactggaaaaaaatgggactcagattagttatgcagagggaaagattacttaccgatctacgcctcaaatacaggaattggcttataatgaattgattgtgcccacagccggtgagtgttacatcacgttggaagatcatacgaaagtatggataaatgcagaatcgaaaataaagtatccggtgcagttcactgctggggaacgtaaagtgtatttggaaggagaagcctatttcgacgtggccgaagacggacgtccttttcaggtaattacttctcagggagaggtgaccgtattggggacggctttcggaataagttcatacatggataaagcagaatataccaccttagtgagaggctgtgtacgttatacttcccatacaaagaaaagcgtaatcttatcgccgggtgaacaggctatcctggaaaggtccggtgaattaatcagtcgtaaagtcgaagttgaagaatatgtaggctggaaagacggggtttttgttttcagggataagcccctggaggaaattatggaaacactgtcccgttggtacggatctgaagtggttttccggaatgaggaaatgaaacagctgaaatataccggtagtctcgaacggtatgattcgatcaatactttcctgcaagtgttggaaagactccaggatattcattatgaaatagataataataaaatcctgttatctcgaaagtcttcttaattacttaactaaattacaatggtatgaaaaaaaatcgtctgatccgatttccgggccttttaaagaggtttaggaaaaatttgatgtttatcaaatgttgtattgttttcatttttgtttttagcctgaatttatcggctcatgttttttctcaaagcaagctggtgactttagacttgaaagaggtttctgtggagaaatttgtcgatgccgtgaaacaacaaaccggtatgaaaatgatgtataattccggtgtggtgcgggaagctggtcaggtttccgttcaggttaaagacaaagaattgagcgaagtgttggatatggtattgaaaaaagtgaatttggagtatgagctgtacaacgatatcattctgattcgtgcaaaaggagaagtaccggccgggccgaaagtactgaaaggggtggtgaaagataaaagcggggcggtcttaccgggagtgaccgtcgtaattaaagggacgaccttaggcgtatcgaccgacatcgatggaaaatattcgatcaccattccggaggatgggaaagaaacggtattgatgtttacatttgtcggcatgaagccacaggaggtcagatatgccgggcaagaaacgttgaatgtgatattgaccgaggaagtggcggaaatggaagaggtggtggtcaatggttactttacccggaagaaggagagctttaccggtgtatccaagaccttctccggagatgaactgaagactatttctacgggaaatatcctgaataccttgtctgtgctcgatccttcttttactaaagtggtgaataatgaaatgggtagtgacccgaatacgattcctgattttgaaatccgggggtccagtagtttgaaggccgagtatgaaaacaatccgaatatgccgacttttattatggatggtttcgaagtaaccgctcagaaggtgttcgacctcgaccccaaccgggtacgttatatcactattctgaaagatgcatcggctacagcgatttacggctcacgtgctgccaatggtgttgtggtgatcgagacagtacttcccaaagccggaaaattgcagttgtcttataacggtagtgccaacttcgaaatagccgatctttcggattataatctgatgaatgcagaagaaaaactggaatacgaagtgcgttccggattgtatgaaaaatcttccaaacccggatggacggatgataagttggatgcatataaccggattctgaaattggtgaaggaaggaaatgatgtggattggttgtccattccggtacgggaattgggggtcggccataaacataccgtaatggcagaaggtggaaacgaatcgttccgttatgctttcgatcttttctattcgaataaagtcggagtgatgaaaggctcgaaacgggataattacggtggagggatccggcttcaatataacctgaaaaacctgaaattctccaattatgcttccttcgatcatttgaagtcggtcaattccccttacggaagttttagttcttacctctattataatccctattataatccttatgatgaaaacgggaatgtgaaaaaggtcctctattcttatgaatattatgaccggggaattacctcgaagaccatgtataatgaattgtacaatgcggtattgccttctaaaaatcagcagacttctaataattttctgaataatttctcgatagaatacgatattattcagggattgaaattgaaggccaatctttcgttaagcgtggataatggaaagaccgatgtttataaatcctatgaaaataccgaatttttggacaaagagaaaaaagggagttatgcccagtcgacttccaatgatttcagttatgatattaacgtcatcttatcatattttaagagcctgaaaaaacattttatcaacctggggtttgtgtataaccttcaggaaaaacagtatgacaataccagtatctacgttgtcggttttcccaatgcgaacatggatcatgtgtcgatcggttcggggtatcaggaaggggcgaaacccggaggtagtttcgatgtgacccgcctggtcggttttgtgggtaacctgggatatacgtatgacaatcgtttcttgttggatgcttctgttcgaagcgacggttcgtctatttacggttcgaacaaccgctggggtactttctggtcggtcggtgtcggatataatatccataacgaaaaattcatgaaagactggggcgtgatcaacctgttgaagatcaggggatctatcgggacaaccggtgggcaaaactttagtccttaccaggccatggccatgtattcctataacgatagccggatcaataccatttcttacagcggctatctgggagccattatgaaggctttcggaaataaaaacctgaaatggcagaaggtagaaaaacaaaacgtagggttggatttcgaaatcttccatagtcgtctgaccggatctttcaatgtataccgggatttatcgaaagatgtgctgatcgacgtatctattgctccgtctttgggtttttcttcttataaagaaaatttgggagaagtagaaaacagtggggtcgaactatccttaaaaggtacggtactccgggatgtcaaacgggaattgaactgggatattttcttcaatctggcacacaataaaaataaagtgaagaaaatcaacaaagctttgacagcctttaatgccgaccaggattccaaagtggaaaacaaaccgatgatccgttacaaagaagggttgtcgcagaataccatctgggtgaatgaatctttgggaatcgatccggctaccggtgatgaaatattcctggatatgaacgggaataaagtgaataaatgggatagtaaaaattacaaaccctggggatcttccgatcctaaaatttatggaacggtcggaacgatgtttatgtataaaggctgggagttgaatgcgcatttatattataaatacggtggttatatttacaatcagaccttagtcgacaaagtggagaatgtaaatcccaacgagaacggagaccggcgaattctgtacgaccgttggaatgaaccgggagacgtggcaaaattcaaaaaggtaagcgatgtttcggtcactaatccgacttcccgctttgtggaaaaagaaaattatattcagcttcaggctttatctgtgagttatgatttccggagtgcgaaattgaaagagtgggggattcagcgcttgaaaatctccgctatcggaaacgatgttttcacttcttccacggtgcggatggaaagaggtacttcctatccttttgcaaggactttttcactggctgctcaaatcactttttaatcggacaatactatgaaaaaattaataaataaaacgatcattctttcgctctttgtggcattgaccggctgtaacgactggctggacgtttctccgaaagcggatatgaaagcagaggatctgttcggtactgaagccggattcagagatgctttggtaggtgtttatgcattgatgtgcggtacgaatagttacggcagagatctgacgtacggctacctggatgtattggctcaatattacaacagtccgttgaaaacaacttcttccggttatgagcataatttcaaaaatgcagcagaatataagtataccgagaaaacagaggaaagtcgcattagctctatttggagtaatcatttttctgctgtagccaatatcaatcaggccatgttgttcatcgacgaaaataaaggggtttttacttcacccgaggtacatgatgtgtataaaggagaatttctggctttgcgggcttttctgcatttcgatatactccgtttattcgctccttcggctgcgatgaataataataaaggattggacgcattggctattccttatatagatgtttttacgaatatcgcccagtcccagttgacggtgaaagaggttttgaaaaaaatagaaacggatttgttggctgcaaaacagttgatgaaagggaaagaagaatttaaattttccgatacttccgatccgctgtataaccggaaacaaagaatgaattactatgcggtgacagcacttttagcccgggtatatctttggggaaacgataaagaggcggctttgaaagaagcaaaggaaattatcggtgaagccggcggagaaagtcctgcttcttatgaattggccaatagtgctgctactacttccgatccgatgttcaataaagagttgattttcacattggatgtgcagaaattgaaagacaatagcgatatttattttaccgagagtttttcttctacttctaatatattgacgatgtcttcaaaaggaaaaacgaatattttcaatggttccggactggataatgagttcagaaattattggattaccccgtattccgacggtagttcgttcgtattgaagaaatataccggagtaaactatattccgatgtttaaaatttccgaattgtatctgatagctgccgaatgtgctcaagggaaggctgcctatgattatctcaataaattgagaaatcaccggggattaagcagtattgcgccgaccgatgatttagccggttatatctttcaggaatatcgccgggaatttataggtgagggacaaatgttcttctattataaacggaaagcaatggaaactatcggggctgaaaataatatcgctcatcaagatgtgaatgcggtgtataatttgcctattccgacagtagaaatcgattttgggaatattaaaaattaagcgttatgaaaaagatattttttcttcttgcttcagtgatcctgttagcatgtagtgagaatgaacggatggtatacgatgagcatatgcacgatatctattattccattgtgacagatacccgggatagtctgtatgtttccttgctgatggccgatcagattctggagacgaccgtagatgtgaagatgttgggaaatgtattgaccaagccgcagaaatttaaagtcgaggtggtcggggagagaacggatgccaaagaaggtatacattatgaaaaacttcctgaattctatgagttcccggccggagaatttatttataaaatgcctgtgcggttgattaaaggggatgcggctattaaacagaaaccggtgactcttacgttgaggctggttgctaccggtgagctgggtgtggcctatgccgataagtccgagattcgtctgctcattgccgatatgttgaaaaagcctgagggagaaggctattatggagatatgactgcgtttaagaaattattcggtgaatattcccaaaaaaagcatatgatgatcattgaaatgaccggacatgatttttgggaagatacttatggcagtggatatggtaattatggcattatttacgaggaagattattacactccctatgccagaaaattgtataagatcattaccgggagtgaaatcagggatgaaaccggtaaagtgatgcaaggatggaatgtaccttagtctatgggttgttaattaaaaaagaagatagctatgaaaaaattgaaatatataggaatattatttttgttgatcctgttctcttgtgtggatgatgaatccagatacggagatatcgatatcgatgagattaaaattgaggggatcaaagattatcaggagatcgaagtgggagggaaattgaccatcgctccggtagtgacgacaaaattcggcgaaaactcggatctttcctatgtgtggtataaatacaatgaagaacagtctgtcgccgataccttgtcttttgaaaaaaatctggatgtggtgatctcggatgttttaccgggggtgaaaactactttaaaatttaaagtgaccgacaataaaaccggtctttatgtgatcgaagaatccagttttaccactatcggtaaatattcaggaggcaccctgatgttatgtaaaaccggtggagagtacgacctgacgatgttaaagaaagatggtaccaccctatacgaaaagatctatactcaaatcaatgagggagagaaactcagtgagcagtcccgaaaaatcatcctgatcaaaccttatgcccgtaacccgagaccttataaggcagtcgtcgttactgcaaaaaataatacgggaggcgtatatctcgatcccgatttatttgtgcggaaggcttatatgaaagagaaattcttttcgggtgaagacctgaccggagacatcgggatcgacggttattgtacggaccaggggagtgattatctggtggtgaatgggaaagtacacgggcgggcctatggttttgaggaaacagccgtatggaatccggaaattgtatttttgtcggctcctcaggattattcggcagcactttatgttgcacagccgacaggctatccgttttatgccgctcccttattttatgataacctgcacggacgttttatgatcaaccaaagcggtgggtattttagttttatcggtggggcgaattccgatttttcgaaatttgatcccaaagcaatgggagaaggggtagaattggtactttcagggagtatgaattcgactctgaatgaagtatgggcgttgatgagagataaaaataagaatgaatattttttgattacctataaatttatttttaatgacgactggacgtatgattttatctctctgtcaaagcaggtattaaccggagcagcctatcccggattatacaacgctacggcgatgatacccggaaacaaggccgaggtagacaattacatgccttggcatatggattcgaaaggaatttcggatatctttttctatgtcagcgatgataaagtttatgcttttaatgtgaaaacggcttctgagggagtgattatcgacggtacgaaagagcattatgcgatcgatggggtagattgtacggaagtagctgctccgacgacagagaatccgaatgctaccatgatacagttgactatagccattaaagacgggaatattccggctccgaatgggggaattgctgtttataaattgaataatatcggtggacttgcagcacaaaaactttataccaaagcaggattttgtgatgaggtggtagcgacggtggaaaaacaagattaatatatgaaagtgatgaaaataataaacttaatcattggaatagcatgcctgttaggggcatgccattccaatcgcatgcggattgaaggagaaatcggagatataaaggaaaataagatctatctcggggaaataacgaatacctattatgggttgttcgatccgatcgattcggctgaaattgaagagggtaaatttacttttacggtagattgtgcgaaaaaacaaatgctctttctgggattcaggcccggacaaggaggaatggtatttgccgaggccggtaatctgaaggtaaaacctgcaactgttaagaagggaggagtggtatgggaagtttccgggtctgtcttaaatgataagtatcgggattttatgaaagcctgtgccgttgtcagaaacgatcggttgctggattcgttggatgccttgttttttactgcccgcgaccgggaggaccgggaggaaatggcccggatcaaagaggagtctatgccttattatgagcaggcacagatggccgaagatcagttggtaagacaaacggttgacggaaatatggagaatccgttcggaatttatttgtactacagtaaattattcggacggaaagatttctctactaaagaaaatatcggtgcggaaagggaataccagaaaaattttggaccggaagctcagcagactccttatatcgctttgatgaacgctcagctcgaccgttatgcgggatgtgctatcggtgctgtcgccccggagattaccggccgggatacgctgggtaatccgatcaaattaagtgatttcagaggtaaatatgttattgtggatttttgggattcttattgtcattggtgtcgcgaagaaacaccgtggctgagaaaagcattggaagcttttaagggaaaaaattttaccattttaggcgtatcggatgaccggaagaaagagttgtggctggcagctatcaaagaagatcatagtaactgggatcatttgttattgcctccaaaaacggatatttttacgacttattgcatcaagggaatccctcacattattttagtggggccggacgggaaaatactggcaaaggaaatgcggcatgaagaattgaccgacgtgccggctaagtttataaagtgaacagataggagtttatagaccgatttaattccccctttttccaatgctccgttttttcatatttatagtaggtttattttttctttctattccgattccaggttttgtgccatcggaccggttcgcctggaccggtccgttaaggctttccttcactgaccggcggaactcctcacttcgttcgtcaaacaccaccgctcggccgttcggaaaacctaaccggaccctcgttcctgctccaatggtccccgaacacgaacaccgaagacgaataagtaacgacagaataattctaggtttttctgttaaagccggaaaatttcgataacccttttcttttataggatatctcccgtagaaaatacctatttttgtttagagaataaataaaaaagcggagacatgttttataagcaaaacggaattgttgccggaatattgttgttgatcttatttgccggagctatcggcttagtcagtgtacagatggacaagacggtgaatcggatgcattattcagtggtggaagagatgggggagtaccggacggaactgatccggcaggatttccaaaagacggcagagctggttgaaagtatgcaggattatttggcgacacggggctatcagaaggaacaattcgaagagttgattgccttattgatccgacaggataataaggtgagccgaatttggttcgaaacggaagggaaaagaacgatttgtaccgattccggtatacgggagagtgaagccggaccttcaaaggaaagaaatggagggttgtatgccgaagattccacttattactggacgttatacgggcggcagggggaggtggcattggggatcgatatcgctttggatcatttacatgcttatttttcaaacttattacctgcggggaagaactatgcttatatcctgaacgactccggggtaattgtcgcccatcccgaagaaaaatggctggggatgcggctcctcgattcgcttgaaagaagaagggtaaaacaggtcgtcggggagaataaacggatccatgttaccggtttttcgcagtttttactcttgcctgtcgataagatttattatccgctcacggtggggacagagaaatgtacggtcgtcattaacgtggtgcaattggataatcaggaagctatggccgatttccatcggtatgctttgtggatagtcgtgtttacagtcgtgatttttattgttttgcttgcttattcccaacggcggtggcggaaagaatacgatttacggcaaaaggccgaacaggaagccatccggctgaatttgcaacaattgaaaaatcaactcaatcctcattttttattcaatgctttgaattctttgagtgccttgatcactaccgaccccggagtagcccggaaatttatattggaaatgtcgaaagtgtatcgttatgtgctggaaaaacggaaagaaaacctgagtaaattagaagaagaggttgaatttatccgccactattattttctccaaaaaatacgtttcggggaacaattgaatctgcacctggccgataatttgacaacggtaaacgggaggattccggcgatgagtctgcaattgattttcgaaaatgtacttaagtacaatgaaattactcatagatatcctttggatatcgatatttatgcggaagttggagcggtgattgtagaaaattcctatcatccccggaccgatatgccggaggcatctttcggagtcggtatggagagtattcaggaaatttatcgttattatgctgacgttcagccggaatatgagataaaggaagggaaatttatctgccgcttacctttggttgaataattcactccttttttatcgtgtttcatacttttattcgggggattcattctggttttttttcattttataaaaaatcccgataatattgtaaactgcataaatatcgatgaatactgaataaactatatgatgaaaaccagaacaaatttaattgtagcgttattcgcactctgttttaccggaacagtctccgatgcttatgcctggggatggcataaaagaaaatccgtaaaaaatgattcggtcgtaacttctgaaagtaaatacgatgagttggtgaagaaggcaaagacgcgggaaggtatgtttcgtattcatcaggtagagaaggattggtatttcgagatcgacgattcgttgatgaaccgtgatctcctgattgtcaataaagtttccggtgtaccttatcaattgaacgatgccggtttaaataaagggatggcttacgaagataagctgatccgttttcataaagatacagtgcttaataaagtgtgggtgacaacgtggaatccccgtgtcagtgtgcccgagggggatgctatagccctttcggtgaaggacaactatcgtgaagctgtgatcgaacagtttccgatagaagccttcaagcccgattcttctgccgtcttgatcaaggtgaataaagttttcgacggaagtgagaagagctttaacgatttatacaatagtatttctttggaagcttctgtgaaaaaagaattgtcccggatcggaggtatgaaagcttttcctcagaatattgtagtaaaagcttttctgacgacccagattacggaaggtaccgagtcggtacccttgacagtcgaaacgacaacgaatatcgtattgttgccgaaggtgccgatgactccgcgttttgcagaccggagagtcggattttttacgactcctcacatttatttcaatgacaaacagcaggcggtggaaacccgtgattttgtacatcgctggcggctggaaccgaaaccggaggatatagagaaatacaaacggggcgagttggtagaaccggccaaaccgattgtattttatatcgacccggcaactcccgctcaatggagggaggagattaaagccggtgtttttgattggcaggaagcttttgaagctgccggttttaaaaatgcggttgtagcgaaggatgctccgaccgatgatcctgatttcgatatcgacgatgcgcgttattcggtgattacttatgcggcctcgcagcaagcgaatgccatgggaccttctgtggtcgacccccgttcgggagagattatcgaagccgatgtcgtttggtggcataatgtgatgacgatgttacatacctggatgcgggtacagaccgggcctatcgatccccgggccagagcgaatactttcgatgatgcttatatggcgagtgctatccgttttgtatcttcccatgaagtgggacatacgttcggattgaaacacaatatgggagcttcttcgtcttttccggtagattcgttgcgctcgaagaccttcacagcaaggatgggcgggacggctagttcgatcatggattatgcccgttttaattacgtggcccaacccgaagatgaggtagaacgaattacgccggtgatcggggtatatgataaatttgcgataaattgggcttatcgttggctggatgtaaaggatccgcacgaagaattacctgtactcaatcaatggattacgaaacattccggagacaagatgtattggtacggcgaacaacaggaccctaaagatccgatcgatcctcgttctcaggatgaggacctcggtgacgatgtgatcaaggctaatcgctacggtatacaaaatctgaaacggattgtgccgaatattgtagcatggaccgaagcagaaggacaaggttatctggaagcgggaaaattattgatggcggtgatcaatcaatggaaaatgtatgccggacatgtaactgcgaatgtcggaggtttctatatcaataatccggtgatgggagatgatctggaacgctatgtaccggtagagaaagaacggcagaaagaagcggtgaaatatttatccgaagaagtatttaccgttcctgaatggttgtttgctgccgatgtctggaagaagagttttcccgttcgtacttccccccaggaagtagaatattcaccttataatactgcccgggaattacagtatgcctgtttttatgatttattgaaagacgatcggctgatgcggatgtacgaggccgaagcgatgaagggaaagaaaaatgtgtatacacccgaagaaatgtttgccgatttataccaggtggttttcaagggatccctacagggacgtaatttgtctttgtatgaaagaatgacccaaaagaattttatcgatgctatcattgtcagttccaataaagcggtggaaaaaacgaccaaaaaagctttgcataccggttattgttgtggttttgcagcccgggaagctgctttcacgctccccgaacagcctgaaacccggcttggcaatatgcaatattcttctatgggacgggtttccgaggctgtatcggtgaagagaggagttatgttacaggtattaaaattggcagaaagaaaccggaatgcaggaaatgcggaaacccggcaacattatgaagatttggttgtgcggattaaagaggctttgaatataagataacatacaaacctaaataataaatataaatgcgtaaactattgatcttaataacattgtgcctgcctgtggtggtgtgggcacaggatatgcggaagattaccgggcgagtgctcgaggctgcgagcggtgaacctctccccggtgctacggtttttatcgatccggatgctcctgaagctaaagaatataatcctgcggggacagtgacggatgtaagcggaaaattcgaattgaccttgcctgcttcgattcgttatgtggtggtgagttttatcggatacgaggctttaaaagcggatatatcgggaaagaccgaatttactttccgcctgaaggaagaagtgagtcagttggatgaagtggtcgttacgggatatcagcagatagaaaagcggaaagttacttcggctattactactgtacaggcagacgatattaaaagtatcggagtggccagtatcgatcagatgctggaaggacaggtggccggtttgatgtcgacaccgacgaacggtgcgcccggagctcccgctaaaatgcggatccggagtacggtttctctgtcggggagtaccgatccgttgtgggtactcgacggtatgatcctggaaggaaacgatatacccaaggattttggagataaggataatatcgatgaactgcagaatacttcgatcggcggggtcaatcccgcagatatcgagagcatcactatattgaaagatgcggcagctacagctatttatggagctaaggccgctaacggggtgattgtgattacgacgaaaaagggccggcagggaaaactacgggtgaatttttccggtggggtattctatacattgaaacctgatttgggcaaactgaatctgatgaattcgtctgagaaagtggacttcgagttgggattggcttcccgttccgatctggattaccggagcgactatggtgaagtgtcccgtctgctgtcaaaatacgggcaattggatgctttgagggaaaatgggttcaacggtatttcttccgaggcacagggggctatcgatgctttgcgcggacaaactaccgattggggggatgtgatctaccggaatgcagtcaaccaacagtataacctgagcatttcaggaggatcggataaggcgacttattatttttctggcggatattacaatgagcaggggacgacccgtaaaaccggtttcgaacgctacaacctgactttgaaaaccgatttcgatctggctaaaaacctgaaggccggcgtttctctttttttgaacgacagtaagaaaaacggttacctgacggatggggatgcttttatcaatcccgccaattattcacgtaatgccaatccttacttgcagctgaccgatgaaaaaggagattatatttatgaccctgatatcgaaggatatagtggccgttatgtgaaattcaattacctggaagaggtggacaatacggattatacgctgaaaaatcgctctataaagcctttgtttactttagattacaggctgaccgactggctaaaactacaaactcagttttctatgcagctggatcattctgcgacagaaaaggtggcggctaaagaaacttattatgttcgtaaatatcgcgaaaaaacaagagggaacgatggcagttattttttgcccgacggaggaattatacagaattctaccaaagatatgaatcaatatcattggaaattgcaaggtgagttcaatcaggtgttcggagaagtacatgctgtcaattatatggccggtatagaattacgtcgcagcaaggtgacagacctgatgacccgtggattcggttatgatccgaattcgttgactacgaagcctttggtatttcctgaaggaagtacccagatagataatgccgaatttaaacagtatagtaaatcgttcacggaggaccgtttcctttctgtctacatgaccggttcgtatacttataataaccgttacactttcttcggaagtttacggtatgacggttccaatatgttcggagtagaccggaagtacaaatacttgcctttatgggctgtttccggtgcctggaatatcaaccgggaagcatttttgagcgatgccgactggttgtccgatctgaaactgagagcttcctatggggtccagggaaatgtcgataaagatacctctccattggttgtcggggaatgggacaatacccaggttttaccggacaattccgagtccaatattatcgtatcgtctccccctaaccaatatttgcgttgggaaaaaaccaccaactggaacgggggactcgatgtggcggtgctcggtaaccggatcgcgtttacagccgatgtttacagacgggtgagtgatgatttgatcggtatgaggagcttgccgggagagaacggtttcgattattcgaccatgaactgggcgaaattgaccaaccggggatacgaattatctctgtctacagtaaatgtgaaaacaaaggatttccggtgggtgatggattttaatctggcgcataataagagtaagatcaatcggctgaatgtcagggataattcctatgaaccttcacgcgaaggctattctgtcggtgctgtattttcgctgaagaccgcagggctggatgaaaatggattgcagatgttttataataaacagggggaaaaggtttctttcaatgactttttcggtctggaatacggttatatgatgggaggcctgattcctttcctgaaaagtaacctgagtgcagaagaatatcgtaatttatttacctacgaaggtacgaccgaaccgaaatttaccggtggctggatcaatcggttttattacaagaatttcgatttgaccgtatcggcttcttttgtgttggatcagaccgtgcaggaacaacctttctataatccggtacagacttcaccgggacagaattattcccgccggatgtcacagatttggtctccggataatacctccggtaaatatccccgtatcatgggtacttataccgaaggggaggagaattgggcttatcagtggctcggtatgctcgatcccggtaattcttaccggaaatacgactattggttcaagaagatgagttatatgcgcatcaatagtatacgtttaggatatacttttcccgagcggcttttaggacatatcggtttttcctctgcacgcatcagctttgaagcccgtaatccttttgtgttcggtagtagctataaaggttatttcgatccggaaacctatgggaatatttatacccagccgttggcgaagaccttttcttgtggaatcgatttgacattttaactctaaatataaaaatatgaaacgaatatatatcctattgatcgctgtcttttcactgggaatgggaggatgtaattatgtcgatgtcgatcctgtcggaaaggtgattccggatgaagtttcggaatatcgggcccttctgactacggcttatagtacctatccccaataccgccgctatctgatggtacgttccgatgaagtatttccggatttgtatgggttgtcttacgataattacattgacttggccactttgaacgatgagaatccggatcctttaaccgagacttatccctggacggctatgtataatatgattttttatgccaatacggttatcgaaggagtgatggaggccagggcggatgtcacgacggattcccgcgagcaattgctggctgaagcctattgtctccgggcttttgttcacttcgatttaatcaatctgtatgccaaatggtatgatccggctactgcggcaacagataaagccgttccgctttctttaaagatcgatatcggacagtcgtttatacctactactgtggaaaaggtatatgaacaggtgttcgccgatttacaggaagcggagaaatatatgcaggtggagcaacagacgggtgcttatctgtaccggttttcgaagaaagcgctgaaagccttccaggccagggtatatctttatcatcaggattggaaacaggctcaggagacagccgaaagtctgctggcggcttgtccgctggaggatctgacgactaccgaagcccaaccttggacttatacgtcgaaagaagcgatacttgctttggaaacggtatccagtaccgtaatgaaagaagatatgtacgtattggataatatcagcggaaaatttaaccagataaaagagggagataaatatgtagatgcccggctgggaaattatttggtcgataaatacggaacctggtattgtaataaaggagggaataagaatgagaaggtcactttccggagtgcagagctttggctgattgctgccgaagctgctgctcaccgcgaaggacaactgccggcagccaaagaatatctgttgaccttgcttcagaagcgtctggctgaaagttattataacgaacggaaagcagagatcgaaaccatgaatcaggaacaattgttggccgatatcatggaggaaagggcccgggaactggtattcgaaggacatcgctggttcgatcttcgtagaacgacccgcccggaggttataaaaaactatatggatgccgattggaattcgcttacggttacgatccggcaggacgatcccaagtatattattccttatccgaaagaagcgattcagaataatccggaattgaataattagggttgagttgaaacggtaacaacggataaaacggtaacaacagtaaaaatggtaaagaaatacggttgttaccgttttttttataaaataaaaaactttgacttggcaggcaagtccttttttcgtattttcgggcgatcctatatttcaatatgactgcaattattattgaagatgaagctttggctgcccgtgaattggaaagtattctgaaaaagttggcaccggaaatagaaatcgttgcccgtcaggattctgtacggggaagtgtacaatggctgaaagaaaatcaggtagatttgattttcagcgatgttcatttgggagatggacgtagtttcgatattttcggacaagtagagatcaaagctcctgtcatttttattaccgcttatgatgaatatgctttgcaagctttcaagagccagggaatagattatatcctgaaaccttttgacgaagaggaaatactgcgggcgttggaaaaagtgcggaattggtttgcaaaagaaaagaaagcaccccggacggtccgatttcaggagcgctttttggtgcagatcggaacgaagatcaaatccgtaccggtggcagaagtcgcttattttatggccgatggaaaatacctgatgttatatacccacgaagggggagggtatatcctcgatcagacgatggctgcactcgaagaacgcctggatccccaaatcttttttcggatcaaccggaagtttatagtgggcttttctgctatcaaagaaatgatccgttattccaataaccgcataaaaatcggtttatctcctttgcctcctgaaaatatagaagctatcgtcagtgccgaccgcattcgcgagttccgggactggttgaaccgctaaaagttattcagcgacgcaataacaaaaatatcccggatgaaaattcattatccgggatattttgttattgctggaagggagattatttcccattgatttcgtccagaatctcctgtatctgttcctggcaaccgccacaaccggttcctgcgttcgtcgcttcgcctacttcttcgacggtttttaatcctttttcacgaattgcattttcaatttcttctctgcttacttcaaagcagtggcaaataatttcactcatagtctttccattttattgattcatattacttttcattcgtttgaatgaatgcggtaaatttaaagtaattttctaaaaatggcagaatatattcaatcatatctttttatgaggatatagatttgaattatattgaagcagttccatcccgtttaaatatcaggaagagcatttaaaatcttttcggcgtctggtgaagaagggcggactgctttggggttgataatcttgccatccgggtcaataagaatgaaatgagggataccgtcgatattataatcccgttggaattgactccctcgcccaagcaaaagttgaacgccggagagttctcccgatttgactgtttcttcccatgctgccttatcctcgtcggtggaaagaccgaggaaggtgatgtttttcccttccattttcttttccagttctatcaaatagggcatttctcttttacagggaccgcaccaggtcgcccacatgtcgatatacagatatttccctttgaaatccttcaaggagtaagttttaccgttaatgtccttggcctggaagtccggggaaagtttgccggtaacggcaatgttccgtttgtcatactctgttttataggcagtccgtagagtcgggtcagtcgcgtaagtattgtaaatattttccagttcggtgatatggttaataccgttctttatctgtctgatggcaatctcgttcagaagagattgttttagcttgtcatttttgaaatgttgggcgatatatttcatccgggcaacatttttattgtagatgccggagatttctttatccttgcttccaagcacaagagcagcctctataataaattccctgtaaatgtcaaggtcaatcagactttcgtcttcctgtacgtatttttccaatgttgaataatattcctcattcgggcgataagttgtgtcgaacatgatatgtcccatgggatacataaccaaactgatcagatatgaatacttgattcgtccctcctccagttttgcaaattcgggatttaccgcttccagtttccgggctttcaataaattggccgcctcgtctgtcttctcgttgacaagactgacaatctcctttagtgagcgctcgtattcgggggggattatcgggttgtaagtgatagaattgaggtattctattaccggagtgttttttccttcgaatttcatgctgtccttaaaattgttggcatcaaaagaaattgtgacacgatcgcctttctggaaaaaaacatttttggcttcctcgccataaaacagacgggcgtatatcatattcccctgtaatgtacagctggcttttccgtgtttatccagatccgtttccttgatcatttccgggctgacaacaatggcaattttggaataggtcatgttttgcacgttgaagtctacgacgatatcgtcgttgttttgctgtgaacaagagcaaacgaccgagagtaaaataataaatataaagtttctcattttaaagtgtatatgattaatcataaatttcctgcatggcagcatccagccatccgcctcttgcgtttacattaatgatttttcccttgtcgtttacaaggatagaggaaggaactccgctcaggttataagcccggaaagccgctttggtattatcgataagctgttcccaaggcatcttttcctcttccaaagcctgatgccaattcttcggatcactgtcaatggagatactcacgatatttaaccctttgggatggtaggtattgtacgtgttacgcatgtgaggtatctccccgcggcagggactacaccatgatgcccagaattcaattaatgtagtggtcccgggtttcacaaaatccgatattttctttttacttccgtccgctgccgtgagttccatgtcgatgaaagatcctccgataaatacctgtttgccctggatcgttgcccgaagagcctggcccatttccgaattttgcatttcgggggataggcaggtgaataatccttcgatttctttcaaagaaaggtcggaattcttgtcggagagttcttgtgcgattttaacgctgatggcagattcgggatgtgctttaaggtagttgatttgagtctctctgagggctagtcttttttgggtgacgagtttggccagatcaatcgctttggctaaatctttcgaattgtaataagcttccccgtaagcgcggaacgttttgctccggtcgtcctccatgggttgtatctcgttcaggtagttttgatattcagtttgagtcccgcttccggagatctgaaacacgggatatttgctggaatagtcgcaagtggcttctatcgctgcattgtcgataaataacgagaagtttacaattttactgcgggtcagccggtcattgggatcaaggtagatgctgaccgtgcaataacgcggcacatcgaatttacccagaaacctgaatttaccccccgatattttcgtactgtcgatgaaatgaggttgattggtatcatccagtgccagaaaaacgggtttcccttcccatgcttcggggacatgtccggtgagggtatatccgtcgtgttccgtacaactgacgacggatagaatgagtgcgataaatagaatgtatttcatctttaaaatcgatttgctgtttttaaagagggtgtgtcaaaatgcaaattttcgtatttttagtggcttctcaatattgattatcaataaattgcaactatataatttatcgaaacacgcattttgacacaccctctatgtggtattattgtacctcttcgtatgtgaaatcgatccggaaagtaaccatacccattccgtaatatgaagattcataagatacgcttgtaacgtaattatcttcatcatacgtgtagtttaactcgtgggtcgttgtttcttccgtctccggatctactaccgacatttttacgggaattcctgccgatttttctccgatcaaccctgtgaatgcagcgtacatccatccccaatcttgagtatagtctatgtttgaaagttgtaagaaaagggctgcaatgtccattcctggacgagtgtatttttgtgtttggtcgtattcgaatgatgttccgctgacattgactaaattgccggcatcaaaagtatattctaaattgttaagacctcctttgccttcataggatttcatataccggtctgcatatgtccagtcagcactcatgtttacgtcctttgtattccaaagattatagaaaattgtagcatttgattgtgctaaatcatcggttacactcagagtaacctgtcttacatatccttctaattcccagtcaggatccggattactgatagataaaataatttggtcattgtttgtttgtacatcatagttcatctcatgttcgtaaaggacattagcgtacttgaaactttgtggaccgttggctgcataggaaatttcgaatgtagattctgtgatataatctgccattatttgactgaaatcatttacccagccgatcttgaccaatcgtttgtattttacaatttcgaactcttcggttaatgtccattcccctccatcctgggcaaggataagacggtaagttccggcactgaggtctgtgggtaaagtacaaatcaatccgctctggtagtctgttacagtcaattcagttcgggtgccattcccggtttctgcgtatacttttgacgtttcgttgtatccgttaccgccaatatttattatttggccggtaaatcctgcttcgggtatttctaatccgatgattgggagtgaagccgctgttaattcaatgcttcccaattcccattcgccgtcttgttttagtaccaacgtatattgtcctggtgttaagctcatcggcacggtcattgtcacaccggtggaaacaatggttagttgacttacatcggcagatgaggctgtgcctttgaaggtgaactgtgctgttgaagcgaatccggtaccggatacgataatttccgtaccgatttcagctgtagcgggtattctcacgtttgatacagggttttgtggtgtcggatcatcatagtactacgaaatggttttgc

SEQ ID NO: 5898 - DNA, 318 bp, Unknown
  gut microbiota DNA sequence
cagatccagattggcaaagtcgattcttccgtcaaaccactttggatggccacgttttcctgttttctgttccaatgtcggatagtacaggattacgtcattccgaaagcggctgatgacatggaaatcgttctcacacataggcgttatgaatgtttccttggaaaagaatgcgtctgcaaccaccgttcttgatatgctctgtatcttgtcttttctactgataagatagctgctgtaccagtcaacgaggttcttgtccatattatccaaggttttacaatccggtgtctgaatggaacctaaagtcatgcattc

SEQ ID NO: 5899 - DNA, 275 bp, Unknown
  gut microbiota DNA sequence
aggcgcttgagtgattcacggttaaggaactaggcaaactgaccctgtaacttcgggataaagggtccctacccttttatgggagggcgcagagaatcggtccaggcaactgtttaacaaaaacacagggctgtgccaaatcgaaagatccagtatacagcctgacacctgcccggtgctggaaggttaagaggagatgtcatcgataagagaagcgttgaattgaagccccagtaaacggcggccgtaactataacggtcctaaggtagcgaaa

SEQ ID NO: 5900 - DNA, 28830 bp, Unknown
  gut microbiota DNA sequence
atctaaaatttcgtctgataaggattgcaatttttctattttcatttttaagtgaatgcaatatgtaaaacgacaggcaaagttacgaaaaataccacataatataagtctttatagttttatttactacctcctgcttacctgtcggtactgtttttgattcattacttgttggaagaaggagttataaaaggtgtatcctgccctttataactcctgtaattctattaattcttgtaactctaattccctcgataaattttgcctgttgctgataagataactaaaaatgaattatttttgaccacaaaattcaattttatgaacgtaaaagccaaggggtatattttaggcgctgttgcagcggccacttatgggatgaatccgttatttgccttgccgttgtataaagcaggtatgaatccggattcggttctttttttccgttatctttttgccatacccgtgttggggatgatgatcgtggcaagggggagaagttttaagctgaaacgtaaagaagtgttgcccttgatcataatgggattactggtagccctttcctcgctggcattgtttcagagttacaattatatggatgtcggtattgcctccactttgttgtttgtctatcctatcctggttgcattgatcatgtggatcgcatttaaagaaaaattaaccttaccgacagtattatgtatcttactggccttgggaggtatcggcctgctatataaaagcggtgacggtagcacacttaatctgacaggaattattttggtgatgatttctgccctatcctatgctatttatattgtaggagtgaaccagtcgaccctgaagaatttagcgacgctttcgttgactttctatgttttactctttggattagtcttatttttggtccgggtcgatttcggccaaagtcttcgtgtggctgaaacctggtatttgtggggtaacctgatcgctttagctatttttccaacggcgatttcatttctttgtactacccaggccatacaatatatcggttccacccctacagctatcttgggggctttagagcctttgaccgctgtcttcttcggagtagtcgttttcggagaatccctgacactacggttgagttgcggtatgttgatgattattctcgcagtcactctgattattgcaggaggaaatattaccatttatctggtgcgtttcaggaaattatttcccagactcccgatcaaaagaaaaaaatgatttttaataacacgaacagtgaccgaaaatcacaaacacgtcttccatagactgtatgttttgtgggaagtatgcagtctataaagacataaataagataaattcgtatctttgtatcgttaaccacgcacggcaaacgtatccatatggtgcagttgaccattgagttgataatgaatcaaacgatgaaaactaaccatataatatatacgttttctatccatcccacaaatttaaacgaattattctcccgcgctagtcattcaaccataaaatttatgaatcagacagctcttccatttgaaaatattacttttgcggtagattaaaaacaataggacgatctattcggagagaaagaaacaacaaaaattatggtaaaaaaattttatatagaaacctatggttgccagatgaatgtggctgatagcgaagttgtagcagccattctgaccgccgccggcttcgaacatacaaccgataagaacgaagcggatgtcattctggtgaatacttgttctgtacgggaaaatgccgaacaaagggtaagaggccgggtacagggattctcggaaatccggaaacgcaaccctcacctcctggtaggcgtgatgggttgtatggccgaacgcctgggggcgaaactcttcgaagaagagaaaaatgtcaatatcgtcgtcggtcccgatgcttatatggacctgcctctattgatcgaacaggcagcacaaggcaaaaaagccatcaatatcaaactttctaccaccgagacttataaagacatttgcccctcgcgcatagacgagacggcgatttcgggcttcgtatctatcatgcggggatgtaacaatttttgtacgtactgtattgtcccgtatacccgtggacgggaacgcagccggagtccgcacagtatcgtcggcgaggtgatcgatttgcaacgccggggatacaaagaagtcactttattgggacaaaacgtcaattcctatctttataaagacgaacaaacgagggtcgactttccggctcttctggaattagtagcccgtacggtcccggatatgcggattcgtttcgccacctcacatcccaaagacatgagcgataaaaccctggaaacgatcgcccgttggcccaatatctgcaaagccattcacctgccggtacaatcgggaagtaattctgtcctgaaagatatgaaccgcaaatatacacgggaatggtatctcgaccggatcgctgccattcgccgcatcgtccccgattgcggcatctcgacagatgtatttgtgggcttccataacgaaagcgaagaagattaccggcaaacactggaattgatgcgggaagtggggttcgatctggcatatatgttcaaatattcggaacgccccggtacccaagcttccaaaagcctcccggataacatcgacgaaaccacgaaaggcaggcgtctgcaggaactgatcgacctgcaaaccggatggtcgctggaaagtaaccgccgcgatatcggtaaaactttcgaagtattggtagaaggcgtatctaaaaagagctccgacgagatgttcggacggagtagtcagaataaagtaatcgtttttccggctaaaaatattccgatcggttctttgattcaggttaaaatcaaggattgtacttccgccacactcatcggagaaattgccaacacacaataagagacgccatgacgaactttcgaaaattacaaaacgaagaattgaaccggatcagtaccgaagccttcaaaaaagctcccaagctcccggtggtcatcctattggatcatgtccgcagtcagaataatgtaggttcggtcttccgaacctccgatgctttccgcatcgaaaaaatctttctctgcggtatcacctccactccggaaaacagggaagtgcataaaactgccctgggagccgaagatgcggtcgattgggaatatgtcaaagataccacagaagcggtcgatcggttgaaaaaggaaggttatcggatttttgccatcgaacaagccgaaaataccacttcgctggaaaacttttctctgtcacccggtcagaaatatgcgctgatcttcgggaatgaggtcaagggagtgcaacaagaggtaatcgatctgtccgacggttgtatagagattccccaattcgggacgaaacactctttcaatatctcggtgactgtcgggatcgtcctttggcaaatcatcgctcctcttctgggaaccctgaaaaccgattaaaagccccaaaggctgaccggcgaagtcacacacttcggtcctgaacccgaactttaactccgccggtcttccgatcggtttctgcaaggaaagccagttaccaaaaatggggcattacatttctccggacaatgccttgaagatctttaccgcttcacaagcttctctgacatcgtgcacccttaaaatattcgctcctttcagtaaagagaccgtattcaacacagcggtaccgttcaatgcttctgccggtgaattacccagcaatttgtaaatcatcgattttctggaaattccgaccaacaggggataaccgaggtcctgaaaatgctccaacccattcatcagctcatagttgtgtgccaaagtcttaccgaaaccgaagccgggatccagaataatattatcaaaaccttcggcattcaggcaagcgatccgatctgtcagaaatttccttacttcttttacgatactttcataatgaggatttttctgcatcgtctgtggagtcccctggatatgcatcatgatgtaaggcacaccggtccgggtcacataatcaaacatcccctcatccatcgttcctcccgaaatatcgttcacgataacaggtccctgagcagcgacgatttcttcggctacttttgcccggaaagtatcgatcgaaacgatcgcctccggataatgtttccgaatcagttccaccgcctgcaacaaacgtctgatttcttcccgatcgtctacataatcggctccgggacgggtagaataagccccgacatcgatcatatccgccccttcatccataatctgatgaatgcgttcgacaatttttacctcactcaggtatcttccaccatcataaaaagagtctggagttacattcagtatccccatcactgccggaacagtaaaatccaattcctgatttcctaactttattgttttcaatgctttcaatttattatagttcttttttcttttccatctttctttctaatcctcaatctttcacctcaatcttttttacttctcaaatctattcattaattttacacgttcaaaataataacaaatttatcgtaccgtttttattttgtctgtaaagtctataaacccgattttatcggtacgtttttaattatttaacactatgcctgaaacagctcgagaatacgatatagtgatcggaacatgcagcgatatctttaccaaaaagatgcacgactatggaatggcctggagaattttacggccgacatcgatcaccgaccaaatatttattaaagccaaccggatccggagtatcgaagaaaaaggggtctgcaaaatcaacgaagggattgtccctgaatttatcggtatcgtcaattactccatcatggggctgattcagctggaattaggaccgggagaagatatcccgaccgatcagcaacggatttcccaattatatgaaaactattttcaaaaagccaaagccctgatgctggataaaaatcacgattacggtgaagcgtggcgaagtatgcggaccagttcttataccgacctgatcctgatgaaaatcaaccgtacgaaacagatcgaagataatcagggcaacaccttaatttcggaaggcatcgacgcaaactattacgatatgatcaattatgccgtattcgctttgatccggctgactgtagaaaatgtcaatctataataaacacaaccatatgaaattattgagaaatatctgccgtattttagtcggtattgtatttatttattctggttttgtaaaaggagtggacccgctcggttcagactacaagttcaccgattatttcaatgctttcggcatgagttggatgggattcagtaccctgtttttctccttcttgctctctatggcagaatttcttatcggtatctgtctgttcctgaatatcaagataaaaacagctgcctggggagccattttgtttatgggattttttactcctctcaccctgatcctggctatcaagaatccggtcacagactgcggatgtttcggggatgccctgatcttaaccaattgggaaactttctggaaaaatatcattctgctggcgatgacattagttatcttttacacaagagataagtataaaccgattttcaactttctggaacaaactgtggttttagtggggacggttattttcatgttctgtgtacaatggtactccttccgtcacctgcctatcgtggatttccgtccctatgctatcggtaaaaatatctccgagggtatggccatccccgacggagctccgcatgacgaatatgcgattacgctcaaatacaaaaacaaacagacaggagaagtaaaagactttaccgaggaaaactatccctggcaagataccgtaaactgggaatatatcagctcggatcagaaactgatcaaagaaggatataaagctccgattcatgatttcgtcatcgaacatccggaattgggagacatcacccaggaagtattagaagataatggatatacctttttggttatcgcttacaacatcaataaaaccgatcctgaaaatcaggaaaaattgaaccgactggcagcatatgccaaagataaaggttaccggttttatggtttgagtgcttctgccgccgatgatatccggaaatataccgaagctcatcaggtaaattatgattattgttcaaccgatgaaatacagttgaaaacgatcgtacgctcgaaccccggcttgatccttttacgtcaggggactatcctcgacaaatggggccaccgggatctgccggaagtggaggaattacagaacaaagacttagcttcctattgcctgcaagaacaacaggctatcacagacagatatctgatctacagcctgattatgctctatatcgcctgtatatttctctatataatccggaaatataaaaggatgataaaataaagaaagaaatcaaactgacaattaaagaatataaagcaatttaaaacaacgaatcatgagaaaaaaaattgttgccggtaactggaaaatgaacaaaaccctgcaggaagggattgaactggctaaagaggtaaacagcaaagtaaaagctgctaatgcaaaggatgtgaaggtcatcatcggtacccctttcattcatctggccgaagtaagtaaaatggtagatcctgcagtcattgccgtatctgcacaaaactgcgctacagaagtctccggagcatataccggtgaagtatccgcagctatggtggcctctaccggaagccggtatgtcattctcggtcactctgaaagaagaagctattacggagaaaccgatgaaatcctggttaagaaggtacaacgtgccctggaaaataacctggatgtcattttctgcgtcggagaagttttagccgagagggaagccggcaaacatttcgaagtagtaaaatctcaattggtaaacggtttattcaacctctctgccgatcagttcgcacacatcgtcgtagcttacgaaccggtgtgggctatcggtaccggcaaaacagccacctctgcacaagctgaggaaatgcatgcctttatccgtaaaaccatcgccgacaaatatggtaaagaagtagccgacaacacctcgatcttatacggcggaagctgcaaccccaaaaatgccgacgaactattctgtcaggcagacgtcgacggtggccttatcggcggagcttccctgaaagccgacgactttatggctatcattacggcacggcagaagcattaaaaaagctaaaggcaaggaagctaaaggctaaaggcgaagaagcattaaaaaagctaaaggcaaggaagcttaaggctaaaggcgaagaagcattaaaaaagctaaaggcaaggaagcttaaggctaaaggcgaagaagcattaaaagctatagacaaaaggtaagaaaacccaaagcctatagcttttttgcttttagcctatagcctttcatccttttaccttttttccccataccccatcatctgtcccagaaagtcgtcgggataagtgattccgacatcgataatttttccatcttgttcgacgaggcgatattcagggttgataaaaccggcatatggagccactcccaaagcttcgtaacgggtcaacacttcacggtgtaaccgacggtcgacgtttactccgtaggtctcgatcaatttccgggctccctcgaaatctccttccgatttgatccgctgtacttctcccagcaattgcccgaaaagtactcttaaagcatcgaaatcacgaatgataaaataggtcttacctgccctttgcactttctctattacattcgcttctttcccctgttcataagcccaggcggctatcgtctggcggttacgcatgtgggattcctcaagccggtctccgaatttaatgcgggtgagttgtaccagtaaaccgttccggatatagctgttgtattccgctttagccacttccaacgaagggataattcccagttcgaccaatttgggatccatgatataatagagggcgaacaaatccgcccgggcttcttctatcgtagaataataattacgcaatgcttcggtagtcacacccggcaacatttttcccgacccatgacccagacattcgtgaagatcggtatgcacattactcccgatagttccccattcacgagccaaacgaatttcttcgtccgaaccggcaaactcgtcgatcatcccggaagatttagctgccatatcataggcataagtgatattgtccaaagtcaccgatttacttccgtagcgttcgcggatccattcggcattgggcaaattgatccctatcggagtagccggatgacaatctccgccaagcatagccacctgcataacacgagcagtgatgcctttcacttcttgtttcttaaattcttcgcgaataggggcatgctgttcgaaccacagtgcctctccggccagtttacgggtgcgttctccggcttcctgatcgacgatctccaccaccgattcccaactggccttataagccagaggatccccgtatacctctataaacccgttgataaaatcgaccggggcctgatcctctttcaaccattcgatcgaataccggtcaaaaagttttaaatctcccgttttatagtaatcgatcaataaccgaattactttctgctgctgttcgttataagcatagggtatcgctttttcaagccatgctacgacccgggccaattcctgaccgtactttcctcctattttccagactgcttcccggattaccccttcctctttgaccagggtcgaattcaatccccgggataccggacaggaatcctcttcaccggaagtgcggtaaaattcttcgacttcccgctgggttacattcatataataattattagccgaagcccggatcaaatctttcccttcgtccaaaaccacccgcttggccatataaccggagtcgaacataactcgttccaattcgggaaacacctccggaataccgatcgacgccaacaattcctgaaaataagtcttagaaaaaccagggataaacttatccatagaatagtgatgatggatgccattggcaaagaacaccttcttcgtataaatcagaaaacgcccgaactcatcggtattccgatccccgggatattcccggacaatccgttccagaatcttccggatacgcaaattataccggttattctgatcccatagtatatcccggcctgccaaagcagcctgacgcaggtaatagacaaagatcttttcccgtaatggaagttgcccgaaagccggtacctgataccggagaatttttatatcgtcgaattgttctgttaaaaaattaaatttatcttcttccatctgtcttgtatatgttgaattaattggtcagattctcttcataccaccactcttccttttttaaaaccagagcatcacaggaagcatcgggcccataaaacataaaatagccttcatatttcggatctgtaggagcaagatgatcgaaaaggatacgttttccgtttttatcttgtttcaaaagcatactcgcatccagcgcatattcaaaggtcagagaagcacttctgctctctccttttctcaaaagaggatgattataagtgaccgttccgtcgggatggaaacaggccacccataccgctttccggttggtattccgggttttcgaccatcccagcaaaagtacatacccctgcttctgatgttcgaaagggacaaaatcataaaacaaccaagccatccgatctccgggcaacgctttgatcaggtaactccgctccggatttttaaagcggaataaattataaaaggcctgcccttcgcgcagaggtacggcccaggaaaacaactcgatccctgcatcgtccgatctcttataccccaaatatttcacaggcttttcagtccgataactaccgaaagccgaagaccgtataaaatattcgatctcgccggcatattccaagcgtaccgaatcttcggtcgccgtcttgattttttccaagcagatgacaacactatccatttgtgcccgcaccggccctccggcccccaatagtacccccagaatccaaaaccatttcataccccgaagttttctgttcctattcttcattgaatctttccagaatttcgccggaagctttgatggcatttttataccatttgaataagatttcatccttcgcccgatcggataaatgccagtcgataccgctcccgcgcaaacgacgggtaacactgtacatcgtaatagccgcacaaacactcacgttcagactttcggtaaacccatacatcggtatttttacaaattcgtctgcctgtccgataaccaaatcggacaaaccggttaattctgtcccgaagaaaaaagccattttccctttttccaaatcgatatcgtcgacaaaaatatcgttggcatggggagtcgtagccaggatacgataaccttcggccctcaactgatcgatcgtagcctgggtattgttttccagttctttatgccggtgaatagacagccaatcccgcgcaccctgcgaaactgtggaagtcatatcgtatgaattccggttttcgatcaggtggacatgttgtatcccataacaatcggccgagcgcatcaccgcactttgattatgtgattgaaataaatcttctaacacaaccgttacataatcggtccgctcctgtatcaaccgatcgaacagagcatttttttcatcgacaacaaaatcccgtaaatattctacttgttctttgatggatttcataataaacacaacaagattcaacgattctcagcaaaatacttccaaaggggagctgcgtgagtcgcctgtatgatttcatttttcagtaagagagttctcacttgttccggccttaatacttccaccacaatgtcttcggtcggttcgagatgcctctccatcaccttctccactccggtagccaagaaacaataagtcaggttattatgcgttccgggattcgcacttatgatcatgtagctctgccattctccgtttccgaaaccggtttcttcgagtaattcccgtttggctgcttctaaaggactggcatctgtaggatctacaaccccggcacacaattcataatcaacccgtccgattccgtgccggtattgtctttccatgatcatccccccttccttagtaagagcgatcacacaaatccaggccggatattccaatacataataagtaggaatgacattaccgttcggcaattgcacttcatcccggcgggctgtaaaccagggttctctggcgatatactccgaacggagtaccttccaattctctattttctgtttttccatatacaatcccatacaaaagaaggggtgctttttcgaaacaccccttcttttatcttaatttcctgatcagaatttttctgccaattcagcgcctgctttgaatttaacaactttcttagccggaatagtaatcgttttgccagtctgtgggtttctaccgcttctagcacttctttcagatacagaaaaagaaccgaatccgatcaatgccactttatcaccacctttcagtgcttcaccaactgtttctacgaaagcttccagagcttttttagaatctgcttttgttaaacctgccttttcagcaatagcgtcgattaattgagctttattcataatattaatttttagggttagaattttaaacctctctctaaaggcaaatgtagcgattttattgaggatgtcaatacttttcaaaaaaaaaatccatttttttcaaaaaaaataacaggctttctgctcagaagatattttcggcacatttttcgccatccatggctgccgaaatgattcctccggcgtatccagccccctcaccacaaggatataaccctcgtatctcgggatgcatcagctgctcattgcgcggaattctcaacggagaagaggtacgggtttctacccccagcaaaagtgcccgttcggatacgaatcctttggcccgttgtccgaaatattgcagtccggccgccaaacgccgataaacgatccggggcaaccattcactgatagcagaagtatgtactcccggtttataagacgtcgccggcaaagtgctactgtcctttccggccaggaagtcggtcaaccgctgagcaggagcgaaaagcccaccgcccccttcctcccatgcctgtcgttccaaggcttcctgaaataccatgccggcaaataatccccggtaattcatactttccaattcggccgggccgatagctgtcaccatagctgaatttgcccagggggtattccggtaggaggaggacattccattgacgacctgttggttcggccccgttgccgcaggtacgattaccccacccggacacatacaaaaagaatatactccccgtccgtctatattggtgacaaaattatattcagcagcaggtaaccatttgcctctcccttccggggtgtggtattggatgcgatcgatctcctgctggggatgctctaaacgcaatccgacggcaaaatctttcggctccatccgtaccgcctgcctttgcaacatccgataaatatcccgggccgaatggccggtagctaatatgacatgacggctcgcaatttcctgtcctccggcaatcactccctgtatactgttttcacggattatcagaccggtcacccggcaaccgaaacgaatttctcctccctgtttttgaatagttttacggatattgacgatcactccgggtaatttgtcggttccgacatgcggatgggcttcgaccagaatagcaggattggctccatgatagaccaaaatttccataacccggcgtacatctccccttttcttcgaacgggtatagagttttccatcggaaaaagtcccggctcctccttccccgaaaccgaaattagaatcctcatctaccatcccggtcttatataaaccattcagatcctttttccggtcttcgacagcctttcccctttccagtaccaaaggacggaaaccacgttcgatcaaacgcaaagctgcgaataaaccggcaggccctgcaccgaccacgaccaccgtttctctgtcggacacatcccggtaggccggaacgaaaaccttttctttctcctcgatacggtcgatatgaagtccggcgaccaggttgaacatcacttctttttgccgggcatcgatcgacttacggacaatatctacccggcagatccgttctgcaccgactcctgcaacccgggcagcgatttgccgcaatgtttcctccacacctgcctgttctggctttattctgatctgaatttctgtatacatatctctgataaataagaatgctgaatatcattcaaaattaaaacaaatcgtgaaaatccgggcacgtagtttacttaaagattgtgtataatcctcatatcccggatttttgggatcaggccgatgtaccaatacatccgtcaatcccaatgaaaaacgcaactctattccaaatttgaaataaggcaggtaaaaatccgaaccagctcccatttccagaaaaacatcccctctacgggttcggaaataaaccgacttgtccggatcgatcttatcgtgtttttgaaaatcgaatttataactgcttcctgcagtaataaagggacggaaattattaatccgcttggccttgtatttcaacatcaacggcaaagagacataaaccgactcattataagcatattgtttgttattttcaacctccggcacctgcgtatacaccagcgaacaggtagcgaattccagtcccggcaaaaatctcagcccccaatcatcacctaatctcagttcagaaacaatacccaccagaaatccgacatccagtttgcccgattccgccctccatccattggctcccgacaagacggctttatagtccatataattgatcccgaggctaaaaccgaaatgtaatacggtccggtcaccccgctgataattcaacagactggtattccgcattattttctgggcctgcacgcaacaggataaggataggaataggattatatagaacgctttattcaacatacggaacgaaagtagttattttgattcttttcaacaaatcttgtccgattttaaagctaaaaattgtaagtttgtgaatcattcggataatcattttacaatacgataaagatgaataaaatagcattaatcaccggagctacttccggtatcggccaggcaacagctttaaaagctgcggaagccggattcgatgtaatcattacaggccggagaaacgaccgtttacaagaactggctgaaagtatccgccagaaaggagccgatgtactccccttagccttcgatatccgtcagtccggagaagtcgagacagccattcgaaatctcggggggaaatggagggatatctctgtattggtcaataatgccggtttggcagtgggagtcgctcccatccaggagggtgtcctcgacgattgggaaagaatgatcgataccaatgtaaagggcctgttatacatcacccgtgctgtagcccccctgatgatcgcccggaatacgggtcacatcgtgaatctggcctccatcgccggaaaagaagtatatcccggaggaaacgtgtattgtgcaaccaaacatgctgtggatgccttgtccagggctatgcggacagatatgctgaaacatcatattaaagtaaccaatatcgccccgggaatggtagaaaccgaattttccatcgtgcgctacaaaggagataaagaggctgccgacaaagtatatcagggcatgactccgttgaccaacgaggatattgccgagaccatcattttcgctatcacccgtccggcccacgtctgcctgaacgacatcgtcatcatgcctaccgcccaagccaactccagagacgtagatagaaagtaaaaggttaagccttttactttttttaatcgagctccaacccgaatatcgatttcaggtctgcaacgacgggattgagttctataaaatgccggaatttttctccggcagtgaataattttttttcttctgtcgaattctgatcgtcgaataacttaaatgacaaggtgataaagccattgttcaacaatttcatcagtacattccggagatgcatttttaaagcttcgagcttatcttgttgcaactggttatctactgctaaaacaatattttcaccgtcgatctccggccgatgggtcttgagagctatggcaaccgtcggttcaggacgatgatcttgtatataacgctccagggcagccacgaccttcctttcgtcgatcacatcacgggcttctactttgaattgttgcacctctgttttctgcactttgacgacaggctgggtttgactgatttgcctcagggaatcctttattttaaaagaagcatcggggcggtgacggtcattttcagcaaaatgcctgaccggtttaggagtagcgacagcctgtcccccttctgaagcattagctgccgtctgaaatttacccgcaaaaccttctattttcaggagaaaaccgacctcagaagccctcagatttttttttttagctcattgatctggcagagtttgatcaatgccaattcgatgcacagccgcttttccatgcgtactttgtattgcatttcacattgttcaacgatcttcaaagcttcgtatagaaaatctacctgacaatccgccgcctgtttggcatagcgtgcttttattcccgcactgacctccagtaattggacggttgccggatctttagaaaccaatacatccctgaaatgctttcctaagccggcaatcagatttccgccatcgaatccttttccgatgatctcgttgaaaagtaaaaaggcttcccccacttttccggcattgaacaaatcggtcaaacggaaataataatcgtaatcgagcacgttcaggttttcgatgaccttttcgtaagtcaggtttttgccacaaaaactgaccacctgatcgaaaatagagagcgcatcacgcatagctccgtcggctttctgagcgatcacgtccaaagcggcttcctcggctgtaatcccctcctttgccgaaatatacttcagatgctcgacagtatctcccactttcatccgattaaaatcatagatctgacaacgggacaatatcgtgggtaatattttatgtttttctgtggtagctaaaataaaaatagcatgtgcaggcggctcttccaatgtcttcaggaaagcattgaaagccgaagtactgagcatatgcacttcgtcgatgatgtatacgctgtatttccctacctgaggcaaaatcctcacctgctctaccaatccgcggatatcgtccacgctgttattggaagcggcatccaattcgtgaatattcaacgaacgcccggcattgaaagccttacaggattcgcattcgttacaaggctctgcattgggctgcagattcaggcaattgatcgttttcgcaaaaatacgggcacaagtcgtcttaccgacccctctgggaccggtaaacagataggcctgagccaactgatggttcacaatggcattccgcaaagtggaagtaatagccaactgccccaccaccgtatcgaaacttgcaggcctgtattttcgcgccgaaacaataaaattttccataaacaatcaacaatatacccaaataacggattcactccgtccgggctgtaaaaatagtaagctttcggcgtattcgcaaattctccacccatttttgtggattttctcaccggaaaaaatacctgccgccatcatcggggcagcaggtatttttaatttcattacaataaaaggctgcacctcggcataatcatccgaataagcccggtacttctgctcccggtttgtaattcattttaagtattcatcgaaaaattcctccagtttgtcgaacggaataatgtccgtccggtcatacaaatccgtatgcacggctccgggaataatcatcagttccttgttgtcacccttcagcttcctgaaggcatcctcgctaaaataacgggagtgggctttttcgccatgaatgagtagcacggcactgcggatttcatcggcatacgcaagtataggagcattgacaaaagccagtgaggaggtcttgttccatcccagaccggagttgatggaacggggatgatagcctcgttcggtcttgtaatagtcataataatctttcatgaactgtggtgcgtcgccggcaggcttaggattcatcacggtgcggggataagtgccggtgcgataatcttccgtacgctgggcattgaactcctgacgcattttataacgggcgtccgcattgtcggcagcatcgaaataaccgttcgccgtacagcggctgatatcgtacatggtggaggccacggttgccttgatacgcgtatcgttggctgccgcattgatggcaaaacctccccagccgcagatgccgatgatgccgatacgcccggcatccacatccggacgcgtcgccaggtaatccaccgctgccgaaaagtcttcggtattgatgtccggcgaagccacactgcgaggttgtccgccactctcacctgtaaacgaggggtcgaaagcaatcgtgaggaaaccccgttcggcaagtgtctgagcatacagccccgacgattgttccttcacggcaccgaacggaccgctgacagcgatagccggcagttctcccccggcggtcgttttcggtacatacaagtcggcagcgagcgtgatgccgtaacggttgacaaaggttactttactgtggttcaccttatcgctcttcgggaacgttttgtcccattcctgtgtcagtttcaattcttccatattcctgttactttgagtgtcctgtgccgggctttccgtcaaaccggagaggcagaggaaagcggccgttaaaaaagttatccgtttcataaccgatgtgattttaatgattactgtttcttgttttcttttcacatcgcaaagttacagcgcccagcaaagaggcccggtagatggattacagattgtataaccccaattacagaggttatcccatactttttttatccaccgttcccgtttcagacggacaaggaaaatcaggcttttcgttcctgtcaatgtcacggatataccttgccggtacgcctcctgcaaccgtattggccgccacatctttcgtcaccaccgatccggcggcgataatggcattgtcacccacggtcaccccccgcaggatggtaaaagtgtcataatccgttcctttccctataccagtctgcccatttcgtatgcctcctgcaatttcgggcttcccttaatttctcccgcatgccatacaccgccgcaaaacagcgttccctttaccgtcgggttctccagacaatcgagaaatcccatgaaattggcaacgatacggtccataatcgtttcatcctcttcggcagccgtggcaataaaatagaactccttattcttcatttcggtacaaggtccgcagcaacggtctatcatcattttcatctgagcactcatggcatagaaatagaccggtgttcccatcacgatgacatctgccgcaagcatcttttcaatcacctcagccgcatcgtctttctgcggacagggcttcttataccggctgcatacgctgcaccccgtgcaaggatgtatattcttgtcgcgcaggaaaattttctctacctggtttccactctcaatggctccgcgcataaattcatcgcaaagcgtgtccgaattgccgccacgacggggactggacgataaaatcagaatattcttcgacatggtttatctatttatatgttttttcaaatacatttactccttgacaaacggtttcagacccttgacagcttccgcggcggtaatgcgcttgccgccattatccaggtcgatgaggatgtaacggtcattgcccattcccagttccttcatgtatgacaactggcgtaacccgtgacggctttcgatgcgttccaccaaatcatggtgttcggcttcggtcatggcatataccaaatccacgcatgcctggtccaaagccagaatatcggtagaagaaaagataccgacattcggggtcacgacaggagcggcattcaccccctcgcaatcgcacgataccgacatgttgcgcatcacattgacatacgtgatttgcttgccgaagtaatcgatgacagcctttgtggattcggtcatgcgttccatgaattcctcttcacggatatcccattggttatcctgtcccggtgtggtatgaatccaggcctttccgatccgcccgtccgcacagccgataccgatgttcttgttgcttccgccgaaaccgccttgtgtatgtcctttgaaatgggtaagcaccaccagggagttgtagtcggtagtatggctgcctactgacatttttccgaaccatttaccaccgtgaacaggtaatgtcagggtatcttcttcgtccagaatatctacaggacagaatgtccagccgttcacttccaatgtccgccgatgttgttcggtggtataacggtcgccctcgtaataggtattggtttcaacgatattggcatcagacaaatctttccggaacagggctttaacccattcccgcgggataatgttcggtccgttctgctccccggtatgcagcttcactccggtatgtcccttgatgtccgcacttacctgttcatatgcttcgataagtccttcagcactaaggttacgcgtgaaatagacgatggactcgttgccggtacgctcttcgtaaggcacatacttattaccgtttttcccgggaaccggctcggactgtgctacggcagtcgttcccataactaacaaacttgcaatcataatagttgatattcgtttcattgtcatttgattttattgattcagagtttcagattcctgatacaaagttaagcgtatacctgaaaatacagtgtagatgaattacagatatgataacccaaattacatgatttccggaaaaaacggcataaatctgtagccagggttatattatctgtaatcggggttatgggattatccgtatcatcctctaattttgtacagtgaaaaataaagacatagagaatatggataagatactctatttggaccatgtagatcagtacaaccgtttgtacggtcttgaaaccctgcatccgttggtcagtgtgatcaatctcaatgaagcgacccgcgcggtgggcaccatacgttttaattacggagtgtatgccttgtttttaaaactggaaaaggcatgcgacatcaagtacggccgccagaaatacgattacgaagaagggaccatcgtctgtttcgctcccggacaaacagcagagacgacgccgacagtcgggcatatacaaaccgatgcttatggcatcatcttccatcccgacctgcttcgcggcacgtcattgaataaaacgataaagaactacacctttttctcgtatgaagtcaacgaagcgttgcacgtatccggggaggaacagactatcattttggattgtctgaaaatcatacggaaagaactggagcatgatatagacaagcatagtaaaacactgattgctacctatatcgaattactgctcggttactgcatgcgtttttacgaacggcagtttatcacgcgcagcaaaagcaaccgggatgtgctgacccgtttcgagcagttgctggacgagtatttcgaaggatccgccgccgagcgggacggactcccttcggtgaaacacttcgccgacaaattgtgtctctcatccaattatttcggagacatgctgaaaaaagaaaccggaaagactccgcaggaatatattcaggagaaaataatcgaagtggcaaaggaccgtatatccggcacccaggatacggtaagccagatagcttattccctgggattccaatatccgcagcacctgtgccgcctgtttaagaaacgggccggatgcacaccgaatgaataccgggcaaagatgattggctgaaaggacagatgaaaaagacgttggacataaagagcgtgtgtgaatgcaaccgccgtttgggatgtaaaacactgcatccccaggcaagcatcatcaatctggaacacccggatttggagcaggaagccgtgaaattcgaattctatgccgtgctgctcatcgaggaatgcccggacggctgtggctgctgcggccgtaagtattacgactattccaatgccacgatggtatttctcaaacccggggaaattttccgcatgaacgaagcgggcgtgttaccggacaaagggtggctgttggcgtttcatcccgatttactgtaccgtacctcactgaaaaatcatatcaggaactatacgttcttttcttataacaaggaagaggcattacacttgtccggacgggaaacggcaaccattacgtgctgtcttgaaaatatcgaagaggaactgcaccactccatcgacacgcacaccgcaaccattctctcacggcatatcgagttgatgctggactattgcacccgtttctacgagcggcagttcatcacacgcgagaataagaacaagactgtgctcgaagagttggaaaccctgctcgatgactatatcgcctccggcaggttacagggtgctctgttgcctacatcggaatattgtgccacaggactgggcctatccgtcccttatttcaacgatttgttgaaattcgaaaccggcaagacgttggatgagtatttccaactgcgacggcttgaaacggctaaaaggatgttgctcaaagcggaaaacaccccggccgtcgtagcacggcggttaggctataccagtgtgcaatatttcagtctgttattcaaaaaaattacgggcatcgctcctaatgaataccggtattcaaattaatcagatcattctacaaaaccatttccgcatgcctcatcgaccgacgatgcagaattgggtggactttcttaccggaaagagcggcggaggcggccttgcacggagaccgcccgctgcattaccggtcattataccctcttccatttcctttcttttttcagaccgttaaatgcatgctgtccgacaccatccgtccattgggggaagtggcaaaacaatacgcctccactttcgatgcttcccactcttcaggtaaggcatattccgtttcgcccgccacaccgcgattattcaaagcaacgatacgcacccgctgcagcgccgtttccagcaacacgccgtatactttgtccgccagagaagcaaaaccttcttccggttcctgtgctgtctgactgaaagtataagtccccgattcctcatcatacccaaccgttacccggggtgtaaccaacaaaccggaagccagtaacagccgcccgtaatctatcgttgccaccgaaccggcaccgaacgatactttatccatattgagcgcgacaaaggcattgaatgccgtaccacgccctactccggcaaaacctttacggacaacaggcaatatacgcctgccgaactgcaccagagtcttcatttttgcccgttgctccagaatttccggcgtaggattgtctttccgtttaaacactttcgctttcgcgatatttttacgtttggtgtaaaccaacgtaatattacctaccgatttggtaaccttgcccaacaaataagaattaaattctgccatgattttttaatttaaagtttaacataatgaatcacttgcacataaatccgtgcaattcaggaccggggtcctgtttccggtcggtgatatccgaatgtcctacgacgtaacggatgggataatgctgtttcagtaaccggcatatttcccggagcagccttttctgccgttctgtataacgatgccagaaagtcgccaattcacccgtatcgtcgacataaacatccgccggagcgacttccacgccacactccgccacgaaacgcccctcttgccactgtaaacgccccagattatccaactcgatgccgatggaataacggttcagattcgcccgcccgccataacaactccgcccggcgtgccaggcctccgtatcgaaaggcaccagctggaacaattcgccctgccggccaatgaccaaatgcgccgaagctttcacttcttcttttgccaggaactcggctgccgtacgtgcacttgtcccggccgtgtagtgcaccacaatcatatcgggacctgacagcttccggctgtttttccggcaaaccagatgctgcacgccaccatccaccaaacgatgtttcaagatttccataattgacaataataaaatttatcactttctcatccggaaacgaccgacgatatatccgcccaatccgatttccagcaaatcccagaaccgggaggtatcttccggcatgggcaaatcggtaaacattcccaccaatatcaccacagtaaaggcaagcataatcaccggacgccacgaacgctgcaaccagttgccctgtgcctcgctgcgcagcacgcccgactgcacctgcaaatgttcccgttcataatccaccaaaagagtttccagttcctgcttcaaccgttttttctcggtcgaagatatcgacaggcgttctatgacaccggccacggtttccactattcctttcatacgtcagattttaaatgaatacacaaataactgccgggagaataagccgtcccgtctgccgaaacgaaaaaacaatacaggtggaccgtccccgccggcaaaccttccaactctacggccaccctttgctcctgccggtaactcacggctttatccaaccaaaggggcgaatacattttcccttcgcacaaagccaccacccccacccggtcggttgcccgaacacccgccggctccagactgtttttccaggtcaggactatgcgccgccctgtctgttccgccaattcgagacaattcatcggtggaagggtgccggacaccaacagtaaccgggccggatcgaaaagcgtacgttcgttgaacacatggatgttctgtttcacgaacaggttatacccgttcatcgccgtatctttggccgccatccgccagatatcccgtaaccgggtatcctgcaaacgctgataaaaccggactgccgcaatcagacgcaaccgggcggtccggcacttcaacgcatccggcctgaccgccgacaacggaacagaacgaatccgggtcactcccctcacccggtaaaaaatcatgttcccgatacggccccgaatcacattttcactctttgccataacattttgttttaataggttatacaaaagatcccggccggaatcaaatttcggaagtaaaagtagcaccatcacctccccctttcaaaatctattatacagacagggaaatacgtatataaagacaggaaaatcctatatggaataagatccgggtatccggacgatatttgcagaaaacattgaaacaatgctccacacaaggagaaaacagggtgaagacaggcaacatagccgttacacctcctattcataccctattcacaccttatccccgacgtatgtatatagggcgtgaataggagatgaataagggataatccctaacctgacgcttttcagaccggcaaatcatccacaacaggttagtttatctattggttaattgggagccgaagcaacggcttcgcccggaaaagaaggacggccaccgctcagaatattcaggcgggcaaggaagccggcacgataagagggaccgataggaaaatcatgttgggctatccgtaccgtattgccaaaaaacgtttcgatatcgtagaggctgacgacatagctgtgatggagccggacaaacaaatcggcagggagtttacttgtaacgacagataaggaaaaggccaccgtcaggcggtttttatcgcgaaaatacaggtcgcaatagcaaccgctcgctttcacccaaagcaaatcgctgtacaaatacttacggaagtaatctttgtgacgtatataaataccgtcgcgggtgtgacggcataccggtacgtccgccgggggtttaaatgcattccgattcataagataaagggttttgaatcatgaacgactgccggtctaatgacaaaaagaggctgtatccaaaaatccatttggaaacaacttctgtattaaatcgataaaattccctaaaataatcacaacattcctaaacagtcgtcacgccgatatcggtgacgaccgatagatcagcggctcatagataatccaacattgacgtaaataacttttctgtaattgccggtaatgacagcagtgcgattcattttcctgcaaccaataccggatatcttccccttccttctcatccaatggttcattctgccaaaacgcaaataaacggtcatcccattcttcacgattcaggctattatttttaatcatctatcttacattccgacttattttatctcacatcccccacacagtaatcgtccgcctaccgtattcctcctgacagtgccagatcttatcaccccagcttacgcctttgtcccggttaaagacgatgaaatgcccctcgctcacatcaccgcagcggtccatataacataccgtctgctccaggcctttagcgatggtcttgtccagatcaccacgcttgattttcagttccagcacaatgtgctgcacgggcccccataaccgtccgtcaagggcttgcggatcagcaaatccgttcggccacggcccaacccgtactcctgatcgatgtatccgccaccgttcaccacatgctgcaggaatgcctgcaacagcaactgcgggccgctctccttgttgtcgaaacgctcaatccaggaatccgcattctcacggaagaactgctggaaatctaaaagtaatttttccatattgatgctgttatccggattcatataccatgctgcctgctggatcagtgtctgctgacgggcccaagtcagttcacgaggaatgatctctttatagatggcattgaaaatacacaagggcttatcgcacacgatcagacccatatccaccacatactggatatcatcgtcctgcaaatgcgcctccacttctccgtcctcgttcgccagtatcggaccgatgacacggcggacacggtcttcacgcagtttgtcgattaggatgtcgatatgcgtgtcacagcggtaaatgatttgttcctgtgcccggtatatcatctcaggaatgatgcggatgcaacggtctcttttttctttcatacggctcgtcacttcatagcccagggcattcagataatcacacaaagccagcaggcaggacgttttacccgtctgacgcggagcatggagcacaaaatatttccgctgaaaatcaacgattccaactcttccagatcgatacgcgtcaacggatcgatattatagtggatatcaggctggattggacctgccgtattgaaaaatttaggaacctgtctcatacttcgccgtttacattcgacaatctatacaaaagtaaaaaaaatcattcactttacagcgggaacggaacgcttttatccatttgaccccaaccgataccaataaaggtgcagtgattttctatccttctcttaaatcccgaagatgacaaaacgcagattttttctcaataaagtaattgcccgtttgtaatgagtctttaccgttgattctgcgatactaagttcctgggcaattgagggaagtgttttacgttcaacgacatgtttcaataaaacttctctttgtttatccggcagacgatccagaatttcattcagccgacagagtaaattttcgtccggctcactattcgtcatattagaaaaaagcaaagcttcaattactttgttttgatgacgatcttgtattttcagatcccgaatatatttcagacaggcattccggataaaagtaagcaaataggtgatgatattacgttccgcatcatatttatgtaagttacaccataaagtgagaaaagcatcttgtacgaggttttcagcttcctcccaatcataaagataacgcattgcataagattgtaaattatgaaaatattctacatacaaaaaacgaaatgcctcctcatcacgttcttttatcttacgtccaagatcttttatatctacctcctgcctcatcctgataatttttttgcaaatgtaattatttattcgtatgcaaaaaaaacattttcttgtcccccgtttcgatatagagtggttatataaaagaaaaaattaatgaaaaaaggtaaatatatagattggaatatactaaaacgaagtatggaccatgaactttctgaagaagaaaaaaataccttcgaaaattggtatgcctcgcatgaaagtcatcggaattattatgaacgcatgatatccgaatggaatcgtgaaaccttgcgtgaacgtaacctatcccgaattttatcaaaatacgactcattgctccaaacgcgggaaaggtgtcatttacaggttatccgtcgaaggattttatactggagtgtggctgccgtattgtttatcggattcggtgtcgcatggattatagaaggctttcaatcgaaagttatttcgccgatcccttttacggcgattgttcctgggcaaagtaaagcgtacctttctctatacgatggaacgaatatttgtttggatgaaacgatggacagcctaaatataaaggttggaactacagaaatcaggaatcggcaaggtactgttacatttgtaatgaatgatgagttcagcgaggaaacagcatacaatacccttgtggttcctaggaatggtgagtatcatattgtattgaacgacggaactgaagtatggctgaatgccgattcttatttaaaatttccggtttatttcaaaggaaaagaacgtcgggttgtattaactggagaggcctattttaaagtggctcatcatgaccaatatccttttattgtagagacagacttgggaaatgtcagagtttacggaaccgaattcaatgtcaaacgttatgaagaagaacataatattcgaacgacactggttaacggaagcgttggattttgtctcagggaagataagccggaaaattatgtaatcatcgaacccggccatcagattagctaccaagtgggtgaaaaaatagttgtaaaaaaagtgaacatatccaatgagattgcctggcgcaaccaactgttctgtttcgagagctgtacactggaagagatcatgaaggatatcgctcgttggtacgatgtaagcatttcgtttgaaagcgaacatttaaagaagttatatttcacctgtactttagatcgttacggaaacatcgaacaactattgcgttttttcaaagaagtatacgatatagaatttaagatcgaaggtaaacaaataacggtggtggaaaaataagaaaaagaatgcggatcgaaagtttggcgactggaatccgcattcaatttatctatttattaatataaataatacaaaagtatgaaaaaaaaattacctgacaggcggaaagtccatgcttattacaaaaaaaaatttcaaggcatgagactgtatgctttttt

SEQ ID NO: 5901 - DNA, 1155 bp, Unknown
  gut microbiota DNA sequence
cataggtaatcgaagacctcaacggcaaacaagaaattacccacgttttccgttaacaaatttcttcatacaggataacagattctgacattgacaagggatattttcgcgatgcaaatttaaaagtcatggaacagatacccataaaattctatcggcaggcaatcatttaccagactgtccgccaatatgccaacatcggccatccttttatataactgattttaaatacaatacatcttattacaattatctatcttcattattattctatacttatcatctacctcatcacttgatggtatcatcacttatgtgttatacaccccatactcattcttttatgggatagaatattttcattatcgaagccacaaatatacctcatcacttttattcttctattacgctctataagacaagatatttattagggaataaatacaccgacatgatgaggtataatccctatacggttctatttcacaacttatttttcttttagacaggtatatataaaaaagggaaccatttacggctcccttagtatgtttctttgtactatcactcctattttgcttcttcactgtccaaatccacatcttccacttctccgctttgtaatcccaacacatcttttgcattgagaggagttacaacagattttccggttttcttttctaattctaatcttgcattaagggcaattgttccaccttgtttagcaacatctatatgctcatcaaaagattccgggttttgtacctctgatatttcctttgtagaaagttctgcaagcatattcaataccagttccttattagtcatgttgtcccgtagattctctttcttcaaccctttgaactgtttatattccttagctgtctttcctgcccaggtcttatagatgatatctgttagagtagcaaactgtacaccctcctgtaatccatgccgtttccattcatccgttaagtccttacggatttctatacttttgagccgttgattaatccagttgtcggaatatcccaaccgtttgtaatccatcatagcctgctgaatagacagttccgggtcttgcatttggtcaagtcgttccttagctacttgtgccatccacaacttgaaaggttctgctttaggagagggtat

SEQ ID NO: 5902 - DNA, 36124 bp, Unknown
  gut microbiota DNA sequence
gctatgcaactattcttcgatacactatttctaattaggtatattgaataaaacggtgtattttataattattctctttatcggacatgtttttttcagttaaaagagccgtgaccgaaaccgcctttttagtcgtcacaacagataacccgaactgccgtatacgcagttaatcacgattggttttccccacccacatacatggatttatattcgaacactttcagtccgaattcgggtaataccgccatgatatggtcgaaaatatcggcctggactttttcataggtcacccactcctgaatagccgagaagcaataaatctggatgggcataccggtcgggccgggttgtaattggcggaccatatgtgtcatattcgtattgatatcgggattagcttcgatccatgcatccatataataacggaatataccgatattggtcagcttacgctcatccagaatcgtaattttatctttattgatatctcccagtttagcgaccatctgatcgatataatctttcaggaaggccgaagaagcaaattttacgacttcgtcatgactcaaaaaatgaaccgaatcgatatcgatattgatactccgcataattctccgtcccggcgattcctgcattccccgccagttggtgaaagattccgacaccaactgataagtgggtaccatcgaaatagtcatatcccaattctgcactttgacggtgtacagattcacttccaacacaactccattggcattattcttatccatctgaatccagtcgccgatgcggatcatattattggaagtcagctggattccggcaacgaatcccaggatcgaatccttgaagatcaaaagcagcaccgcggcaaaagcactcaaaccgacaatcaggtgttccggcgatttattcaccagcacactgacgacggtaatcaccacaaccgtatacaaaaacaccttgatcaactggataaaaaaagtaatcggacgatttttcgaaaccggatagctctcataaatcttgttgatcgcattcaataaagaagtaatgataaacagggtaacgataatcaaccagatatctaccaggcgccgaaggacatatttatattcccaggtaataaaagtgagaacgatataagctgtaaaaggagggatcagggaagccagtttacggaaaaaaccctgatcgtagaggatatcgtcccaagtacttttggtctttcctacaacttttttcaagagtttggagagccatttcctggaaataatataaatcagaatggcaacggtaatcgttatcgccatttttattagagtgctttcgtcatctgtcattccgactttttcagtccaggcggatacccgatgcaaaaaagaaacagagtctctcataagtatgatatgttaaaatattgtttatgctcaatctgagctttttacaggaatagcggtcccttattaaatttaagttaaatcccttattgtatttatatttgatcgtaaataaagctacttttgtttcgaatcataaaaatttaactatgaaaagactatttattttaattacattttcctgtttattattcctgcaaggaagttttgcacaggtcgatcttcaggccccgcttcctcaagatccgaatattgtaacgggaaagctccccaacggtatagtgtattacctgcgtcacaatgaagaacccaaaggcagagcgagtttctacatcatacgtaatgccggagccctgctcgaaaacgatgaacaagacggtctggcccacttcctggaacacatggcctttcagggaaccaagaatttccctgggaaaggtatcatcacctctctggaaaagcacggagtttctttcggccgtaacatcaatgcttacactgcacaaaatgaaacggtctacaatctgagcgatgtaccgacaaacagcgaatctctgttagacacctgcctgttgattctgcacgactggtcttactatcttaccctggaagacgacgaaatcgatgctgagcgcggagtgatcaccgaagaatggagaacccgccggacaccgcaattccggattcaaaaacagatgttcccggtacttttcaaagattcaaaatacgccattcgggacgttatcggtaatttagatgtaatcaaaaatttcaaataccagactatccgtgatttttatcatgaatggtaccggacagacctggaagccatagcaatcgtcggcgatttcgatgtagctaaaatggaacaaaaagtaaaagaattgttcagtaaaatccctgctgtagaaaatccgactccccgtcctttctacgaaattcccgaacacgacgagatgtattattgcctggcaaccgacaaagaagtacagcaatcttctattcagatcgtgaccctgttacccggtactccggcaacagaaaagaataaattggcttattttaaagataacataatcaactctttctacaatcagatggccggagcacggatcagcgaaatgatgcagaaaggtaatcctccctttatcaacggaggtttcggattcgatggttttgtgagaggttataatgcttataacatcaacacaacggccaaacccaacgaagaagacgttgccctggaagccatcttaaccgaaaatgaaagaatccggcggttcggtttcaccccgagtgaactggaacgggtaaaaaccaatatgctggtcggcctggaatcggcttataaagaaaaagacaaaaccggtaacgaaagttatatcggggaaatgcaagcgaatttcctggaacaggaaccgatcgtagatttcgatttctattacaatgctgtcaaacaaattattccgaccattaccgtagaagaggtatctgcacgggctaaagagtggaataccgataaaaaccgtacagtagtcgtttccggtccgtcagagaatgccaagcacctgacccgggaagaagtaaccgctattatggataaggttgctaaaaaagagatagaaccctatcgcgacgaagtaaccgatgcaacattgatcagcgaagaattaccgggttcaaaaatcgtttctaccaagaaacttcccttattcgatgcagaagaatggacactggccaatggagcgaaagtagtcttccgtaaagcagattacgaaaaagatgccgtatcactgacttcttacagcaaaggaggaacttcactttacgatatagacatgcttccttccgccaataacgctgctgcatttgtaggagcttacggtttaggagatttcgatgcaaccactttaagaaaaatcctgatcgggaagatggctttctgcggagtttctatcaacggtttgtcggaatctgtcagcggtagctctacacctcaggatttcgaaaccatgcttcaattgttgtatctgcgtttcgaaaaaccccgtttcgacaaggaagcccatgaagctatgatgagccgcaccagggcctctatcgccaatatggagaagaatccgcagaaaatcatgaaagattcgattagtctgatcatgagtaactacaatccgcgtactctgctcttcaacgaaaaatacctggatcagatcagtatcgaaaagatcgaacaggtttatcgcgaccggattaaagatgccagcgatttcaccttcttcatcgtaggtaatatcgatacagaaacggtaaaaccattggtagaaaaatacatcggttcattaaaatctgaaaaccggaaagaaacctggcgcgacaaccatgtaagaggtccgaaaggcaaaacggtaaaagaaatcgaattggaactgactaccccgaaatcgagcgtgatcacaaatttctctaaagatatgaaatacagtgtttacaacaatatctgtaataatattctggaaggaatcctggatttaagatataccgaaaatatccgggaaaaagaaggaggaacttacggtgtaggtgttcaggccggttctgtacgcgagccttactccaactatagcatgacgatgagcttcgattgtgatccggacaaggcacaacatctgaaatcgttgatttatgccgaattggataaaatcatgaaagaagctccgactccggaagaaatgaataaagtgatcgccaatatgaagaaaaaccacgaacaatccaaaaaccacaacagctattggatgaattgtattacttcttattatatcagtggtgtgaatccgaacgatccgaaaaacttcgatcacattgtcgataaactgcaacccaaagacattcagaaatttgctcagtctcttttcaagggtgccgatgttgtcgatctgattttcaaaccgaaacaataatcttcgggcgaagcattttaaatagggtgtcaaaagtggcaccctatttcatttttttattacatttaccttttgaaacagcgtgctgaattattatctacaaacccaaatattatgtcacaaaacaaaacaaattttgctgtgcctttggcattcgtcggtatgatgttttttgcgatcggattcgcattgggcatcaactcatttttgattccggtattaaaaggtgctttgtctctgccttcaggggtagcctacctgctgctagcagctactttcgttcctttcctgattttcggctacccggcttctgccacgattgccaaaatcggttacaaaagaacaatggcactctcgtttttgatttttgccgttgcttttattttatttgtattatcagctaaattggaaaatttcattcttttcctcatcgcttctttcgtcagcggtgccgccaacgcttatttacaagcatcggtaaacccgtacattaccattctgggaccgattgaaagcgcggccaaacgaatgagtatcatgggtatctgcaacaaactggcatggccggtagctcctttgtttttcgcactcgtggtagccgaccaaaccaatgtgcagacttccgatctgtatctgcctttctacatcatcatcggcgtatttctattgttaggtatcatctctttaatggctccgcttcccgaagtaaaagctgccggagaagacgaatcggataccgccaattgcccgtatgcagcaaataaaacttctatttggcaatttccccacttggttctgggtgcactgaccttgttcatttatgtcggtgtcgaaactttgtctctaagtacagccgtcgactacgccaaagcgttgaatttggaaaatcccgatttatatgcctggattccgagtatcggtatggtcatcggttatatttgcggtatcattctgattccgcaatacctaactcaagacatggcaatgagaatctgtgcctgcatcggtgtagccggttctctggccattgtattgctgcctgccgaaatatctatctgggcaatcttcctgatggctctagggtgctcgctaatgtggccggcattatggccgcttgctatggcagacctcggcaaattcaccaaatcaggcagtgctcttctgacaatggctatcgccggaggagccgttatcccgactgttttcggatttttgcaagaaggtttgggggcacaaggggcttattggttagccttgccttgttttctgtttatcctgtattatggtgtagccggttataaaatcagaacgaaataaaggtgacaccgaacattgatcggtttgtaaagttccagacccctgcgggatattttcttaaagtgacctccggttccatgaagaaaaccccgcagggatccataaactttaagaacttttactgacgaatgattttctttgacaataccaacatgcaaattccctatcttccctttttagacagcaacgacctccgacaggcaggtgagcaactgaataaaatcgattttcaccgaatcgggcagaataactggccggaacaattcccttacacgccttatgcagcttttaccatggcacacaacggagaaatgctctttatccggtttaaggtcgacgagaccagtaccatggccctcacccgggaagacaacgagcaagtgtgtaacgattcctgtgtcgaatttttcctggcagtcgacgatagtgggtattacaatttcgaatttacctgtatcggtaaaactttgttaggtttccggaaagaacgcccagcggcggttcatgccccggaagatatcatggcctcgattctccgttattcttcattgggcggggcaaatttcgaagaaacccggctaggccatccctgggaactgactgtgggaattccggcttcagctcttttccgtcacaacatcgatacctggcagggtttgaaagcccgcatcaacctttataaatgcggagatcggctatcctgccggcattatttatcctggcgtccgatcgattctcccaaaccggattttcatacgccccgttgttttgttgcggtacaattttaaaactctccgatgaaagatcgtcttctatacggattattcccgggcctgtcagctcctttcatcatcatcctgttgttctggcttttccgctttcacgacctcccgctttcccaatttatccaccaggcgatcgcattgaaagtacaattcaaactcatttccgtcggtgtattctttgccgacttaggcttattttatttatttctgcacttaaacaagaataacgcctcgaaaggcgttatcctggcagttttaatctatttctttctttttctattttccagtctttagatcggagaaggcgatttccttcttatttgccttcttccacttcctcgaattcggcatcctcgatatccgaatctcctcccattttcacgattttttctttttcttcactggctttgcgcattttacggatggaatattggttgagcagatcggttacgccataaaaaacggcggtaatcccgaacaggatgaacacgctttcggccgaactgaaaggatcgaataaaatcacgataccgacaatcaggatcagtaccgggaataaaaaactaaccggcgcaatacgcccgaactgacgggctgcggcaagggtcacaaattgtccgacagcagcgaccactaaaataaatcccaggagaaacataaaaacggtcgcaaaagtagacggcagacataccagcagtaatcccaaaataacacttccgattccgctcaagggagcaaaactccgctgatgttcctcgcggtttctggaagagataataaacgcaataataccgatggccaggaaaacgatacctatcagcataacaacatacttcaatgcatcggctggccagatcaaaagagccaaaccgagcaaaatcgctaaaaccgccctgtatatgcctcctttaaaattcgaagtcgtgtaaacaatttgcatataaattacaattaaagatctttctttttttatttaacgaaggtaagcatttttttgttaggttaaaaaggaaagcaaaaaatactaactatctttgcacactcaaaaaaataattatgggatttaaagaagaaattgaaagacgccgtactttcggaatcatcagtcaccctgatgccggaaaaaccacattaacggaaaagttattgcttttcggaggagccattcacgttgccggagctgttaaatcgaataagatcaagaagacagccacgtccgactttatggagatcgaacgtcagcgtggtatttctgtggcgacttctgtcatgggttttgagtacaacggaatcaagatcaatattctggataccccgggtcaccaggactttgccgaagacactttccgaaccttaacggcttgcgacagtgtaatcatcgtgatcgatgcagccaaaggagtagaaacgcaaacccgtaagctgatgcaagtctgccggatgcgcaaaaccccggtgatcgtgtttatcaataaactggaccgtccggccaacgatcctttcgatattctcgacgatgtagagaaagaactacagatcagggtaaacccactcagctggccgatcggaagcggagataccttcaaaggtatctataacctccaccggcaaaacctttgcctgtatagtcctagcattcagaacatccccgaaggcattgagatcaccgatacccgatcggacgaactcgaccatcatatcggcgaaagggctgccggtaaactacgggaagacctggagctgattcagggggtttatcccagtctcgaccggcaggaatacctggacgcacatgtggctcccgtatttttcggttcggcgttgaataatttcggtatccgggaacttctggattgcttcatcgaaatagctccggcacctcttgcccgggaaaccgaagaacgcccggtccggccggaagaagagaaattcaccggttttgtatttaagattcatgccaacatggaccctaaccaccgggacagaattgcttttgtgaaaatttgttcgggaattttcaaacggaataccaattatttacatgtcagaaacggtaaaatgttgaaattttccactcccaccgcttttatggcctccaagaaatcggtgatcgatgaggcttaccctggtgatatcatcggtttgcacgataccggtacctttaaaatcggagataccctgacagaaggagaaaaactgcatttcaaaggtatccccagtttctctccggaattattcaagtatattgaaaatgccgatccgatgaaatccaaacagttggccaaagggatcgatcaattgatggacgaaggggtagcccaattattcgtcagccaattcaataaccggaaaatcatcggcacggtaggagcactgcagttcgaggtgatcgaataccggcttttacacgaatatgccgccgcctgccgctgggaaccgatcaatctttacaaagcttgttggatcgaagcccaggatcaggcagaattggaagatttcaaaaaacataaagctcaatatatggcgaaagacaaagaaggcagagatgtatttctggccgactcacaatatatgttgcatatggctcaggaaaattacaaaaaactgatttttcactttacctcagaattttaaccataaactttaaatcgaatcctatgttggaaaccggaaaatcatatacacaagaaatcatcgtcggtcctaaagacaccgccttagctcacggctcgggccatttggaagtctttgcgacaccagcaatggtgggactgatggaaaatacggcgatacactgcctggaaggcatgttggaaccggatacagataccgtaggtattgaaattcatgtacagcataccaaggcaacagccgtcggtaaaaaggtgatgtgcaaagcgacgatcgtcgaaatcgatggccgccggatacgtattgagatcgaagccacggatgaaaaaggaacaataggacatgctattcacgaccgctttatcatctacccggagaaattcatgagtaaattataaatcgtttgtagtggaaacttacccagagtatccggattggtcggacaaaacgtttctgatagcagaagatatcgacagtaattatacgatccttgcggctctgttaaaaaaaacacatgtccgtatcttacgggcacgtaacggaaaagaagcgatacaaatcgcttcaggaacggcctccatcgatctgattctaatggatatcagcatgccggattctgacggaatagaggctttacggtttatccggcaacaattgcccggaaaaatcgtaatagcacaaacagcacatgatctctcttcttcggagattataaatgagaagttcgatggttttttattaaaaccgatccgtcggaaagaattacttgaaacattaagtaaatatttatcctgatatgcaatttaaactaacctctgaattccaacctaccggcgatcaaccggaagccatccgccaattgatccagggacttcaaagcggacggtcatcacaggtcttactgggagtcaccggttcaggaaaaacttttactgtagctaatgtcatcaacgaaatccatcgtccgactctgattttaagtcacaataaaacattagcagctcaattatacggggaattcaaatcttttttccccgaaaatgcagtcgaatattttgtatcttattacgattattaccaaccggaagcttatctgccgacaacagatacctatatcgaaaaagacctcgccatcaatgacgagatagacaaacttcgtttacggaccaccgcttccctgctttcgggacgtcgggatgtcatcgttgtctcttcggtgtcttgtctgtacggtatggccgatccccgggctttcggctcgaacgtcacccatttgaaaagaggcatgactatcagccggaatgtcttattacgccggctggtagacgctttatatgcaaacaacgaaatcgaattcaaacggggttgtttccgggccaaaggggaaaccgtggatatttttcctgccatagaaacttacgacggcgtagcttaccggatcgaattctgggacgacgtaatcgaccggatctcttcttttaacccggttaccggacagagcatcggtagtcaggatgaactcgatatttatccggccaatctttttgtcaccgacaaagccacgatagcccacgccctggttgaaatcggccaggatttgcaagatcaactggcttatctgaaagagatcgggaaatttatggaagccaaacgcctggaagaacgggtgaaatacgatatggaaatgatccgggaattaggttattgcccgggcattgaaaactattcgcgctatttcgacggccggaaagcaggagttcgtcctttctgcttattggattatttcccggaagattttctgatggtcatcgacgaatcgcatgttaccctgccccagatacgggcgatgtacggaggcgatcacgcacggaaactgacgctggtggattatggtttccgtttaccggcagctttcgacaaccgtcccctcacattcgatgaatttgaaagtaaaaccggccagacgatttacatcagtgccacacctgccgactatgaactggaaaaaagtgaaggcatcatcgtggaacaaattatccgtccgacaggtattccggatccggtaatcgaaatcgtccccagcaaaaatcagatcgatcatctggtgaacgagattcagcagcgcatagaccttcgggaacgtacattagtgacaaccctgacgaagagaatggcggaagagctcagtaaatacctggaccggatcggtattaaatgccaatatattcactcggatgtcgatactatcgaacgggtaaaaatcctggagaatcttcgtaaaggaatcatcgacgtattgatcggtgtcaatctattgagggaagggctggacttgccggaagtatctctggtagcaattctggatgcagacaaagaaggctttctgcgttctacacgttcactgactcaaactgccggacgagctgcccgtaatgtagacgggaaagtcattatgtatgccgaccaagtaacccgttctatgcaggaaacgatagacgagacgaattaccgccgtgaaaagcagctgagatacaacgaagaacatcacatcgttccccggcagatctacaaatcgacagatgcagcgctgactcaggatacctccaaagcgtatgtggaggaagaacacctccatctggttgccgaccccgtcgtagcttacatgagtaaacccgagattgaaaaaatgatccaaaaaaccaaggctgccatgcaaaaagcagccaaagaactcgacttcatcgaagcagcccgcctgcgggatgaaatgtttcaactggaaaagaaacgggacgagatgaaataaaatctttcggggttacgacagccaaacaaaatacctgccgattctaccggtcaccgtttcatcaatgcctcgatctgcctcggaatatccgtattatccaacttaccgttaaagttttctgctccgacacccaggacaaacaagggcacatacccggcagaatgtccgccacttccccagctgatgcgggctatccggttcagtatctgaaccgccgtattggccaagggttcatcttcggcataaagacttttcaccatctcctgttccccattcgaaaaggctttatcataacggtgtctcaaatctttctcatacgactccttgagttcttccttcgtccacagccccagattatcactcaacaatttctttacatcttcccaggtcactgcataatggtgggttgtccgcaaagcagaaatctttttcgaaagctgccccttggagaccatttgatgttgcaacgctttcagattcagttcatatttacctgttcccaaagcaaagttccctgtctcatgatctgccgtaacgacaatcagggtttcatccggatgctgcttataaaaatcgatcgccttctgtatcgatttctgaaaatcgattacctcgttaaacatagccgccgcatcgttactatgacaggcccaatcgatcaatccgcattcgatcatcacgaaaaaaccgttctttttatccttactcaaaaaatcgatcgctccctgcgtaatctcttcaagtgacaaatcccccggtttccggtcgatggcataaggcaaactccccatgtcacatccttgctcctgcataaaaataattttatctgctttcgctgcttttttccggaaatcgtcatttccccgggctatcgtataccccgcccgatcgaaaagagtataaatatttacggaatcttttttctccggctttacaaaaccggctccggcataaaaatcgaaacccgctttcggcaaatcggttgcgatctcataggtcatattccggtccggctgatgagcatagaaacaagcgggagtagcatgatcgatactattgttggtagcgatccctactttcattcccagttctttggctttggtagcgatactgtataccggtactttatgttctttatccatcgctatcgtcccgttctttgtcttttcgccggtagctaaagccgtaccggcagcagccgaacaagtcaccgaattataggccgaataagtagtcacaaaatttctgaccgggaaggtggtgaaatttaaaggctcgacaccgatttttcctgctctctcagccagatacatctctgtgccgttcacctgatttattcccattccatctccgatgaaataaaaaacatacttcgctcttttttctttctttgccgcatcaacaggctgtgtaaaacagataacggcgaccaataccactgataataagccaaataactttttcatcgttcttttcattattattcgttttgctcctattgtatattctatcccctcctaattcaagaacaaacttattcctgaactattaacagaattattaataatttcttaaccaacaccaattcccaccaaaaatacaaaaaaaattagagaaagaaacctattttcccccgaatccaaatataattccacactaaaattcaggtctccattttatattaggtagttatatacatgttacacttataaacctacagctagggtaaacatgtatataaacacgttggattacaatacataatctgtgaaaaagcggacagctaaaggaaataaatagattcagtcagtttcggtttaactctcggtttaactttatacctataaacgcccccataaaaccacccaaaacaaaaaatcagccacctttataagtggctgattatgaagagcgataaacgggactcgaacccgcgaccttcggcttgggaagccaacgctctaccaactgagctattatcgcctgttttgtgctaaacaacgatgcaaatatagcaaacaaatctgaatgaaacaagatttaaaaataaaaaaagattacttttaaaggttcaaacgatcagcctatggacaggaataaattttaccggatcagggaagaacttcaccggcatcccgaattatccggacaggaaaaacatacgatacaatatatccggcaagtacttcaggaatttcagccctcccggatccaccccctggaaaagggccatggactggtggcagaatacagtttcccgggcgaaggtccgaccctattattcagagccgatatcgatgctgtggccattgcagaaaaatcacctcttccctattgttcggaaaatccgggagtagcccataaatgcggacacgacggacacacgaccatgttactcatgctggccggactcctacatgaacatccactggaacgaggacgcattttattactctttcaacctgccgaagaaaatggacagggcgcacaactagtacttcaggacccctggttccggcaacagaaaatcgaccgggctttcgctctgcataatcttcccggctatccgttttctacgattatctgccggacaggcagttttacctgctcggtcatcagctgtaccatcaccttcaccggaaaaacagcacatgccgcagaacctgaaaaagcggtttccccgaccgcacctttactgcatatcctgcatctaagcgaaagctggaatcgagggaccttgaaagatccggattatttccgtacgacacttatcgaacttcatatcggcgaagaagcttatggcgttgctgccggaagcggacttatccggctgactcttcgcgctgcatccgaaaaaatactgcaaaaacaccggcaacagttggaacaattcgttcagcaaaccattgattcccatccgcccttacgatgctccatcgaatggacagaaccttttgcggccaatgaaaatgatcctgaatccgtaacctggattcaggaagcagcccaaagcaacggattggtttacgaggaaaccgatcatccttttgcctggggagaagatttcggattattcactcaacatattccaggtgctatgttcggtctgggagcaggcatctctactccggccctccatactccggattatgattttcctaacaacattttgccaaatggagcccggatgttttacgaattagcccttatcactcaactgtcagaataattaatacttattctgacagtcgattcccgatcatacaaatccgtcttgatccaaaccagattaaatcctggctaatcctcctgagcgcattttccaataatcatacaaatcctcccaataagtccataataaaagtttcgccatcccctctccacaatctaccgtatccttgtattttttcaattctttactaaaagccataacacaagtttgccgtaccaacctctcttgtactgataaacggcctacccgtttccccgtaatcagtctcttcaattcttttaccaactgaccgacctgctgttctccattctccttttctgctaactgcagccaacgctcggtccgaaaaaattctccccatactctttgtaatcgcccaagcatatcatcacgttccattcccattctatttttttgtaaaaaggaaggagcataaaatcccgtaatatcttctttcaataattgcatcaactgttccgccattccctcttgaaaaaaagtctcatctaaccaacggatataatccttttcactcaatttcaatacttcccggtaataatgctttacctgttcattttccacctccttcaacacctgttgccaagccacacgccttttctcatacctcttccatccccactgtccggcagcctctttctctgtttttatatcttctctttccgcataacaataccacaaagcctccaatcgttttgcagctgtgatatttctattctccagttgttccggatccaatcccaacaatattcccaaagctctatcgatttcctgttcacgacatccctgtaaagcctccgtttccgaacacatcttccatattccgtcctcttcccggaccggattttccaatcggtagcggatcaccgattccatagaaacatcaccactgatacgtaaacgtgcagctaaaatccttccatctccgggatgttcctggaaatccacttttatccctccacctccgacatcaaaaacaactgcgcaggggacatcagctttcacccttccttttttccgttccaattcaagcaatactcttcccgtccgggcagtccacactgcattcagcttttctactgctgtatacaatagctccacatattcttccggaatatcctcagcaacacatatattcagaggcattcccgcatatgtatcccagcacacacaacgggtacactctacacaacggaaaggattcactccataatcgacataaacctgcgtccggaataacccatccgggtcttcccctctgttcctcaaacccctatccggtaagagacacaaagccacagatacttctaccggtaccgaaccgctttcgggcaacatttccacgacctgctgttcaggagaacactccaaataatgccggatagtaaaacatgctccgttcctacaggtatcgacagttataatctccgaacggccatactgtatccgtccccatttcccgtcccccacataccacttttcctttataccatcggtcacatcaatcaaataacctgtttcttttttctccgctaccggccaggtttccaccggtgtctgtaaaccggacatcttcagcaatccgttactcatccatgttgtatctgaaactctctccggacagaaaaccgcaaaaacatccagggtcatagaatccctgccttgttccaatctaaaaattcctttactctccaataacttcccccgaattcccaatcctctgtctatctgggccaataccatccattcccgccccaaatatgcctgctcaatttccacatacattctgccattccgttcatataccggtaacaccacagcattctcatccttatctttaccacaggcatttccactttttatcccaaccatccctacccaacaaaacaacaataccaataactttgtcctcatgttatttccatattgaattcacattttttctccacgctttccaaaaaacatccttttccttgtctgttttccgatacatcactttcaattgttcctccatcaaagccaccacttccggatacctattcctttctgtttgtatatattccatcaaacaatccgtataacaccatatcaagaatcttccccaacactcctcaccagatacattccggaatatttttcccaaatctctgatatattcagtgaccgaatattcccgatcgtaacctacaaaacaatccgctttttctaccaaccgtctgacagtctcccttccccagtcttcccaccactcccgaggcaggtcctttcccgattccaacacataggtttgtaaaaaacgcagggcatcctgctgttcttccctccccacagcaacaactataaccgaatcattcccccaacatttccttatccctccgagataggtaaaagcctgatttatgtactccgaatattgttttcggatagcaagattccaactttcaacactcagacgcccgttatttctcagagtatctcgcaacaaacgcttcaagtgacacatgcccaattctgccgtttccaacgaataacgccctaaatcttcggcttgtgcttcaggtaagtttccaccgctatcctgaaaacgatatttacgctccaattgttttttttctatccaaacagacaatttttcctgaatttcttcagacgccaatccgggaaaataacggtatccccactcaatagccaatgaatcataagcgccaatccggggtatccggtcggacatatcgactccatcttcgggttgtacagcatagttcatacgcatataatccattatagaactaccataaccatgacggtgtaaaaaaacggcatctcttaactgctctgtttcacacaaagaactcccataaaaattatgggtcaatcccagtacatgcccgacttcgtgtgacaccaccatctccagcaatctaccagccagttcgtccgggaactcctcctcgctttctcctgtctgtgcaatataccactggcataacatatcaaaaaccgaatgaaaaaccgcaatatgacaactcaggatctcaccggtacggaaatctacaaaaggacgtccataagcattctccatcggagaagccttatagacgatccatgacaaagcagaattatctaaagtaaatccggccgaatccggagccataagtcctgctatggcatttttaaaaccgctacgttcaaaaagagcattccaattgttcacggcacgtaaaacataaggacgccacttttcaggaaaactacggtcgatatatatcctaatcttttgccggggttcaaccagttctccccgcctataccgggccgtatcacgatccgccacttccagccgccaacgtttcactacgcgatccgagatgacctgacaacttcccggttccatatgtgcataaggtacagtaaaatatccaacccctgaagaggcataacgtacctgcatcggatgccggggcaacaaccttaaacaacaacctaatttccatcgagtcacttctccatttgctgaagttgcaggcgtcctctctacagcttcataaatccgttcagacctgacaatcacactttccggcgttccaagaattgccgttacccttccttcacgctcactccctatcccgatcaaaaaagaaaagggttgtaatccccacaactttccatcacgaagccattcggtcacatcaatgatcttcccggtcttttcacaccccaagatttcaaattcctgtaaggtaaggggcatttcccgttcagacaataaacttccgagtgaatatgacccggaagtatccacataacttcttatctccttcaatattatccgttccttctcttcctcccaccgtaaaatcctcggaccgaaccgatcgccctgatatccgaatttagcatcagcagattttttttttcgtccggcaccctccaatattgtagtcgtcaggctcatatcacgtcctagcagactatccgggatcacccataaaatacgtccattctgttgataagttgtaaacaaaccaggtataacttccgactgtgcataaagctttatcatacacagcaagaaaaaaagaatccaacagatttttttcaaccaggataacattttccgggacctgaacaggtcccggaaaaacaactgcttcttatttaaaagcatagacaaaatccactacatttttaaatcctttaaactcataaaccatcaagtctttcgttccctcttccttatctatctctccggctgcagtcagcttcatttcaagcatactgcaatttccatccggatattcggccactccccccaggtaacttacaaaatcataaggaatcgcttctacctcatctcctcccgaaatatcccaacggtcctcccgttggctgcggaatttcaaccgggtaatccgtacagaaggatccggatgggcataaatttcatatgaacgaggagttgaacgagtcaagtctgcccgataaatcttattaccgacagcatagtaaaacatacggtcaaaataagctgaagtggccaccggtaattttccttcgacaagccctgtttccggggtcaattcccaataaccgctacagattgtccctttcttcccttgtatcatctccggagaaatttcgtaaatatacaagctacttccctgactggctatcgccataatcttcggaacatcgcgggaagtcgtcgctccgatataaattacatctttatctccaatattgttcggatcgaatttattcggataaccggcctgctcgcctatggtctccagtttctgttcattcagacttccgtcaatatcgtaaagatcttccatgccgctagcgatgtagcggttcgtattataattattaccgccaatatccgcattatagtaagaaaggaagcgtttgttcttggaatcataaataatatttattccttccggtgacacatcataagccagggaagccctctctgcataataatccccatctgcagctttcaccggataataaacagaaaatccatccggcttggcaaaccagaataccccgtcgtcaatgatacattccccccgtttatctccttccgcatacatcggtgcataatgggtgtcattattcagctttttgtataacaacattcggttatatgcataacgttcttccaaagtagcaccatccagcatatagtttttccctccttcagtgaaaatacccaacaatgtctcctcagatccttgctgcatggcatttttcagatgcaaattattaatcgacaagaacaaaggtttaccctgcaacctgcctcccgtttcctgtgcatagatatcttgtacggcaacccggctgctaccgtccccatcgatacatcccaatacggcattctcaccgatattctgcagcacaaaccaacaacggttaaatgcagccaccaaattaaccaccgtctcaccgaaggtcacgatattctgtaccgtatccgttacagccagccgtaatgtaatctgtccgctatttttcggataaacccatacccggcaaaccgaatccgtaccacattccgtccacgtcaccccacttagattctttttccacaaataagtcaaattggcattatctttccggtccaactgggtaacagccgctttcacttcaaccaaaaccgaatctttcttcggtatcgtaacactgacgctccgcggcatttctaacaccatatcgttgatgtcattataatcataatttcccaaatcatcgtaacaggctattcccaatacagccaataatccccataccaatatctttttcatactatcattttttctgttcacattcatcatcaatccttaggaaacacaatctcattctgaggattttcgtcatccatcaaaggcggattaccagccttcttataagcctcatacttagcactgacctcatccctgacttctttcgtctgctctgtctcagcataaattttccccaagttgtccatcataaacatatatttattattactgtatatcccccacaacctctcatcccaatctgaaggacgtatcgtataagcgatagtaacttcacaatccgaattctccacacgtccctccccaaactcatgctcagcattctctatatcgaaagtcagttttgtattcaactgggcaccgaccctagggggacggggtacaaccaactgggccgtaaaagtttcagccccaacaggaaattcataagaaggtataaacacaaccccttccatctgatcgaccgttttcaggcaaaaattcaaaggcttttccaaagcatatcccaaacaacgcacttttacccctaaagcacgttctgtaacttcatttatataatcccggtcatcgaaaacacactcggcttttgtattgaaaaattccagacggggggcttcgttatatccctttatatcatttttctcacaagaaatggcggtaatcaatacaaccatcattccatatatcaatcttttcatcacttactattttccggttataccaaacatatcttcattttcaggcaaaggaaactgatactttgtccgtacatcgaccaaactgcaatttgcaaaagtgacgtagttgtgccgtttataaaaataaaacagctgtccctctccgtaatactctttcaggtattcacgcatcacttcgttgatccggcgcgtatgcccactgtcaaatccttcacgggtatccggttcgtcatatccttttcccccatctgtcgcatcactggaggcgattccccgtttaaaacgaaccatatccaaaatttcagcgctgctctgcggatccggatcacattcagccataatataatacatttccggaatcctgatcaagggcatgacatctgcaccggaataagctcctgtataattcggtaaatgatctgaggcatatccggtctgatcgtatttcgacaagattttctttgtatcatcagtaatcaacatctcatgaaaagcggcatttcctgaacggaaatcagtagaaccaccggcagataaatcataaaactgcccgaacagttctttgccgactcccaaaccggaaacattctgattgatgaaatcagggtccaccactttctccatctcataaatatgtaaactaaaaatatgttcatcgaataagatcctgttttctgtcgtcaaagcttcagtcaacgggaacaatttactttccaccacctcactggcaacagcataagccttagctttactttcttcatcccccttgtaacaatatacccttgccaacatagcctttacagcccaacgattcatacgaaactgacgcagctccagaaacgggtctgcattgacgtcatgaacaaagatatcatgatcagcctcccacaatagagaatctgcctggtgtaaatccgccagacaagcgtctaccacctccgtagcaggtaatacaggagtcggttcattactgaatactgtccgataaggaatagctttcccctgaggttccatagcaaataccggcccgaacatccgtaacagatcaaaatgcagaaaggcacgcaaacccaaagcttcccctttcataatctcataataacccggcgttgtaattacctcacggttcacctccagataatgcaggaaattattaatgttcgcaataatattataagcacctgaaaaaacattatctttaatacttttataagttccgtcataattataaatcgatgtccagttcgttatgtcaggagcgtactcataccgtccggcaagcatctccatataattataggttagctcacgtccgtaaagggaagactctcccattttaagataaaagcccgttaaagcatcctggaaaccaaactcatctgcaaacaaatcctcttccggcacggaagttttaggctgtacatccagccagtccgaacatccgctactccccaatacgatcaccaacaggaaaccatatacaaatttatacatattcatattatttaaatactacatttaacgaaattgcaaactgacgggcaaaaggataatccaatcccctctcctgttttacagatgagagataaaaaatatcctccatagtaaatccccacttcaacgaactgataaaactctttttcaggaaacgtgtattttgctgatccatccggtaagtcagagacaacgaaccgaaagtcaatgtattctcatccatcacaaaacgggatgtcggacgtgtttccgatccgttgacagagtttgtcaggcgtttgtatttagccacatcccccggtttctgccagcgttcctgcaagacacgtttatctacattataccgtaaatcggcattctcgattttatccaccaacgtctggttatatacctgtcctccgaatttatagttaaaagaaagattggctccaaatcctttataattaaatgcagtattgatatttccctgccatttcggctctgtgtccccgtaagggattttatcaatagcattatactcactggtcactttaccattgcgggtcagtaataactcatctcctgtcatcggatcgattcccagcgaacggacaacccaaatacgcgtctgtgactctccttcttcatacatcggcagaggtttgtctttttcattgctggtattaagctcattcatatggcgcaaagcatccgatatttttttcagtttttcttcattatgtgaaccatttaccgtgatcacccaataagcatctttatccagattacgataaggaataaatgaaaaattcagctccacccctttcgtctccagatttcccatattttccggataagaagcaaaaccgacagaaggagccagcgtaatctgtgccaaagaatttttcgtattcttgatataatattcggcccgggtagtaaaacgccctttgagtaaggaaagttccaagccaacattccaggttccggtctgttgccatttcagattcgaattacccaaagcgaccagttccgtccccgttgcattagaagaaaaataaggtttcattaaattggtataagtataaactgagcgggactgataaggagaaaaaccttgtgtacctgtcaccccatatgaagcccgcaataccacatcatccacccatttaacatttctcagccaactttctttcttcatattccagcgtaaacctgcagaccagaaaggagcaaaacgattgtctttaccaaactgtgaagaaccgtcgatacggatattaaaatcggcagaataacgataatcataagaatatcccaaagtagccacagctcccaaagcccgggtagttccttcacttccggtcatgttttcattgtatttcttaccaaacaaaatatgatccatattgccgttcggaaaacccgtcaccgttgctccatagacttcgctatgagtttgctctaccgaataacgcagatttcccgtcagataatgcacatcattgaccacattgttataactggctgtaaaagcaaacatataattgaaatcctccgactggttacgtttaaaatcacccttcagggtaggatccaccacttcagcaaaagcggtgtgctgtgcaggacggaaaacctcgtccttacctgtcgatttctgtatagaaatatcggcctgcaaacgccaggcatccgtcggagtatactctaatttaaaaaggttacggatactaaaagaggtggtccggtctttactatgaaaggtcgtattatacatcggattagctacctgataaggttgtgaattacccagatagatcatatcccaggtctgcataattttattgatttctccattttctccgtaaggccgtaaataaggattcaaacgggtatattcactgaaagatccgtaaggactgtcatctcctgttgaattatccacggtcaggctgttcttcatcagtaatttacggtaacggtaagaaagatccaacgctgccgtctgggtactacgccgtgactctttcattactcccggcgtttgattgagtcccagatacaatttataccgcagggcctcacttcctccttccagcgtcagggcatgccggtgttgtacagctgtccgcaaaggttgggacaaccaatacgtatcgactcctcttttcacctcacgcaaacggttctgatagtcccgttgggaatccaggtcattgggagaatataaaccagccaaagcttcaacctggattttttcctctgcatccatcaaattataagccgaaaggtccggcatttgcaaacgcaggttaccgccgtaactcacattgatttctcctggtttcggagtgtaagtttctattacaatcacaccgttagatgctttcgaaccgtaaatcgccgttgcagaagcatctttcagcattgtgatcgactgtacacgatccgggtccaaatcgaccatcgtctgcacgtcaatctcaaaaccatccagtatcaataagggctgattcggataagtatcgtattctccctgcaaagacaccaagctattgtctccggcccctccggcaggcagcgtggaagaaccacgcatacgcatgtccggtaaacggttcggatccgaacccgcactgatattttccatgatccggaaactgggttcaatggtagacaaagccttagcaatacttgtagtactgatcttttttaattcatccccttttaccgtcaccgcagaaccggtaaatccttcctttttacgggaaaacataccggtaaccacaacttcatccaattcagtctctgcttcttccagaacaacccgcaaaggttgtacttttccattctctattttaacaggaatctctttggaattcattcccacaaaagaaaattccagagagatacccggagtttctgttatttcaagactgaatttaccgtcaatatccgttgccacccctatcgtggtacctttcaccacaaccgtaactcctggtagtacccctcctttagaatcgactacgacaccttccagcttaattaatttctggggagcagccatatcggccccggcttgtttcttataaataacaataatctgattttcaatctcataactaaaatcagaaccacgcagacattgttccatcacttcatttatatttcccgatacaacgtctacggaaacgtttccaatagtatttataacttgctcattataagccaatcggtaacccaactgtctctttatttctttaaaagcttcttttaatgaaacattttccagacgtaatgtcacactctgtccggcagcttcaaccactaaaggttcggttaatataaacaaagtaaataaggataaccggatccatattcctgcccaacggcagacctttccccaccctattcgattctctctattatttttcatattctcattaaattacctattcctctctttcaacggataatgaccgtccggcctttcaattcaatatccagcgtacgggtcttctccagtatattcattacctgttttaacgaactactccgttcaatttcaaaagaataatattcattctgtttatcactatctacaaaaaatacttcaatatcataccaacgagccaattctctcatgatatattccagagaacggttatcaaacaaaaaatacccgtcgatccaacttgttgccgaagctccggcttttccaaccacccagcgttcttccatcaactgcgcctgttctcccggtttcagtaaaacctcatgctttccccggcttaaccggatacttcctgacaacaacacagccgaataaggttcatcttcgtaatgacggatatcgaaacgggttcctaaaaccttcacgacatttcctgccgtttccacccggaaaggcctcaaggaatcacgtgccacgtcaaaaaatacctctccgtcacaagctacccgacgctctcctgtcggaaaaactacaggaaaacgtactacagattccgcattcatccatactttcgtcccatccggtaagatcatcttataatccgttcctctgggtgtccgtatctcattatattgggaagagtctgcccgcttcacgtttgcagtcggttcataacgggcatacccatcctcagctaacaagaagccaccatccaaattgtaagcagaatctctgttcaatgcaatctctttaccggaggccagccgaatgaccggcagagaagaggctgtcactctctctgccaggtcctgatccgtttgcttcacttcattttgccaataaaaccagacgccttcccccatacacaacagcagaacaatccctgctaccctccccaaccatttccgccgtctgtatctctcgatccgacgcgcaatattcattttcaaacgttcacgggctttttccttatcggacaactccaaccctgccatcttacatctgacatattcccggttactgatttttttataaaagtcctgatgctccggtgttttcagccagttttccaatgtccgactttcctgctcgtctaaatctcccaacagagaatgaataatcgaacgcctaatcgcctcttcactgtccgttctcatagctaatcaaaagagtcattcagtatcttctttatcacggaaaaggaaatcgtccagcgacgcagctggaaaatccatcccttcaccccggaaatttttcattcgtaaataaatcaaataacggcccaaaatattgaatccctcatccatccctttcatcaggctgttttcagaagaacgccataccccgccactacatgagaaaccaccgacatagacatcggaaattttacccctgtctttcaattcttgccagggttgcggaaattcggtggacgacatcgatacgttcagatacatccccgcatcctgccatgacttcaggtaactagccgtactcgcatcgataggcccaccgaaagaatactcatcggccaattttccgaaagcatgtcctccggcttcatggcgcaaaatctggacaaaattattcgggaaaggctcctcagataccgggcaaatagcgacaccttctccagatttggtcaggttggctacccctccgtaacgtttaccgttagccatcacaatcacaacatcctgcgtcggaatatagtccaaacctgcaccctcaatactagtcttgacaaactcctgaatagctgtataatcacagttcataccggttccgaactcatcataagaacatttaaaacgggtatctaccaccttaggtcctccataagtcgcattatagtccgtacatccagattcggcagattcagcatgcagcaggataaatccgaaacgttccgaataagttttgaaaggctccagcgattccataccctccatcgcttcctgacaatacaaatcataaacccccgattcgatttcttctttcgtgaaaccatctccaatcaaaataaaattgaaagtaatacgctggaaatcaggtactgatgcaaaaggatcattataagtcggttttttccagatcacagtatgtccgtcgtaagttttgtacatctgactcaaagataacgggaagctcaatcccagtactttatttttcagatgcaatttcgtgcggttgaaaaactcacctgtattgggctctaacttgaaaaccatcttgaattgaccgtcttcgttttttgtttccttaagtgttacccagctcacctcctcttcgtcaaacaccacatcgaaaggtatattacattcaaacgaatgtgtcaattctgtcatatcatatttggcaaacagtttatcgttgtccaacttccatttgggttccggatattgggtcactttcaatgtatcgttcagattactctgagtgtccttcagataaactatagcctcccggataacattggaattgttcacagtcaaagttaaagccagattccggtcggtcaccgccttggtgacaggagctgttatccaatccacgccttcgctgaaagttacattcaaggtgccgtttgaccggtaaggaactttcagggaagtatggttatacaaagcgatgaactctttttcgttgatctccaatactcctttttccagctgatataccggcaaattccagttttctgttcctgcctgaaccaccaggcgtacttttcgttctacttcagtcgtattttcaattaccgcaacctttacctcatattctccggcttgtccacttaccggctccaccgataaccagtcgggaatatttgcaattttccaggcctcactagaagttacctgaataacctgctctgttgccagagaaccgaaacgcagggaactctccgagacttccagccggggcgtatctacaggatcgccgtcgtctgagcaacctcctaaaaagaaggctgctcccaaaagaaacaataaattaattaaatatttcatatctgatatttttacttgttaaaatgcaaggaacggacgaacttctccataacttctggccagatctccatagacatgcatcgtttcccaccaaccatttcgcaaataaaatttaaataccatcggatgtacctgataatcggtttctgtcgaggtataaatccggttgaaataatctgcctcccatgcattggtctgatcaatgataaaactgacatcatatccatagaaatagaactcattgcctccattatcaacgatcaactggttaatagctttacgtttttctttcatggcttcagaaggctcctgcccagcttcaccatcaggagataaaacctccccgtcaatccagcctaccattgcctgtacttctttaatagccggcagataccatccgggatttccattctcgtcattcaaatcactgacataagcagctacaggataatgagttttccaatcggggatctgtttgtaagctttcatattctcctgtccgtctgtctcactacgggcaattactcccacattattaggatcctccggatggatttcatcataaggtaatcctgtacgataccacagattcagatccctgtgagctttcaaagctaccactttaccatgggcacctccgtcgctgatttcatataccagacctaagggttcaccattgactacatacaaatcacctactttataatatttactttgtataatagtcaatttcactttcacatccgtctgaggaatctcaacgattaattcgacagaacgggaaccggcttctgcaggtgtagcactgatctttatctgattattaatatcatcctgtatcacagtacaccatttatcttcgctttcaggcagggtcattccccatagttttgcattcgtagagacttttacaatcacttcatctccagcctcattcaaggtaacccggtctgtcgaaagtaccagtgacggtttggttccgagctgagttacaaccacctcacatgaagccgtattagaagccgcaccggtactcagggtgatggtagccgtacgatctgtttccagctcggaaacagtcgcattcaccttcagcacatctccctctgtactgatagaacaccactcctgcgcctcttcattgacttctgctttccagttttcccaggaagagtttaccttcaccgttatctcaccgccttctgttttaaaattgactttttcctggtcggtagaaattttcgccaaaacacttccttcctggataactgtcaatcttccgttcacaaaaggagtagcaccataaggtgtgctaagtaaaattccaatagaacgttcattcaaagtcggattagcctccactgataacaggtatttatctgtttccccttctttcggttccatttttacccatcccccggcatttacattatatttctcgactgtcgataaaacttctatatcaacagtacctccggcagcatctatacggacagtatccggattcgccacgatcatcggctcatttcccatttgttcgatagccaaagtatcggtgaaacggttacctccgacaccaccggatacttccaacgttgcacgacgggctgtcaacaattcattaaattcggaagtcagtaataattttgaattttctgcatcgagttgtacggtaatccaatcgaccaaggtatcgccacgccacttgtactcgatttccggactgaaagtcatatacatcacttcccgggtttcttctttcggagaaaaaacgactttttccggagaaaacataatagacattttatctccggccttttggaccacatccaggtacaaagttttcatattttccccttcccctgaaaaaattttcacccgggaagagcgcactaatgtatccagattctgtaaaggactgatcaccaattctttttcagagactttcaatttacaccatacactgtcttccaatggagacatttccgcaccccagggataattggatttcattgccagtttttgttctccacccattgccggaaactcaaaagctgtttgatttccgccaattgtcaactcaacaggcatatcgagcccatcatcatctttacaggcaacaataccccatgcgatgaacacgaataaaacactaaaaaataaatattttgtcttcataaatttatatttaatggttaaccatttttaaatagcaacggataacatgacagtaactcctgtatgttccggaaaatagcggcatactcccccggcacattgtattccctcccgattccggccataatcgatagatgcccgcaagctacgccagctgtaactccctccgacacgataataatgaaggctgtcaccataactttcataattacacatatcgcttacatataccatccatgccggagccaatcccagctctaacaatcccatggcccaacgctgattatcttttgagtcgctccacacatgctgcaactccatccgtaaagaagttttcggggtaattttgtaaagcagatcagcaaccaacacctctgagtccatcctcatattcccaaaaccatatttactgaattccagtttcctctggtggaaaaacaacaatgtacttttgaaactcttcgaccattttctctccaattccaagccgatctctccataaagtaattttcctttctgcctgaaaagatatgtactctcatcgtcctttttcacagtaaggctccgatacatagatccgttcactgcaaaagacaggggatttcctgttttcccccccataggcaactctccaaacaaactgaattgtcctcctgtctctcctgccatttttatctcatgcggaaataaagtcaacaatgcatatttatgttgcatagtcaatgccggcacataattcaaactgacactttcattacttaaacaatcgtctacccgcaaatctccattttcaaaagcacgaaacgttgcggaaaaacctattcccggagcatcgatccctgcatacaacagtacattacgaccttttccatagcggatgttatatgcgtcgtcccaatacaaagagcgactttttgcaacatattcccctcccagggaaaatatccctttggacaaatccagcctgccggcataattccgtactacccggtcggccttcacatcatgttcatcacttctgtcatcacgcaatacccaggaaccacccaccgaaagcagcattccgttttccgggaacaacaaacttcccaaatctatttctccatctgtaccatagatccgtaccggagcatattcctgaaatttctgcggtactccggccacaactttcaaggtcaccccatcccacggacgccacctgatattcccccccatcaaggcattattaatccccaaggccctttcctcataagtacggaaaatcaaaccacttccaaactgttcatataccgtccctgcacgtaattccaaagactcaccggcccattcagcaaatcctctcatcaacttacatccctcccattccggagaaaaaccgatcatcggaggttcatagatatcatattccaaaccaaaacggaaagctttaaatgaatatcctaaagtcagataagtattggtagccactttatcttccaccttcttcacccccaacttatcatccttcatgtagaatccccagttcgtctccagacttccgctaaaatgtcccttggagcgctgtatttcctgggcttgtacaaacccggaaaatacagcaaatacaaccaataaaacaggaattttacacttatacattcctacctatattcaaagatttaataaccgacattcgtcccaacaactacctgctgaacattctcaaccaacccctgttcgttcgttacaaaaaccacaagcgtactctttaccggatctgcttttcccatattgagctggaatttaatttctttcggagcacccggttcaaaagccaccgcttcctctccttcaaatgaaggcatataatcacgcatagtatggaaccactctatcatccccaaagaaacatgattcaaatacataccatcttcaaccaaagcagcgatcactttaccgttgaaagattttttactaccgatcacggcagtcaattcaacttgttttttatcttccgacaaagaatttttaatggcgatagcaacctcagccttggatttaatagctgacagtaacccatcacgccccatggcatcgactgaaaatttatctttattacgatctaaatataccgaaggagtacccgtagaaccgaaatatgcaataaaagctttctccatctcccggctacgttcatcgtatttctgccacatttcaggagattgtccctgataatgcgtctcgatcaaaacgattctgggatctttccgggccaatgcatctccttcagtcagtaatttgatcgtattggtacagtatccgcaattcgttcctgtcagactttctaccaacatacgcgcagtaaattcaccttctttaaatgctcccaaattcaatgcctcttcagcttctttaccctgccacattgcagtaattcgatgcatcccggcctctgtcgttccgaaataggggctatctaactttttcccgtcgatataaaactctccttcagaaatacggcttccctgttcatcaactaaataaagacaggcaaaatctcccccgtctgccacaatactctttttatcagaagccacctttaactttacattctcattcatagcaatcacatccaaggtattagatactattcccttgtaagttgctacaactttataggtacccggagtggcagaagacaaagtgttatcgactaattcctggtcattggctttatacacacactgtgtacttacatctttcccggtattgtccttcacggtaaaaactacagcatccaccccatctgcagaaaaataagaacggtctgaagtcagggtaagaccgcttaaaatgccgtcaccagtatcgtctccatcatccgaatcagaacaagaaaacgctatcacacagataacagacaaaaacaataaaaacgattttctcataattttataagtttaaaagttatttttcaaataaagaacgtacaccccacccgacagggtgactgaaaaaaaacacatttcaggaaaaatattttcccggaggcaaagggtaagctccatttcattcgtttcccggaaatatccctatgattttatttagaaaatcaaaagagttgtcacccgaataacaggggtacacgtttttttaaagaaataacttattcatcctaataaaaagaaaaaaatgaaaacaggaattttaattttactcacttcactgatctgtgacctacaactttccggacagacgattccggaaaatgtaaccttaaaacaattggacggaaaagaaattacttttaaagaagctgtacaacaaggaccggtaatcgtatcgttttgggcgacctggtgtaagccttgccaaagcgaactggaagcattaaaagatttggaagactcctggaaaaataaagtccggattatagcagtatcaattgatgatgccagagcaatggctaaagtcaaatcccttgtaaaaggaaaaaaatggcctttcgaagtactgctcgacccgaacaaagagctatataaagcattcaatatttcagcaattccccatgttttagttataaacgataagaaagtggtatggacccattccggatacatgccaggtaatgaagtattagttgtagacaaagcattagaaacaatcggaaaaaaatgatatagtagagaacataaaatattttaatggctgaaaaaatatataggattactaattaattatagggggaaataagtaatttcatatatttgtcattatttttgtgtgttatttattatactatgctgaaaaaagccccagacaaccaggctaaaactgattcacaggagttctcatatgaccagccagatgtattcgaccggttattcgaccgccattacacttcactttggtcattcgcatttcactatgttaaagacaaagacatagcggaagatttggtacaagaggcttttatccagttgtgggatcatttaaaaggatttgacagctttgcagctatccgtgtatatcttttccggaatgtccggaatgcagcacttgattatctccggcacgacaaagtacgaaacaggaatagtacagaactcaatgtatggctacaaaatgaattgagggagccattggagcgtaaaatcatagaagaggaggtattcggatctatgtacgatgcaatttataaattaccggaacagacacgaaaaattgtactactgacgctggaaggagtatctaatcccaaaatcgccgaacaattgaaaatttcggttaatacactgaaaaccttaaaaaaagagcttatcaatacctccgtaatgaacttggaccatacaggtttact

SEQ ID NO: 5903 - DNA, 2887 bp, Unknown
  gut microbiota DNA sequence
tccttcccgggcagtcgtactatccggattgactacgaccctgaaaggacgcggataatctttttcaggaccggtaatcatcactttgatattaacgaccatagtatcttcctgaactttaccgaattcagccagcgtgtaaggcatatagggccaatccttttccgaggcataggaatgaccactctgtacagcaaaataaatagcttcttctccctcgtacgacattaaatcccgctcacaagcgatacataagggaagcaatatccagatatataataattttctcataattcattattttagttcaatctcatatcggtttcactatcaggaagtgggatcacataattactcatcgacatatcgatccactgtttatcgttatctgtctcgaatcttccgttcggaagctgttgctcagccctccgtttatagaagaaaaacatttgtccttcccctaaaaattcccgccggcattcttttgtaatctcctccatcaaggtcggctcggttgccaccgagctaggacaattccggctattccgtatccgatccaaataccctttggcggttacaaagtcatcggtatattcagcagccaacaaataaatctcactcaaccggatcaaaggaaccatcttattcaataactcagccccactcgttgttatatcttcatatttccgatgatagtcgatcagttttccggcattgctataacttgcccaaatattacgacgataatcgttttcagaagcgtaaaaagaatagtctttccccaattccaaacgtttacccgtgaaagtatatatctggtccagggtcggcaggaacaacttatcctgaatctctgtaccccggtaggaatcatataacgaaaacatcacttccgaagaaaatacccggtcaggtttagaaacatcggtagctgccgcatgggttacaaaagggaatatctccgccccttccacctgtacttcacgcagaatctcttcggcagtaaccaacgcattacttttatcgtgtccccaggcataagcccggaccaacaaagcttttacagcataataattcaaccggaactgacggtaattcaatgcattatctccgatactgtttccctcgttccgtaccccatccgtcaaaaccggatcggactctttcagtaaattcagagcagttttcaaatctccgatcaccgactccaaaacaacttcagcagacagtaaaggagaaatctgagcatcggtattggttacgtaggggatacattcggccgttttagaagtttcatcgtaaacaggtccgaacagacgcaacatatccaaatggagcatcgcccttaaagccaatgcttcacctttatacaaaccgtaatatacaccgggtaaaacgtcttgccgttcatcacacttttcgataatgatattacaattcaatatcaacgcataagccttttcccagataacctgaaatacatctttgacattctgctcctcatatttataagcgccgagcatggaattaaaatcagaaccgatcccgtatttataatactgagccatcaaatcgatcactccggcactcaaattccggccataaagcgaacgatcgaccaatcccacatatacaccgttaatcgctttttcaaatccctgtctatcttcgaaaagcatatcttcattcaaacgatcggagggcgttatatctatccaggaattacaggcactgaaaaccaacaggcataaaagccaaccatattttattttcgttttcatatctcaatcagttaatattacattttagaacgtcacacctaatgaaaaggacaccgaacgggcaaaaggataactcagaccacgttcattttttacggtcgaaatccggaaaatatcgttcatataagcccggacagacatcgaagaagctccgatatgttttaaccagggagctgtactttcgtatcccaacgaaatcgattctcccgacaacacattattatcttcgacaaaacgggaagatatcggcgtcacttcactgctggcgatagatttgaatttagcctgatcaccgggttgtttccaacgatcgtacaatgcccgcttatccagattttcccatttctttgaagaagaaagattttctactttatcataaagggtctgcataaaaatctgcccacccaaacgatagcgtaaattaatagaagcagaaaaacctttgtaatagaaagaagtaccgatcaccccctccactttcggatcactgtttccgactacgacttcatcatcgtaattatgcacaaaagtctgttctccgttcttatccaggaaaatttcacgcccggttgccggatcgataccacaagatctcaccgcccataaatcggaaggacttccaccgtcgtaataacgggtcagattacggttccggttatctaaattatatttcgtcaatacttcgctcacctctttatattccgatgtctgatgacgcaaattcatattcacggaccaaaacatatcttctctacgtatgatagaataattcatcgtcagggttatcccctcggtgatttgttttccgacattgcggggaagcgtctttacaccggtcgaagaagccgtacctatctgtaccaataacgggtcggttcttttattaaaataatcgaaattgaccctcaaacgattgtcgaggaaaataatatcgaaaccgatattccggtccaaggttttctgccattccaaattgcggtttccgagattcgaaacgattgcactcgaaccgaaaatattcatattgtcggtattataggtataaatccgggtagagatataatcatcgaaattctggttcccgggattaccgatagaagcccgca

SEQ ID NO: 5904 - DNA, 11148 bp, Unknown
  gut microbiota DNA sequence
gtaattcacatccagcaaataacggtcgtcataagcatatccgaaattcaggtaataactgactgcccgttttttagaatcctgataagtagcgttaccgtctttctgataacctaatgcaaaagcagggttggaaaattcatcatcgataaagccctgaactttataagcactattattcgatccattctgactcagacgcattccgccgaccacatttaccatatgtttctcattaaataatttcccatatgtcaaactaaaatcaccatcataattcaagttttgagtatttctctcttcataacttcctttattcgcaatatctgcctgactgttaaattctgtattgaaaggagaccggaattttttcatctgttcgttcgatttggtcaagccgaaacgtccccgcacccttaactcatcgatcactctccagtctacttcaaaattatttgtaaaaccggttgtcttggtttcttcgaaattggtttggttcatatcatacagcggattatagtaagttgctgcatagttttgaaacaatattttctttaactcaccattttcatcgtatttccggaaataaggatttgccttggcaaattcagaaaaagcaaccggttcccgatcggctttcgaataattgatattcagattattcgtaaaagataattttcccttacggtagatcaaacggatatttccattcatcacttcccggtcagagcctttcatcaccccttcggtcttgccatagcttaatccggcaccataccggaaagtagcgtctcccccttcaatcgaaagcgtatgtttatgcgtagtagcaaaacgcagaggctcgttcatccaataggtatctactccgcgagccacttctttcatcaggtcattatagatctgatcctgttcttcgtctaaaatatttccctcatcgtctatcaaacgatagcaaccggccaggcgttcgaaagtcagtttctcataagaattcatcagattataatccgacagatcggcaaaagtcaactgcagattaccgttatagtttacccgaagcgatcccatggcaggtaatttagtctcgacgaccacgacaccgttagctgctttcgaaccataaatggctgtagctgcagcatctttcaatacggtgatactttgtacccggtccatactcaaatcgttgatagtctccaaatcggattcgaatccatccagaataaacaaaggctgattcggatcggtttcatattcatcggttaagcctacgatactacttttaccccgaatctcgatattgggcaaatggttggggtcggaaccgaactcattgttttcgataatggcaaatgaaggatcgagggtctttaaactctgtaatacactctgattcccgaccattttgagttctttcgaagtaaaagtagtcgtcgatccggtaaaattctcctttttacgggtaaaaataccgttcaccaccacctcttccatttcggcaatatcgtcttccaggactatatgcaaattttcctgtccggtatacttcacttcctgttttttcataccgacgaacgaaaataccaggatcatatctttctgatcgggaatttcgaatttaaagtttccttcggcatccgtcacacctcccagcgtagttcctttcaatatcaccgtaaccccgggtagttttccccctttggtatccgacacaactccctgtaccgttctcactttttggggaactgcaggtgccgccgtcttcggtgccgtcttaatcagaattacatcatcgtccaaacgccaggtcaaatgagtaccgtcgagcaattgtctcatcacttcctcgactcctgcatcctgtaccttcaggtctcttttcccacatttcctgagttcatccacccggtacaaaaactggtaatccgaaactttccgcagttctttgataatttccagtatcgaccgttgctctaaattgagcgtcaccttaactttttgagaaaagccgttagcactgactgtaaatgttgtcagtaaaaccaagtaaatcccaagtcgcataatctttaggaattttaacacatactctccgggacgaagagcatacattcgattttttttcatagatttgtatatatttaattaataatgtggacgaaagttcacagggaacggaaggaggtaggatgccttccgttctttatttcgtccctatcacaacacaattctcttttatagagatttttataccggacacttcctcgagcatccggataattttgtcaaaatcatcatattttttcaaatcaccactgaaggtatattgttttacttcttcattggtataaaacacagacatttcataccaacgctgcaattgtttcataatttgctccaacgactgttcttcgaatataaatttcccgtctttccaagccagatacataccgacatctactttttgtacccgaagcgaccgatcgcctttacaaaacagagcttgttcttccggtttcagccgcacagaacctttctcatctcccacttcgacactcccttccgccaacgttgtcgtaacctgctcatcgttttcgtaagaagccacattaaatttcgttcccaatactttcacgtctataccggcggaagtggttaccacaaaagggatttgtgcattcttcgccacttcgaaataagcttctcctttcagaaatacccggcgtttctcagcggtaaaattgaccggataacgcaactcggtttccgaattcaaccacacccggctcccatcggccagctgaatctgaaattctccgcctttagggataatcagggtattgaatacttcttccttttccagactatccgattgctgataagtaatgccctgctcatcgagccggacctgttgcaaatcagcttcccggccccaacccaccgaatcgttcaacaacattgttctgccatcggccaataccaacaaaggacttccctgagccaaactaatcgtctgagtagtcctttcactcgttttacgagtctcatccaactgccacttcaacactcccgcagctcccaataataacacgatcaaagccacataacgataccagtatctaaaaacaggatgaatagtccggtttcgtttactgaattttttccattgccgaccgatttcttcttccggataaggctccagaatatcgcctgagcggaattcttgcaaaagctcctgatattcctgttcattgccggccgattctttcctccaggcctccagtttcgcccggcggtcctcatcgataattccggcaaattcctcggctatccattgagaaaccagtaaacgatgttgtaaatcatccataaattttcacttttacaccgacgccttttttgacatcatttatataaaagacgacatttcttcttaaacgggtgaatgaggatagaaaatttattaaaaattaaagttataaactttccggccggaaccattaacttttgttaattcctaagcaattaatattttattgctacttccattaatactcagctcctcatttttgtttcggatcgatcggtgtgtggttaagcagaataatcacgtaagataaacaaataataaaagcagatattccttcgaaagaacctgccgcaatacggcataagcattctttttcaatgttttgacggtattcacggagatacctagtttttctcctacttcggcattgctgagcccttccatactcagcataataatctgcttactctgagcaggcagcttgtcgatcgccgtatgcaggatacggaaagtctcttgccgggtaacttcttttaggaatacaggatcgtccgcttcttctccatgcatgtactcagacagataattagcttcggctttcttatgtttgataaaatctaaacaaagattccgggctgcaatatacagaaaagccttggcattccctaaagagtcgaattcattccatttttcatacacttttacaaatacctcctgcgcaatatcggccacttcctcctcttccgtatatcgtttaataaagtgacataccggaataaaaaaacgttcgaaaaattccttaaattctttactttcccttttctgcatattcctcccaagctctttccagcaaaaatacaatttttttatggacagagcaatacaataaccgatcaggcagagaataatcgttaacgatgatattgtcccttatctttcactaaaataaccttcagttccggatcgtccagcattttatgccccttaggggtaagcagcaattgccattgggttgtccgatgtttccaggtcaacaaatcgatagatcggttcaaattttccttgatggtcgaataccaccaacccggaaaggataaagcatggactattttatggtccaccgctttccttaatttatccatgtaagaatcgatttcttcggattccaaccgagacggattttcccaaccgatatacaaagaagtataatatccttcctctgtaaatcgctgcaaagcttgccaattacgactttcaatgatcaacctttctttgtcgatgtcataccgggaagtcagatcagccaaatgagttaacatagccgaaacattttgcagatcgagatttttaatatccaaccacaatttacctccattttgctgaatatagccaaaataaggttctatagacaggttaaaactagtatctatatcatatgtcacaccgaataccgaatcctgccgaaagacgatatctacttcaaagttactatacctttcactgtgttcatataatttttccatcgaattgcaacgatgcaaccaaattttatccggatgctccccaacctcgtcgatggctacgatacaccaaaaaaatagtccaatgacacaggcaactcctataaatcgaataatacgcacaattttttcttttcactcggataaaagtaaaaaagacctgacaaaaccacaaaaatattcgacaaaaccggaatttatttcgattaaataacgaattttatccatcttttaagtctgatctctgatttccccccctctccctttatccgtaccaacccatcgcttagccggatgaaccgaataaactttcaggcgattcatttgacaatcctgaaataataattatatttgtcacgaaaaatcaccttataagtcggaataatatcatttctgggaggctcggaaggagcagtctccgggaaaggtttgtatttctaacaaaaaaaggagaaaaataagattgttcttactcaatcttgaactaaaacaatacccctaagtgtgagtatcgaaaacatttcatatctttgttgcgtcctttacaggatagcattttaaagatgaaagtgtttcacttttatccttgacaggaaatctgacaatttcgagaatacaaggataatcaatacaaacactcatcacttgtctgttgatgtatcgtcaaagtacatacggataagtgtggggtattgtttatttgtattcgggttttgtcagaacctcctgtcagataaagcaaggctccacactttctttttataatcaaccggccaatcggagtctgtggtcataaaacgatttgaacatcagttataaaattcaaattcattgcattatgaaaaaaatttcattcattctgctggctttgctatgctggtcaagtatggtgtcggcacaggaaaataacaatcgtttacgtaaaaagtaccgcaatctgagttttgtaaagcaggaattcgaaccggcttcttacttcggtatggatcaaacgctcaaaagtaatttcggagcagctttcaccgtcggcaggactttttatcttcataaaaaaccgatagccggtttgatccgtttcggtctcgacgccacctggttcgatttgaattacaccaattacaaactcgaataccgttgggaagacaattacgatgaggaagaagaaccagaaaccagtaatttccatcaagctgaaatcggcatgcaagtaggtccttctgttaccgtcaacccggtcgggaaactaaacgtcaacgcttatttccggtttgcccccagtttttcagctttatacgacgacgataccctcctgggaaactatgcttcttattttatcaccggcggcggtatctcttacggagttatcggccttggagtggagtccagatagggaagttgtaaatttaaatctttcggaagcggtgattccgaagaagacgaacaggagccggcacccggaaaatccaaattcaacggaatgcgtgtttacctatccttcagattttaatattaaatcagcttaatcatgaaaaagatattactattcattcagttgtttattgctgtatgcctgacagcctgttataccaatgtgattaccgattatgaaggcgaaggcgacggaggcggcggaggcaatccttccaatcaatttataaccctgtccgatcctgctcaactcaatcagacagcttatgccgactctccctcctgcgagatcacttttaccaccacctcttcgtgggagagttatatccaaaacgatgaagcccgctcctgggttaccgtaaccccttctgccggagaagaagccggggaacataccgtgcaaatattattagatgaaaacacgacaggaaatccccggacagttcgaatcgacctaaactgtcaaagccaaaccgaaacaatcacaatcaatcaggaagctgtccggcaggacggcagtttcccggaatcttacgaaccggatcccttcgaagcctgggtggagcgcattaccatcacagaaatcacagaaggagtagaaaaccggaataattggctggaaatcagattcggttacaacgatgaccaaattcagtatattgaaaaaacaggcatttatacagaaaatatcgaaggtgaagaaattcaaaatgaaacgatactatcggatattcatataaattatatgcccgaagatcaccgtttattttatgagcagaatatttatgaaaataacaatcaggttactcaaaaactttacagcgaatgtatgctgaacgaacaaggccatatcagggaaaatcaggcaacttacttcgacatgatgagtaatgaagagcccatatcgattgtatatcgttacaaaaatttccgtttacaaaatatcggtagcgaccaggaacagttccaatatatatggtcggatcaaaacagagtagaaacacaggaaaaaatcacaagtgatgctgaatatgctactctggaaaccttcacgtacaccacggaagaaaataataaagccaacctggaccttaatcaactttatcaggaggactacctgtcgatggtcggtttgctagggaaacgcagccaaaatctgttggcttcgatcagcgacaaaaaaggcagcagaacagaattcagttatactttcaacatgtccggttatgtagaaaccattacagccacccatttctctgaaggtattaaaactccgacgaaacaagtgtatactatcttttatcaaggcttttgaagttgaaaatccacatccttttcaacaattacggagtaattttcaactttcaggtcctatctttttcagtgacaacggttacagtgatcagatttgatttccataaccgttgtcactaaaaaacggcaggattatttcggtatttgttcgtcttcggtattcgtgtccgggaacgcgatcgcttctgtcggtcgtctgcctttttctttcattgaccggtggtatctgacgaacgtagtgaggagttatgctatacatctccctcacaaaattacccctttccgcgagaaacacaaacaaaaaaaattcagaaaatttaattcagaaatcaaaattccaattcttcggaaaattgactattttagcagatcattttatcaccattttcatgacagatttaaaagcaatcacttcacattttgccatttcgggagaggtggcagaaataaaaccgttaggatcggggttgatcaacgataccttcctggtaacaacccgatatcccgataccccggattacgtattacaacgcatcaatcaggctattttcacggatgttcctttattacaggaaaatatccgttacattacctcccgtatccgttaccatttgcaacaacggaatgcaaacgatatcgacaggaagacattgactttagtacctgctacagatgaaaggctttattattacgacggcaacagttactggcggctgactatttatatcgccggatcgaagactttcgaacaagtgacaccggacctggcctatcagaccggaagagctttcggagaatttcaatactttctgtcagacattccgaatccaccgatcggagcgaccattcccgactttcacaacatggaattccgcctcggacagttccgggaagcgatcgctcgagacaaagcggcccgtctggctaaagtgcaaccgatcgtggatgaattgctcggacgttctgaggaaatgtgccgggctgaacggcttcatcgcgaaggaaaattacctaaacgcattacccattgcgatacaaaagtcaacaatatgctgttcgatcaggatgaccgttttctctgtgtgatcgacctcgacacaacgatgcctggatttgtattgtcggatttcggtgactttatccgtaccgctgccaataaaggagcagaagacgataaagaattggaccgggtaggtctcgatatggaaatattccgggaatttgcccggggctatctcgaaacggcaagtgccttccttacccctatcgaaaaacaattgttaccctatggggcacaacttctaacctatatgcaaaccgtccgttttctgaccgattacctcaacggagatacatactacaaaatccaatatcccgaacacaacctgcaacggaccttggctcaattgacccatctccacagcatagacagtcatctggaagaaatgaacgcctggattaatcaactctcaaatcagtaattatatgaaaaaaatcacttacctattgaccgcttttctgatcctgggcatcagcagttgccaatgtcctaaatcttcggatcaaacgactcccaatctgattcgcaccgctattccggaacgtccggccggtcagacagacgtcataggccttcgctgtgcacccctcgacaccgtacgggtcggttttatcggattaggcatgcgcggcccgggggccgtctatcgttttacccaaatcgaaggtaccgccatcaaagccctctgtgacctttatcccgaacgggtagaaaaagcccaggagatcctcatcaaaaacaatcgtccccaggctgccgcctatagtggagaagaaggctggaaacaactttgtgaacgccccgatatcgatctggtatatatcgtcactccgtggttgctgcatactcccatagccgtttacgccatggaacacggtaaacatgtcgccatcgaagtccccgcagccatgaatctcgatgaatgctggcaactgatcaatacttccgaaaagacccgcaagcactgtatgatgctggaaaactgcgtatacgactttttcgaacttaccaccctgaatatggcccaacatggattgttcggtgatatcctccatgtcgaaggttcgtatatccacaacctggaagaattctgggcggcctatcaaggcaactggcggctggatttcaatgaaaaataccggggggatgtatatgccacccacggcatgggacctgcctgtcaactcctcgacatccaccggggaaataaaatgaactacctcgtttctatggataccaaagccctgaccggcccgaaactggtagaaaagatcaacaaacgggacggtaaggatttccagaacggagaccatacgatgacgatgattatgaccgaaaacggccaaaccatgcacatccagcacgacgtcatgaatccccggccttattcccggatgtaccaactgaccggcaccgaaggtttcgccaacaagtatccggtagaaggctatacattccgttctccggagcaggtcgaaggtgtacctgatcacgaaaatttaagtatgcactcgttcgtcccggcagatgtgaaacaggcgctgatggagcaatacaaacaccccattcagaaagaactggaggaaaaagccaaaaaagtcggcggacacggtggcatggacttcatcatggattaccggttggtatattgtttacgccacggcctccctctcgatcaagatgtctatgacgcagccgaatggtcctgtctgggcgaactcacccgcctctccatcgaaaacaacagcatgcccgtcgaggtccccgatttcacccggggcagttggcaaaaaatgaagggataccatcattttatgatcggagaataattttacccctcattcaaaataaaaatcgtgcagaaccttcccggatctgcacgatttcatttttggtatttatatagatatttacatgaaatgtacgtttgtaggtataaatatgtatataactaccaaaaattataaatttaagtctcttttgatatgatttaccgggtttcttcctatctttgtcctcgcataccatggggcagacctggatttgacagcatgaagaataggtatgtaagcatgtcgggagcagtgaaacggcccgtaaatcccggacacaaaattttagttggcgaaaataattacgctctcgctgcctaatctttagaagattgaaggcttaatccctgttcaaggaacggggacgggacatcccgccggtggttccaccttattccggtcggcatacggggtgcagtcaatttaaggttagtcttagcccacctttggcgaaaggcgaaaatttaagaggataagcgatggcttgggtgtcactttccggaccatcgtcgaaaaccaataagcgactaagcatgtagaaagcatatggattccgtgtttggaccagggttcgattccctgctgctccacaacaaatattgattatcagtattttacaaaaaccacatccaattttacacccggatttgtaaagttgggtgttttttaattactgattat

SEQ ID NO: 5905 - DNA, 339 bp, Unknown
  gut microbiota DNA sequence
attgttgagctgttatcgtaatttcattctgtagtaaaaaccaaaggtatacaccatccgacatataaagaaagtgaacgggcaattagtaatgctcggctttgatgtctccatctttacacctgcatcctatcaacgtcgtagtctacaacgaccctgagaaatctaatcttgtggccggcttcgtacttagatgctttcagcacttatccgatccagacttagatacccggcaatgcacctggcggcacaaccggcaaaccagaggtctgtccaacacggtcctctcgtactagtgtcagagccacgcaaatttcatgcgcccacgatagatagaga

SEQ ID NO: 5906 - DNA, 349 bp, Unknown
  gut microbiota DNA sequence
ggataggtcggaggctttgaagcaggcacgccagtgtttgtggagccgctgttgaaatacgaccctttgtttgtttgaattctaactcttggtaagaggacattgcttggtgggtagtttgactggggtggtcgcctccaaaagcgtaacggaggcttctaaaggtgccctcaggacgatcggtaaccgtccgcagagtgtaatggcataagggcgcttgactgggagacagacaagtcgagcaggtaggaaactagagcatagtgatccggtgtttccgtatggaagggacatcgctcaaaggataaaaggtactccggggataacaggctgatccctcccaagagct

SEQ ID NO: 5907 - DNA, 10878 bp, Unknown
  gut microbiota DNA sequence
ggatttctatacttttgagccgttgattaatccagttgtcggaatatcccagccgtttatagtccagcattgcctgctgaatagacaattccgggtcctgcattcggtcaagccgttccttagctacctgtgccatccacaatttgaaaggttcagctttaggagagggtatggattgtatcaatcggaataattgttctgtatcagcaacatccgtcaaacgcattttgccatcttcagcaggtaatttcaaacggttacaatttgtaaccgtttcatttccctctttggacatcctgtttttcagtactttccaataatttcttgcaccttgatgattgggttgttctgtcaatatctcaataacatctacaatagagaaataccattcctctttgtcgctgtcccatacggtacggactttcttttcctcaaagacttttattgcattctgctttgtcatatcattctgcttttgattgttacaaatatacctgttaggaatgagttatcctataattaccgactgtcgttttagacgatttgagccacaaaaatattctactgaataactctatccgtttttaagattgtcttggctgtaccgttcccatagacgattatttttattaaaacagttatatacatatttacacttataaatatacatttaggataaacatgtatataaacacctaaatttgatcttattcgtcgatagtcaaataagatacttcagctaattacaaccctaccaattattgcttgctttataagtaaaaccaatgtatattccaacaccaactctactatcaatcactttacccccaaaatgcttagtaaacaataaggaatcgatttatctattatctttgccacatgacgattcagcgaataactcccgaagaactatggtcaaggcagcaaatcagcagtcttgacacagactataagttgtgggacaaaaagagaacctctatacaggcattttcccaaataagcccaagttgtatcttcactgtcgatgtattcaaaaaaagatatgattttgcttccgatcattttacagatcttttcggctacaactccaagcaaataaaaacgatcagaaaacagggtaacctactggaagaaagaatccatcctgacgaccgggcgcaacttcccgcctttcagatagagcacgggctgtttatctattcacttccacaagaagaaaggaacgattatcaacaggtatttcaaattcgtatgcagaatgtacggcaacaatatgtaaatgtcatcagtcgccaccaggtcgtccaaaaggacaggaaaggcaaggcttactcagcaaagagatcgcttataaactacacctcagtatctataccgtaaataaccaccggaaacatattctctccaaactacaagccggtaatgctatcgaagccataaaccgggccgaggattacggcctcctttattaatcacggcagccaatccaaactattggtcagcggatgttcctgtcgccaccgttccaattctacgtaactgcggacacctcctgtaaaaacggcatggtatatctcgatcccgggaatcattacgccatccggcacctcatacttgatccgaagtatcgtttcccgaagcccgggtgtgagcagttttgcaatagcggcagtgacattttccaccaccccgtcatatttcgaacctttgcggatgtgaatcagatcgaatttccatgtatgcagctcctgatcttcatacagagcatgccactcgatacattcttcttcggtatgaaccaggtttttgtattgaatctctttcagtttaagccgctctgccaattcctgcataaccgaaaaactctccgtaatatcgagtttcccggtatagatgtgcagatcgatatccctgcttttcattaacaaacctgacttgagcgaaccgaccaaatgtacggtagccccgatgcgttcccaagccggaataatacccgtttcatcgagtaatttccaggcattttgctgattttgttctgcgagttcgataatatccataagagtttattttgtggggataaaaatacaaaactcccgacgataattatatagctacaattagctatctttctcctgttccggagcaagggaatcgggtgaacaatagaaaaattgatcttattattccccaaataaacattcttgtcaataatacaagattatttaaggaattagcccggaatatttttaataacttcatcatgcaaagccaccgaaataatccctatttttgtccgggacattgctgtgaaagtgcagagtggcaaagcaaacgcttaataataatcacgatggaagaacaagagcacgttctttttataaaaaatatggtttgtaaccgatgtattctggttgtatcagaaatgctcaaaaacctgaatttcaatccactccggattgaattgggtaaggttgtcgtcgaagaaccgttgaaaccggcagaccggtttctgatccggaaagcacttgaagcgctcgggttcgaattgctcgacgataaacgccatcgtcttatcgaacaaatccgtactgccattatcgaactggtccattatgaaaataatctctctaaattgaaattatccgaatatttaagcgggagatgtcattacgactacagtttgctaagtaaacttttttccgaagaaaacggtatcagcatagagaaatactatattgctcaaaaagtagaacgcatcaaagaattactcatttacgacgagctgacgatcggcgaaatagccacacagcttcaatattcgagtgtcgctcatttgagttcccagttccggcaggtaaccggaatgtctcccagtgaatttaaacgtctgaaaggcaacaaacgctcccctttggataaagtgtaagatataaatcatatccataattttataacagtacatcggccggtataccttatctttgtccggaaagagatcatataaaggttaagcgtatgaaaataaaaaaaacttttccggtggtaggaatgagttgtgcctcttgtgcagcgagaatagataaagtcattcatgaacaacccggtgtatgtgaagccaatataaactacgcaaccgcccaggcccaggtcgtctacgatacggagatctgttctgttcaggccttgaaaaatgcggtgcaagatgcaggatacgatctgctgaccgagacagaccaacagggcgaggagaaggccaaacaaatacaaaacgaaaaataccgtttattgaaaattcagaccttcggggctactttattatcgctaccgatcatggtcatcagtatggtgtttgtgaatattccttacatgaactatgttttatggttcctttcgacctgtgtcgttttaggtttcggaaacagattctacctcagtgcctggcagcaattgaaacacggtacttccaatatggataccctggttgccaacagcaccggtatcgcttatctattcagtgtattcaatctattgttcccggatttctggttatcgcgggggataacgccccatttgtatttcgaggctgcaagcggtattatagcttttattcttctgggccgcttactcgaagaacgggcgaaacaaaacacctcaacggctatccgtagactagcgggtctgcaacccaaaacaattacgatcgttaccggatcgggcgaacaaaccgtaccgatcgaaaatgcccggatcggagatacgatagctgtaaaacccggagaacgtatcgctgttgacgggacggtaataagcggggattcatacgtcgatgaaagcatgctcagcggtgagcctatagccgtacacaaacaagccggcgaaaaggtatatgccggaacggtgaatcagaaaggggcttttcatttcactgccgacaaaacaggggccgataccatgctggctcaaatcatccgcatggtgcaagatgcccagggaagtaaagccccggtacagaaactggtagataaaatagccggtattttcgtacccgttatcatcggtatagccttgttgactttcgggttgtggtgtttattcgcaccgactgccggtttttcccacggtctgctggctatgatcaccgtcctcatcattgcctgcccctgtgccctgggcctggctactccgacagcactcatcgtaggaatcggaaagggagctgaacacggcattctgataaaagatgcgacaagcctggagattgcccggaaaatcgatacgattgtattagataaaacaggtacgataaccgaagggcatccaagggtcgtaaatacttactggcatacagaaacaacggaagcccggaaaataatatacagtctggaacgtttgtcggaacatccgctggcagaagcgatagtcagggaattcggacaagaaacatccattccggtcaccggattcgaaacgataccgggtaaaggaataaaaggccggacaggcgatgaaacctattacgccggaaccgctgaattactcacagacaatggcgtcatcctcccggaacccttaaaacaaagggccgaaagttggctcaaagaagccaagacagtcgtctggttcggtcattcgacccaggccctggccataatcgcgatcaccgacgagataaaaccgacctcattgcaagccatccggcagatggaaaaaatggggctgaccgtttacatgctgaccggagataatgtcggtacagcacaggctatagcccgaaaagcaaacatcggccattaccggtcgggcgttcttcctcacgacaaagctatctttatcgaacaattgcaacaaaaaggtgcccgggtagcgatggtcggcgacggaataaacgatagcgcagcattggcacaggcagatttgagtatcgctatgggaaaaggaagtgatatcgccatggaaaccgccatggtcaccatcctttcctccgacctgctgaaaataccggaaacgatccgtttatcacggctgacggtgaaaaccatccggcaaaatctgttctgggcttttatttacaacctggtcagtattcctattgcagcaggcatactttatccggtttgcggtttcctgctcaatccaatgatcggcggagcagctatggcattcagcagtgtgagtgtagtaagcaatagtttacggctgaaacggaaaaaaataagccttatcccgagggggaacgaggtacggatcgaagaagttgaacctataaataaaaaagtcatgaaaaaaagatttactatcgacggcatgatgtgtggtcattgccgtgcacacgttgaaaaagcactgaacagcatcgacggtgtaaaagcaatcgtaacgctcgatcctccggaagcgacaatcgaattcacagataaagaattttctttaaacgagttacaacaagtcatccagaataaagccggagactataaattacacgatttggaataatgtacgcgccaatcgcatgaatcctcaaaagtaccaggacaattcggacaaccatttattattattcaacgatccccttcaacgccgaaggtatgcctgttcgctgatcatgatactactgatgacaggagttgccgaaatcctgcatgagaaagagattatctttcctgaaatagcagctcttatcatcggcatgtggattgtcgataaacgggtatggcatatcgaagccggacaaatgttatcgttaatgactcttggcgcctgtaccggtgttctcctggtgctttactcctcatttcctttggtggtcaacgtagcgatcgcttttctgtttgcagggctaagtcttctattcacccggactacattattccgatgatatccgtctgtgtacttcccgtgttgtaaaaaaccgaaagctgggtctatccggtatccgttttcgtgatgaccttgattatccctgtcgctcaacgctggatggagcacctcggcttatggcaaaaaaaaccataaattcccggctactttcaaatcaaattttgcttccatcggtctttatcttatgtattcggcttcaataatgtcctatccattgttatgatacggccaacggaaaaaacggaagagtaaccttcataccccaacagctctcctttacaaacctaaactatatcttgtttttatgttttaaaaaccggttcgccagatatttccttaccggtatgtcataaaatttcaggcaaccataagctaaaacgatactacctataacgactcctaaagcaccgggaaacttataacaaaataataatgttatccggtatacaactttggttttatgggaccgaccatatgttcctttcccgtcagtccaccacaacatcttttgaaggcactccgatcaatcccatcgccccccccctctgattacaatgtcgtaaaaccgggcagatcttagcaattcaggcccgatatcaggaccaggaaggtaccgtaatgccgacaatgtaacagccattgcttacttcaactcacaatgggaaattaataccttgatatcactcccaaacagtaccgggacgactggatgagaccggcatttcggggtaataataagcatatgaacgatttcccgatcagagtttctgtttcaaatgtccggcagagatttctatagtatttcctgccagaattttgtcgtttgaaacattgttcgtaactttgcgaacaataaaactgatttatggggaagactaaagattatacagacgaacaagaacgaatagcccgctacgctaaagcaatgggacatccggcccgaatggctatcctgcaatttctggcaggacgggaaacctgctttttcggagatatccatgaagaattaccgatagccaaagcaacggtttcacaacacttgaaggaattaaaggaagccggattgatacagggagaaatagaggcaccgaaagtgaaatattgtatcaaccggaccaattgggaggaagccaaacgattattttcagtttttttctgtcattgtaaagacaaaaaatcttgttgctgaaaacagcaggcttttttatacgaatattgttcgtaattctacgaattacaaacaataataacaagaatcttgtatgatgagaattattcactatttaatattttgaaacgatggaaattaaagtattaggaacaggctgtgcaagttgtaaagcactttatacagcagtaatacaagctgtatcggaaaccggtattgaagcgaaggtcgtaaaagtagaggaactgaccgagattatgaagtataacgtaatgagcatgccagccttggtaatcgacggtaaagtggtatcgagcggccgaaagccgaccgttagtgaggttaaaaagttacttgtaaaataaacgaccatgcgactcacaactttattgattacattgactctattctccgcctgcagagaaaagcaaagcagaaacttgcagctacaggaacaaaccgtaaccggcgaccgggtggaggtaatttattttcatgggaaacaacgttgtatgacttgtaaaagcatcgaggcacagacaaaagaattgctgacaggaagtctcgcagaagcagtgaaaaccggacagatcgtataccggacagtagatatttcggataaagaaggagaaaaaatagcggatcggtatgaagtcacctggtcatctctgtttgtaaatcgctggaaagatgggcaggaacagcgaaacaatatgacagaatttgctttttcgaaggcaacaagcgatcccgaaggatttaaagcaggattgaaagaaaaaattgaaatattgatgaaataaataatggaatctccggacattttgatgaatagcggtctacctgtcgcgacagctttcgtactgggtttactgaccgcaataagcccctgccctttagcaacaaatataacggctatcggttttatcagccgggatatcggtaaccggaaacgaatttttcgaaacgggttactttataccttggggcggattattacctatacagtcctgggcctgctggttatccccattttacgggaaggagcaagtatgttcgccatacaaaaaggaatcagtcagtggggggaatggattatttcacctttactattgcttaccggtggatttatgctatggggtcaacggttgaatcttccgaaattcggtttttcgggagacaatgaaaaactgcaaaacctgaaaggtggtgtaggtagtctgacattgggtatattatttgccttggctttctgtccgacaagcggggttttctacttcggtctgctgataccgatggcagcgatctcaacaggcgggatgtggtttcctgttgtttttgctgtagccacagctttaccggtagcggtagtggcctggctgctggcctacagtattgcaggaatcggacgtttctacaatcgcctacaggtgttcgaacgatggatgcgaaggattgtcggctggttattcaccggcaccggcctctattatctgatcaggttattataaaaatcggaggaaggaatgaaaagacaactgataaaaacaggaataacggttactttacctatagttatccttatagttctccttgcattacaggatactttcatccggctaggttccacccgaatgagccggatgcaaaacgaaacgacggcagcaagcatagcagatagcatacaaatcttgtacaactacaaagaccgacgcgatacaggactgcaatatacttttctggaattcggagcgatgggttgtataagctgccggaaaatggaacgtgtcatggaagatatccgaacaacatacggcaaaagagttaaagttcggtttatgaatgtgtcgaagcaagaaacacaggaatggacgaaatatttcgggatcgccgccattcctacacaaatcatattagataataacggacatgaaatattccggcacacaggctttatttcagcagaagatctgggaacggtattcaaataattttataatgacaagagagaagtaaacaattcgattatgatacagaaatttgcagattggttggtcaacgggattttcggcctagaggcaaaaagtcatctgggagaagccgtgaatttctttttttacgatacggtgaaaatcatcctattattattcttaatcagcgtagtgatgggagtagtaaatgcttatttcccgatcgggcggttacgtcactatctaactacccgccggttatatgggctggagtatgtatttgccgctttgttcggagcgataacgccattttgctcatgctcatccattccgttattcatcggcttcgtcaaaggcgggattcccctgggagttacgttaagcttcctgattacctctccgctggtaaatgaggtagcggtagccatgttcctgggtacattcggagtgaaaatcacagttgtatatgtggtaagcggtattttattgggaattatcggcggaatcgttttgaaccgtttcaggttagaacgttacctaagcgattgggtgaaaagcattcagcaaaattcggaaacagaaagtgaatcctgggaaaataccggaacgccttttatgaaacggttaccggtcattctgcgtgatgcctggggtattgtaagaggtgtattgctatatgtgatcatcggtattggcatcggagcagccatgcatggattcgtccccgaaggatttttcgaaacttatatgtcgaaagaacactggtatgcagtatcgttgtcggtcattctggcagttcccatgtatgccaacgctgcagggattattcctgtcattcaggtttttgtagccaaaggaatcccggtaggaacagccattgcgttcatgatggccgtagtagggctttcattacccgaagcgacacttttaaagaaagtgatgacctggcggctgatcgggatattcttcggcacagtggccgcttttattatcctatcgggatttatattcaatatgatcttatagaccgctatttcccttcaatccgatctgatcattttttagccaggtatccgaaaacctgcagcctggctaaaaaatgcaaattcatcctccaggctatgaccgacagaatgccacgacttagagcataaaccgaagaactctttttttgtattgtgttccaagccatctcatctttaatctgatgataaccatgtactcatatataacgtattccctatccatcctgtcggacaactttccgacacaaacaatccgtcagatgatcgtcgataaaccctgaagcctgcaaatgggcataacaaatcgtagttccgaagaatttaaatccacgctttttcatatctttactcatggcatcggattcgggtgaagacaccggaatttcactcaatgaccgaaaagcattgataatcggcttccggtcaggaaaaaacgacagtgtataatcatagaaactaccgaactccttttgtatggcaaggaatagccttgcattggtgattgtcgacttaattttcaaacgatttttcacaataccgtcaaactgcattaaccgttcgacatcttcatcggtcatttgtgcaaccaatccggcatcgaaattgtaaaaagctttacgatatccttcacgttttctaagaatcgttatccaactcaagcccgcctgtgcactctccaacaccagaaactcaaacagcctcctatcgtcggttaccaattttccccactcctcatcatggtatttcacatacagttcgtctgttttacaccaaccgcagcgtccgtttattatatcctgcatcatcatcatattttattacggcataaagataatag

SEQ ID NO: 5908 - DNA, 48406 bp, Unknown
  gut microbiota DNA sequence
ataaaaatattttccccaagggttatatacacctgatcaccaccatacatatattatttatatattagtttatctttctgaattcatcttatttttcagtggaagtgaaacttccaattattgtcaattgtcatctgtcgattgtccattttattttggtgaatacccaccaaaataatcgtccgtttttatggagagaaaactatctgataaagaacggtttatcattcaagtagccgtcaatcgatcggcagagaaccactttgaccggcaaaaaggctggaaacgcgtaaaacgctgtaccaataacggttacattattcgaagacggcattcctggttggctatttgtgtatcggcgctatgtctcctttcgggaagcggttatttatttatccgtcacttcgctgtttatcccccggcaatttccccctcaccggagatttacaaagccgacggcatacctgtattgaccttagaaaacggagagcaaatcttcttaaatccgaaccaatcccctcttatcaggccacagacagcagccaatcttcaactcgacagtattgtccaatccatccgatatttaccgactgaaactcccggatacgattctactttatcctatcattcactcgagatccccaaaggaggcgaatacaggttacaactggccgacggaagccggatatggttgaattcggaatctagtctccggtatccggtaaaattcggcttacaccgacgcgaaatatttctgtccggcgagatctatctggaagtagtacccgatacccaacgccctttcatcgtacacaccgccaaccggactataaaagttttaggaacccggttcaacgttcgcaactatccgacagacagtctttggagtacgactttagtcgaagggaaaatacaaatcggccataacgacaccacctatatcctaaaacccggagaacagtatacagcatcccgccaagagggacgtccacagatttcttctgtcaatcccgccttatatacctcctggatatccggtaaaatcatttttcacaacgaacgtttggaagaaatcatccggcaattacaacgctggtatgatttcgaagtattctataccgatccgcaactgaaaggtctccacttcggcggagcaatcaacaaatacaactccttccaggtggtgttgaaatacctggaacgcacagccgacctgcatttcgacatacaaggcagaacagtgatcgtccgggggaaaccccattcccgataccacctcaattactaacaacttaatatctaatgtatgaaaaaaaatcaaatgaaagtaaaaagaaatctcctgctatgtagctggttgagtttcttcttactgatcagtgtgcttcctggcaatgcctcggtctttgcccagcaggaaaaactcgctctctcatcgacacagctgacagtaagggaaattttcgatgctatttcctcccaactgcgttatgatgtattctacaatggcgaacaactcgacctcaaccggaaagtaaaattcgcacaacaagtcctgaatctcgaacaggttttagacgcggttgccaataatcggttcaaatataccctggaagaccgaaccatcatcctgactccgttaactactccccaaaccgtaaatagcgttaccctgaccggtcaggtaaccgaccagagcaacactcctcttccgggagtgacagtcctggtaaaaggcaccaaactaggaacatcaaccgatcccgaaggaaacttcaaattgtctctgccccaacaagaaaacaccattctgatcttctcttttatcggtatggaaagtcaggaagtcccggtcggcgatcctaaaaaaccgatcaaagtcattttaaaagagacggcagaaaatttgaaagaggtggtcgtgaccggaatttttacccgcaaaaaaaaaagctttaccggttctgcttccacttacaccgcatccgaactcaaaacggcaggtactcaaaacattttgcaaagtctgaaaaccctcgacccttcttttgccattctggacaacaccttatacggctccgatccgaaccgcctgccgaatatggaaatccgtgggaaatcgagtatgctgggtatgcgtgacgagctcgaagccgatccgaaccaaccgttgttcatcctcgacggcttcgaatcctccttatctgtaatcaacgatatggatatcaaccgcatcgcttcgatcaccatcctcaaagacgccgcctcgacagcgatctacggatcgaaagcagccaacggggtagtcgttgtcgaaaccgtcaaaccacaagccggaaaactgatggtcagttacaatggaaatgccaatatttcgatgcccgatctcagtagctacaacctcatgaatgcaaaagaaaaactggctttcgaaaaattagccgggaaatacacccctgcttcctggtcggcgacaagtgaattcgaactacagaaattatacaatcaaaaattagccgaaatcgaaagcgggatagatacctactggctgacagaacctttacgggtgggagtcaatcagaaacactccctctatatcgaaggaggagaaggcagtttcctgttcggtatcggagccggctataacggtatcagcggagtcatggagaaatccaaccgggaagttatcagcggaaatatcgacctgatctaccgtatcaaaaaattccagttctcgaacaaattttcgatgaccaacaccaaaatcaaaaatccgatcgttgatttcagcgaatatgctgccgccaatccctactacaaaaaaagagacgaagagggaaatatcggtaaatggctcgaaaacaacgattataccaaagcggccaatccgttgtggaatgcctctcaaaacagtcgtgacgaaggcaagcaactcgctttatccaactatttcgtggccgaatacactcccctcgaagcactgaaagtacgggcccgcttcggcatcagctacggcaacgacgatacagaaaaattcatctcccgcaacgacacccgcttcgatacttatgagatcctcaaaaaagggactttcaataccaccaatacccgaagtaaccaatacgaaggcgagctatcggtaacttttgccaaactgatcggccgtcatcgtctcaatgccgtcctcggtggtaacctcaacagtaacaaaacgctgacacaaggctatagtgctcaaggattcccggaaggtgatttcgtatacccctctttctcgaacggttatccggagggaggaagccctacctattacgaaaatacttcacggtcgatgaacggctatttcaacctggggtattctttcgatgatcgttatctgatggatttcagtctgcgcgaaaacggctcttccgtattcggagcctccaaacgctatatcggtacctggtctgtcggcttaggctggaacctgcacaaagagagattcattgcagatcacctcacctggatcgatttcctaaaactgagggcctcgatcggtaaccccggcaaccaaaacttcagttcgtcgaaaacactgacgacattcaattttcaattggcctctatgaattatttcggtatgggagccgtactgaatcagctcggtaaccccgacctcgactggcagatcaccctggacaaaaatatcggtatcgatatgacattgatcgataaacgcctgaatatcacagcagattattaccacaaagtaaccgaccccctattgataaacatcagcatgcccctgtcttcagggacaagcagttacctgaccaatatgggaaaacagatttcccaaggcttgacgctttccgcttcctattacatcatacagaaactggatcaacgtttctcctggctcgtccggggtaacctgagaacccagaaaaccaaactcgataagatcggaaataaactcgacgagctcaataaatccggccagggccacaacacggtcagatattacaacggagcagaccccgacgatatctgggccgtgaaatcggcagggatagatccttctacaggtcgggaattattctacgacaaagagggcaattacacctacgacttttcttatgacaacgaagtgatctgtggaaatacccggcccaaaatcgaaggagtgatcgggacttctctcaactacaaagggttctctgtcagcatgaatttcagataccagacaggtgccagcgtattcaacgaagccttgttcaacaaagtcgagaatatttccgtcagcggtttgaataaaaaccaggataaacgggctttgtacgaaagatggcaaaatccgggcgacaaagtacgctttaaagacatcgcgaatgcagccagtacgccgatgtcttcacgcttcattcagaaagaaaacgtcctgagtatggaatccgtttatgtcggttacgaattttatgaaggctggatcaaaaaaataggtctgagcaatctaaagattcaagcctccatgcgcgatgttttcagagcttccacgatcaaatccgaacggggaactctctatccgttcgcacgcagcctcgaattaggactttcttttaacttttaaatccgaatacgatgaatttcaaaactctaatattactaagcctcattttattgggaggaatttgtacgggatgcgatcgctttctggatgtccagcccaaagatcaatatactgaaaaacaacttttggcgacccggggggggtactatactgccatgaacggtttatacaacaacctaacttccaattcgttatatggcaaaaatctctcatacgaattgatcgatgtcatttcaaaaagatatgctcccctggctaaaagcacttatctgaccagtctgaatagctggggatatgcggaggaaaatgtctccaaggcactcgagtcgacttgggccacagcctacacgaccatcctgaattgcaatgtcatcctggaaaatctggctacgcagcagggcatactgtccccggccgaaaccaatctgatgaagggagaattactggccctccgggctttccttcatttcgacatgttacgcttattcggccccatctataaagaggatccttcggccccatccatcccttacaacgaatcggtaaaaatcatgaaccttcccctattatcagccgactcgatcgttcacaacaagatcatgcgcgacctggacgaagccgaaaaactattggccaaagacccggtcatcccggaaggccctatggcctccgctttggaagatgaaaacgaggtatatctgcgttaccgccaattacggatgaattattacgctgtgttggccttaaaagccagggtatacctctatgccggcgagaaagacaaagctttgcaagcagcctataaactcctgaaagataagacggtatcggaatggtttcccccggtagatcccaacaaactactggctaacaatgtcgatcccgaccgggtattctctaccgaagtcctgatggggatatacatgaagaaacggggcgatatctatacctacagtttcgatgcagaaaatgcaggaaacaattttttacaaccccgtaactcattcgtcgacggcaatctgtttgcaggagaaacccaggattaccgctatcaatcccaatgggctcaggcgacgagtatcggagtcacgggtcatatattcaccaagtacaaagccattcaggacggagatgctaaattattctacagcagcttcatgccattgatccgcttaagtgaaatgtattatatcgcagccgaatgcgaacccaaggtatcggatggcaacagctggctcaaccaaatccgcactctgcggggcctgcccgaaataaccattacagacgaaaatgagctgatgagcaaactacgtatcgaatatctccgtgaattttggggagaaggccagattttctttatgtacaaacggctgttcgtcaacatcctgaataccgaaaatgggcacaacacctctacttatggggccagtgccgcccgttacgtccccccccatgccggccaaagaaatcgaaaaccgttaaaacagcatattatgaaaacgaaaaaaatactctatctctttcttctgcctctgatatttacagcttgtgagacaaaagatattccggtctacacctcggacgatgccgctctctattttcaacggactgcttcctatatatggggaagcaccactgtcacctattccaacagcaccgaattcacttttgccggagcagctgccgaaaaaaacaatgtcacctattcggccgaagtacgtacgatgggaaatgtcaccgactacgaccgcccttttaaagtggaaatcgataaagaaatgagtaccggaatccaaggcgtgcatttcgatacgaacctcgacacgttaaaaataaaagccggcaagagtaatgcctatgtgcgaatcaccttttaccgtacgcccgatttactcgacagtacccttacagtcgttctgcaccttatagaaaacgaacacttcaatgcccggatcgacgaatacaaaaaaacgaaccaatggaactccagcagcgaaaacctggacggtacccggtatacgttcaaattcaacgaacaatattccgaaccgacttactggtcctggttcggtgaaggtttcctcggtccctggacgcctcagaaatacatcgttgtcaattcggtcatgggctggacagtgaacgattggtcgcaagccggacaggccggagcgaaagtctcttacggacgcctcggattcgccgccaaagctgttcgtaattaccttcaggaacaagccgataacgatacccccgtaaaagataaggacggttcctacatgcaactggccgacggttatacggtcgactattcccgatatgaataacaaccgaaacataaaataacattgaaaatcaaaattctatgaaacgatacaaactattcgtcctcctgttcattcccctgatcagctcgtgcttcgacgacaaaggaaattacgattatcatgaagtggcagaaatcacgatcgaaggtctgccggaattattggaagtcgtcgggggagccgaacacattgtggccgcccccacagtcaaatcttctctggaaggaatcattacagaggataacccgaacttcactttcacctataaaatggaactgaaaagcggaggtacgatcgtaaacggggcatattggggagtaaccctgaataaaaacggccgaaaggatgtggatacgctggctacctttgcagccaatacttacttatgtatgtttatcgtcaccgatatcagaaccggcagggagacggcaaaactattcgacatcaaagtcacctcccccacttacgaaggctggatggtactctgtaacgaaggagctcaaaatcgtgtccggctggatatgatctccgtactttctaaagaaagaacactcccggcctacgacctgctcgcctccctgggacttccggaggtgacaaacgcccgtatgctcggttgggcccccagccgtttcgccaatccgggagatgtcatttacctgatttcagaaaaaggttcctatctattggaccaggaaacattcaaaacagacgaatcctggaatataaaagccgttgattttatcatacctcctgcagacgaagaacctgtttattacatctccctgaattcgggtagctcgtatggaggtgaggcgaacttttgtgtcaccgacaaagggaatgcttattgccaggcattgggtacagcaggtgctgctttcgaatatccgatcaatacttccgaacgtggcctggctcctgaatttaaagtcgccccttacgtaggagtcagtatggcacgccccggcaatggtaatactgcccttttttacgacaccgataaccggcgtttcgtcggctggtcgacaggaactaccgacaactcgaaacaaatcctatctcccctgcaagaccccgaagaggccctgttcagttttaaaaccgggatggaactgatctatatggaaagtacacgtttttccaatggtctggtgtatgccatccttcaggatcaaaacggccaacgccacatttatggaatcaatatgggaggtaacggattcgtacaggaatcgaaatatgaaaatttacaagcccccggcttcgatcaagccagccggttcgctttccattcccagtttccctttctgttttatgccgaaggcaataaggtgcatatgtacaatctggccaccaataccacctacgaatcggtgatcactctgccttcgacatccgaagtcaccttcctgaaattcaatctttaccaacagcccctcctgactctgctcaacgatcaatcggaggaatttatggcccggcagttcgaactgatggtcggttcatacgataaaaacaacacggacaataacggaggtacactgggtttctataagatcgacggaataaacaataaagtcagcaaacggacagagtacagtggttttgcccggattgcagatgtagtataccgtgaacgccgttaaaacacaggatataaaagggacagctgcctgacaaccccatgctgcgatttgttgtgatcagcgtccctttttcagaaaagattggcggaactaaaactcccgccgccctacccttcaaggtaccggatacaaaaaagccttcgaaagataactttcgaaggcttttgaggtcggtagcagatttgaactgctgtacacggttttgcagaccgctgcctaaccgctcggccaaccgaccctgttgcgattttgcgatgcaaagataggatgttttcgtcaacttccaaaataatctgcaaaattatttctccgtttaattaaatataaaaatatcgtccctacagcagagacgatattcacaaagtaaatatataaaatgtttatggattaccccaatagttatttcaactcataaaagaatagccacggattttctccggcttttactttaccgaataatgttttcatcttatcagtaagttgcactccttttgcctccaattcggcttttattgccaataattcttccggggcaaagatggctatcagtttttcaccttgttgtccccataaatcgctgggataaatcatgtctccccgggcaggcaggtctttgggaatgtaaaaacctttctgttgatttttttcatagaagattttgccgttatcgtaggtaatgataaaccaatttttggtttcaaatgcttctttctttgcatcgaaacctttttctttcagtttggctaacagactccaataatccactctgctgggaataaaatcagcaggaacagagcggtgggttgtcgtgatgaatcggggaataaatttattatctgcatatgtataaatcgtgtcactcagtggtgcgatacaagtaatgttattcttataaatcacaatagggtgaattgagaaatcagcatatcccatgttgaaagtgacaatatgttgtctcaaggtatcaaacttattaaagttcttgtctgtcgtaaaataacacatcctgttacctgtaccgcatgcacagtagccgatatatttaccgttaccggcagggtatatttggcgtgtgtaaaatgcaggcattcctgtttttcccgttgaaacatatttgccggcgaggtcataagtcacttttttatgggaactgaatccgtcatgtaacgtgatttgtcttttttccaaatcgacccaaggcaatcccaaggctccatgttcctgctctcctgaaccgtatttgccaactctgtgcatgaaatcacctgttaatttgaattgcatcattctcatttctccgtcatggtagtcttttataaacagataatcaccataaatataacatgtttcgatagagccgagtcggctgttatcgctgttttctaatggtacataattccaggtgtcgattagtttgtcccagtctgctgccgttgtcagatctgtaacattcttttcatttaagataatggggttttgctgagctttcatttgttcccaagagcctatgaaggctagtaaaataataatccacttcatctgattctgtttttttgtatgaataatgttatttgatgcgttccagtagtagttcataatgtatgcgtccctcttgttcgggatgttctttttgcaatatctttaattgccttttaaggtattgaagttcttgggcgacggtaataatgtagttgtatgaattttggttggaagtatttcgcacgatggaagtcaaggtatctacatagaaagcttgcatttccatttgatatacagatggtttatgccccgtatcgaattgattccatattttgtcatgtaatctattccaaagtgtcggattttgttgtgtaaaggcatcaatggattgttgttggaataggcttttgaacacttcttttccgatgttgcttatgatttttgagtagcttgttctgttgcctatgtgcagtgaaggaatatcaagccattgatgttcttcctggaaaacataataatcgagtaaagctaaaattctttcagcgttttctgtcgaaatgataccggctaatttttttagatgattcgtcaggctttgaattccttgattgtatagtacgatatattgctggtttgttccatgcagagcaatttcacttttcaaaaacgaaaacattgtttcgtagtttttgagcttgcgggtcagtatcttttctttttgtattttttcttctgtgcttgtaggtctggtgggaagaatgattttttccaatagtttgcgttcttttattgcatctttataagccgaggtttgttgatagccccaggcgatttgtttgcaatcttgttgagtggggaaattactgtttttcccattattaagttcttgtagggcggaatcttcccaataattctcaggagatggagcagttaaacccaatgccagaccaaattcacgcataatgattgtttgtaatatttcgcctgcaacttgttcgtgtaggatgtttttgcgtatgcgtttatcctcgcttccatattcccaccaataattgtttaaatagggcaatagcagtccatgtcccaggttgaggcgggtatataagatttctcctgtttccggatgggtgatttgttgccgggtagttgttgccgctcccaggtcgtatgaaatcacaaaacggtgaagtgcaggaatttcgtcttgggcgttttcgtgtatttttatggcatttttaataccagcctgctcaaatgccttattccaggcaaggaccccttttttgatatatgaagcccaggttggaggacagagaggatctatacagcatattaatggctttcggggatggatgcgccaacggcaaatgatggaatcttctacagctccataagggctgcgtccataatctttgaatgtcagataggtgtatgggaaatgatggttggcatagcgcaaaccgagaggttctgcatccaatagtctgacagcacaaccgatttgcatttcaactgtcgggttaagttcgctttgtatacggtattcctgtttgaatgcgacatatattccctcatcaaatgtgataatggtgtctgcgacagcttgtccccttgatgatgggaataagtctttcatttgaagttgataccagttttctccgttcagaatcgctttagtgatatcaattgcataaaagccatccttatctatattgtttatgacgggataatctatacctaaaggttggcggttggatgcttcaaaggcaggtcttaattcgctgttcccggttgttattctttcctcgaatctttctttgttgaaaaagattttgtttccgtctgccgatttttgcagacggacaacccctatgcttgataacggacggttcctgagtccaaaaccttcatttgcttgtgctgtaatcaataactccttccctattgcagattcgggtatgttcaatattattttcccgtcctgtacagtcgcgctcaacttctgggtcgatgtttgtgccgggtgttgtcgggaatgtgatgttatggggttcaatgcatgtccccatgtgcaaattcccagtaaaagatataatatcaatagccttttcttcttcatatttagtttattttcccatgcagaattttatgtagtctgttattcgctggccatgttgaggattgaagtgtttttgtcttgcttcatcgagaatattctccaattcgcatctccaaagcattttcatatattgtgaatctgaatttttcatcgcatccagaacgcttttgcaaaatacttcctgtagaatctcgcgtgacctgtctgtttgatgtctgtcaaaaattgtttggtgtaacaccgtgatatactctttgatagagattgtattattgggatatcgctctgagctgttttgaacatactcgcatcgctgtatcagcgaacggataatttcctggtaaaacgaggatgtccttcggtggttgccaaataaccactccggcgatgagaatgcgtatttgtttatgaactctatggcgtccagttgctttcggataggtataggttgttgagtcagggtgttgatgcctccgatatataatatggcttgtgtcaaaaagttgttgtattgtatttccatccagctttgtctgtttatccatatttgtctgtttgcccattcccctgaacgccaaaggggttcattcgacttcatgtattttagattttcgataccgagtgcgttggctgccaacaagtcgttgcttaagtcttcagactggacttcggggtcgataccggaattgttggcaaatctcaattctcgttgttcttgttgttgagttacccattcttttaatagactgtctgaatttgcatgatgtctgtaataacggtagccccattcaatagcaaaacagtcgtatatcccgacattgggggatagaagtttgctgtccattttatcctccggttgggcaatatagttgaaacgtgtataatccatgatagaaggtgtggtaccgtacttggctacaaaatcgggggtgcgtaattgctctacggtataggcactgctgccgatgaaattgtggcacaagcctaatgaatggcctacttcatgggtaacaacaaacttggcaatccttgccaataatgtgtccggtatgatttcttcatgtatgcgagggtcgacttgtgcgcattggcaataataccattgttgaattaaatccaggaaactgtggaaaatcgatacccgcccgctaaggatttctccgctgcgcgggtctgtgatgatgcctccgcgggcattcatgcgcggtgaaacattgtatgatatgattgaaatgcgggggtcgtcaattgaaaactccggatcacttttatgagcaggcatcatttctcctttgatagcgtttttgaaccctgcctgctcaaatgctttttgccaactatctacagcctcgatgaaggcttgtcgcagatattcgggagtttgcctatcaacatagaaaataatgggtttaattggtactacgagttccccggcttcgtaacgttcaaaatcttcaggacgaggttccagacgccatctttttgcaactttgattgttgttgtgtatatgttgttgtcacacttttggtaggtattcgaaaaatattctacccgaggatcccatttgcgaaatgaaagaggtgtgcggggtaataaagtgagagcagttcctatttgccacattgtcagctcgcgtacgttcattgcgttgggaatctctgaaggtattctggaaggctcataagctctttgcgatcggatgaacaggatgtcttcccggttactgccgatttccagaatggaggaaaattcaggatgacagatgctgatgttaaaatctcttccatgacgtaatgccaggccggtaaaaagagtttcctgattcagcagattgctgacatcgattaatacagcttcgggtttctcttccaaaatcggaatggaaaggtatcgcccggagttgtttttttgtctgtaaagtgaagttaattcactgtctttcggggtatttgatatgccattaaaaacttcaaggcaatcgattctgtttccggatttaacaaatcggatgacaccttcttcaaccatgtcattcgcaaatccatacaatccgtctgtcggacgttctgcctgagctgcagctttcagtgctgtttttgttaccaatatatcggcaccaaacagtttgaccggaatttcccaataatatttatcggaatgtgtataggtagtaaacattcccgaatgtatatctacagtatcttgcgggaattttttttcaaagtagtttttgaaatgcccttgggcaaatgcccccggtgttgtcaccaggagcataattaaaagtttactgccaccacttgcaagcaaacgtatagacaatgtcaacaatctcgccaaaaccgtcatattcatatactttagggtttttctcgtcgtctttttttacatctccgctggcggccagataaatctccgtgacagaccatttgcctcctttttcaactgccagtcccaatgtttgggtttgttgtagcaaagtttcagcttcatcgtctccatccatatctaccatgctggcaaaatttgcatggcggaatttcattacatggatgcgtgcgcctgcatcaggatgttcgtaaatcagaatggtcttgggtgtgctacgatttaaatcgacccgatatactttgttgcccgatgcataaaagaagatgtttttaaaggcgcttgaaacggcaatatgtgcatcttctgcattgccattcagttcgcaggccttttctgcaagacagaagcaggtgtctcttttggttgcagacgaattgctgaaatcaaaaacatatactttcccgtcttgcttgttgtgggtaaatgctacaacattcccgtcataccaattatccatgaacaagagttcgtggttttcatctagtttcggagaaaatttattgggttttccttctcttgcgtaatccggtacattctggatagtaatttttacataattattatagatggtttctcccatattaggtactttacgatacagctttccggctccgaagtaaacatcgggattactatacaggaattgtttgttttggtcatcgaatgccaatagatgatagctgttgtcgctgttaaatgccaccgcattgacaatattcgcattttcaatgtctttggccaatttacctttgaaatacacgtacgaaccatcttcagccgaaaaatacaattcgccgttgttggtgatgacctctccgtactgatatgtgtgtgctgattggatggcagcttcagccgggacaggatacaatgaattggaatagtcgtatattttttcctggaggtgtttgctgtcgtaaattgcctcatcagtgtttgtcaatacttgcagcctccattctgagggattccttgaacttttgtctctccaaaaacaataatttaatgctttgggggttcctgtaagcgacatcggctgtccgtatttgatttggaatacatcaggcgtgattaatggctcttcaccaggaacttcaatgctacccaacaccggcttgtctccaatattctgcaatacaaaccagttgtcttcaaatggtctcagaatcttgattgtaaattcccggtatgttgtaattcccaattcgttgtccgttactccaaaacggaagaaggtgttttttgtatcggcttttacataataaaccagtgtatcggatgtgctgtaaatatcccatatggttgaataatccctttccgtccggatgcgccattcaaatgacagatcattacgggttctgccttcgggtaaggtgatttcaggagcaatctttaccaggatggagtcattgacattttccggtgcctgtaatgctttctgggtatccattttcaagacaagctcgttcagctctgaataattctgttcgatattgtcatcgacacaagaggcgaaaagaaggtttcctaatatgcccagtatggttttgattattatgtggtatcttttcatgggttctattcgttaacgtttataaattcgatttcctttgccggagtgctgtcatccataatagggggattgccagctgccttgtatttctgataggcatcgtagatttcttcctgttcttgccgatacggaggaatgtcgtcatgaagtttttggaagtggtctatcatgaacttatattttccgttgctgaattttccccaggcatcagtgttccattcaatagggagaagcgtgtagatacagtcgatgatacattgttgagcctctttattgcccggttcaaaaacgcctgtgtttttggattgatcaaattggatataggttttattggctttcccgaaattaccgggggctttgattgagaatttgataaaggtgctgtacgtattcttggggataatatatgattcggcaacagttaccggcatgctatatagagagtctgccggagctgtcgtgcaatagaacgtacggtccgtatttgtggaaagtcccattacaacgacttcaatggaatcggtgatttcggttgttttatttaaatagtcgctgtcagtaaagctgcatcttattgtcggaacattttccactttatagtcattgttgaaattcagtcgtgctccggatacgtattcttctacctcttctttttggcaggcggagaatataaagagcagtgaaaatataagcgatatatttcgtttcatggctgtatggttaattgttgtttccaaatatatgttcattgtcagggattgcaggagtgtagtattgcgggagcatgccgccggcaggacatcctgtaaatactttataattcagtcgtttgtagaaatagaataattgtccttcgccgtagtattccttgttgtattccttcatgatttcattaatgcgcttggtttgggtattgtcacatcccggacgtgaatccaattggtcgaatgcatcgtcaccgaccaaatcaacgtctgccggaattcccctgtttgcccggactgtattcagccagtctgccgcttccgtcgggtcggtggcacactctgcaagaatgtagtacatttccggaagacggatcagcggcatggaattcttgcccccactccataacggatcgtcgtagccttgctggtcaaatttcctggatactttgactgtattgaccaatacgaaagaattgttgtttagacggaaatcggtggcacctccattttcaaattcataaagtttgtcaagggtttccggtttttcagacatgttggatgatgagatgttcttgaaatcttcgtctacaattttatccaactcgtcaatgtagaggttgaagatatgttcctggaacaatatgcggttggaattacttccggcaagactgaaatagcctgagttgataacgtcagatgcatagttgtaggcccgggatttgctgtcggcatctcctttgtacaggtatgcacgggccaatatggcatagacagcatagatattcatacgggtttggcgatagaccatgaacgggtctcttatctcattgccatagtcactgctgaattctttcgggtcatgttcttccaacagtttttcagcttcatgcaaatctgctattaccaaatcaatgaattgagatgcaggcaataacggggtggcttctgcatccagacgggtacggtatgccagacatttcgtttccggactttgtgaatatatcggtccgaataagcgcaacagttcaaaatgcaggaatccgcgtaaccccagagcttcgcccttcattacctcatagtaatctggagtcttgattacatcccggttggcatcaatgtagtaaagaaaattattgatattggcaatgactttgtatatcatgctataatagttctctacgatcgttttgtatgagccgctgtaattatatagttcattatctattatcattttgttttcgtagcgttgggccaggaattccatgaagttgtatgtgaactgcttgccatacaatgagggatcgcctaatttcaagtaaaaaccggtgagtacgtccttgaacccatactcatgtgcatataaatcttcctcattgatagaggtcttgggtggtacatccagccagtttgagcaggacgtgaaaaagaataataagctgatgaccggagtcaatatcaatatttttttcatgattctattcattaaaatgcaacattcaaagaaaatgagaactgacgggcaaacggataatccagaccgcgttcacgttttacggaagaaatataggcaacatcctccatgttgaggctcatgctcaatgcactcatcttcatctttttcaagaaaggatgggaggcggggaaacggtagctcagagcaatagaactgaactgaaacgtgttgtcatccatgacaaagcgtgaggtcgcttttgtttcagagccttttacggcattggtaagggctttgtattttacgacatctcccggtttttgccagcgtaaatccaatacgcgtctgtccgcattataacgcaagtctgcattctcgactttagataccagagtattgttatagacttgtccgccaaatcgatagttgaatccgacactgacaccgaagcctttatagttgaatgtggagtagatgtttccctgcaatttgggctcggtgttgccgtaaggaatgacatctacggcatcccatacgccggtcagttctcctgtgatacgtttctggaatacttcctggccggttgccgggtcgatgcctaatgatttgacaacccagatgttgtttaatgactggccttcttcgtagcggggcagtggggttgcatccaatttcccggcattgacactgttcatgtattccaaagcatttgaaatctttgtcattttgtcacggttgtgcgagccgttaaagttgattatccaataggcttcacgggaagcgtctttgtaggggatgaatgatgctgcaaactcaacgcctttgttctcaattgttcccagattttccggtattgatgagaaaccgagagatggtgccaatgttatatcggtcagggagtttttggtgcgtttctgatagtattcgacttttgcagtgattctgttgtttaagaatccagcttccagggcaacgttcaactgtccggtctgttgccatttaaggttggaattacccagggcaacaagttctgcgcctgtcccgtcggatgaaatataaggtttcagcatggagtatgtgtatacttgttgggcctggtaaggggcaaaaccttgtgttccggtgataccgtaagaggcacgtgcaatcaggtcgcttatccaggatactttttttaccgaattttctttcttgatatcccaacgtacacctgccgaccagaacggagcaaaacggttatgtttgccgaattgggaggaaccgtctgcacggatattgaagtcaacggaatatttgtaacggaatgagtagccgaaagctccgacaaaacctattgaacggctagtgttttcgcttccggtcatcttttcattgtattttttaccgaaaaggatgttgtccatttggtcgttggggaaaccggttacggttgcaccgtaccaatcgttcgatgtctggtctatggaataacgggcattaaaacttacaaaatgatctgctgctattacgtcattgtatgatgcagatatgtttatattgtaattgaaagattcgtcttgctgacggatgaattctccgcggcgcatgggatctgcctcagaaataaatttggtgtgttgtgcaggacggaatatttctgtctttccgttgcttttggcgatggcaacatcagcctgcaggcgtacggatgaaataggattgtattccaaatagaactggtcgcgtacagtaaacgaggaattcctgtctttagagttgaaagtggtgttgtacatggggttcggtatggggtctgtattccagtattctttgggatcttgccatacttgcaggttcttcttgatttctccgttttctccataaggacgcaaatagggattcaaacgggtgtattcgctgaatgagccccatggagaattgtctccggttgcattatccagggtgatgttgttgcgtattaacaatttgttgaagcgatagctcaggtctaaagctgccgtttgtgtcttgcgggttgattccttcataacgcctggagtgaagttgccgccgacatacaatttgtagcgcagtgccctgtctcctccttcaagggttacggcatggcggtgctgtacggcatttcttaaaggaatatccagccagtctgtatttacccctcgtctgacttccctgagatattgctgataaatctgtacgtatgagtaatcgctgtcttcaggataataacctgccatcttttcaactctcagtttttcttctgcatttaataaatcatatcctgataaatcgggtagttccaaacggatattaccggcataggtgattcgtaagtctccgggcaggggagctttggtttcaatgactatgacgccattggcagccttggaaccgtaaatggctgttgctgctgcgtcttttaaaagcgtaatgctttctacgcgttccgggtccaaatcgaccattgtttgcaaatcgatttcaaaaccatccaaaatcaatagcggttgattgggataagtggaataatctccttgtagcatgaccatgtcggtgcttacactgccgcttccgactcctgtcggcagagtcgcctgaccgcgcatacgtaagtcaggaaggcggttggggtcagaaccttgtgagatattttctatgatacggaagctgggatctatgattgacagagctttggccatgttggtggtgctgaatttctttaaatcctctcctttgacagaaactgcagaaccggtaaatccttcttttttgcggttaaacataccggttacaaccacagcatccatttcaacggtttcctcttccattttaatggtaatctctttttgaccggcataggtaaattcctgtgatttcataccgataaaggagaattgcagtataatgccttgggtgtttggtatttcaaatttaaatgttccgtccgcgcctgttgaagtccccagtgtagtcccttttacgataacagtgacacccggaaggggattgcccttggaatcaacaactttaccctgtacaactttggcttgttccgctgtcttttgttgcgcaggggcttttttcagcagaatggttttctctgtaatctcgtaagagagaccggtgcctgccagtaaggtgttgaggacttcttctatggaagcatcatgaaagttcaagtctttcactcctgtttggggcaaatcccagtcgctgtatacgaaactgaactctgactgacgaccgatttcattgatgatgtctttgaaactgccgtttttcacctctaggtttaatttgacctgttgcgaataaacgttggcattagcttgtaatgtcaacaaaaacaagaaaataaaaaatgtcttcattaccagataatgaatgattttcctacaccccggataagggtataaagatttttttttcataattttgtatttaagattcaacttacgttcatccgctgttgcgagcagctatgaacatttatctatggggatggtactgcgaataccgtccctgttttattttacaataatggtgtccccttttatgtcaaaatgtactcttccggttttttgcattaattccaaaactccgtcaattttctcatacttccggatattgagggtgaatggaatctgcttgctttggctgttggtatagaatacttcaaatgaataccagcgtttcaagtcgcgtaatatttcttccaaagggcagttgtcatataacattttaccgtttttccaacctgtatataattccgtatttacctgtttgatggcgatgtcttttgaatttttatcataaacagcctggtgggatggagtcagacggactttaccatgcgtaccttgcacttctacgctaccggataccagcgttgtgaaaatggaagtctcttcttggtatgaccgaaccccgaaagatgttcctaacactttgacgtctatcccatctgtgcgtatgataaacggttttgatgcattacttgtcacctccaaataggcttcgccgctcaattccacgatacgtttgtccccggaaaaccgggccgggaattttaatttcgtttcggcgttcagccatactttcgtgccgtccgacaggatgaggtgatattctccaccttgtggtacccatattacattattttgacagacagtctgtttttgatggttactgtctatggcatatatgtgcaaatgaccgatggaatcctgctgtatcagattaccttccgaagtagtgatatatctgtgcgtctgctcggttaaggatattttctctccgttagccaatgtcagaatggcttttgaagagccggcttccccaaatgttggtgttagagttgtcggttccgtccgtgagtattccataattaagatacttccaatcattgctattactacagcggctgctcctgtcagccaccatacctttctcttaaaacgttggaggtatatttgtttatagaggcgattgtgtactgagtcctgcatctgtttgaccaagtcttcttctgtcatttcaatgcatgcatataatttgagcatctttcggtagtaggcctgatgagtcgcatcagcattcagccaatcaatcagttctctttgttgcgaagaagtcagttctcccctgcgaaacagaagtatatattcgtctatgagctcttgtaacaacataaatccgatagtttctttgtaaatagaaacagatgattttagaaaatgggtgacagtttgtaaaaattattttaattttttgtgataatatcattttctcacatctcttttatttatcttcaatataatctcatgacaaatgccgatcaaaaatgtgcttttgccttctttgagggaaagcgaaatattgtccataacatatccgtagacggttaatggatagtaccgatggtggggataattatttcaaaagcaggtacaggaaaagactgaaattatccgtgtagcgttctctaagttgccggatggccctacggagcaatgttttgacggtattgatggagatgccgaggtagtcggcaacttcctgatacttttcttttttgtagaatatggcttttacaatttcacgggtttggggaggcatgttttcgatgtcctgtctgatttgtgtgaatatttgttcattgaattcggagtattcctcatcttcaattgtaatattatgcagttctgcactgctgcggaggacgtctttcttttcccagaaattgatgcaggcgtttttgatagcccgcaatagccaaggtctggcttcatcgataggaactctcagataggcttcggacttccagaaattataaaacacctcctgcacaatgtcttctgtatcgctctttgaatttacaaaagttaaagcatacagtaacatcggttgtgagtatttgttatataacagatcaaataactttatatccataccattgtggtgcaaaaatttttgcaatattcacaattattttttatttctccaaggtcacactcgtacaccggatttgtcctcccaaaggaggattcattttcgaaatcttgattttagcatactgcaattgagggaaagccgcatataaggcatcgagcattcgtttccctacatgttccagcaaatgagaccgtttcatcatttcacgggcaataatctcataagctgtctgataacttaaagcatcagcgatatcatctgtggaagccggacaatggcaattataatgtaaacaagcataaaccataaatttatttcctacaatttgttccgcttcaaaacaaccatgataggcaaagaactccatgccttcaatttcaattattccagtcatttcaattccatttaatccagtcaatttcctatccgtattacacaataaaatacttcacataacctaactccagcctataaaaatcacgttcggctcaacaagccttccgcttcttttacctcccacataaaaaaataatacaaacaaaaataaatctattttctattttgttcaaaagtagaaaaaagaaaattcacttcctattgaattcctgaccaaaatcaaaatccaccgaaacctttccagaaattcgcgtacataatatctctcaactattcagtgtaaattaaaaagaaattattccattatacaatgcagccctattctttacagaaatattccgattaaaataatccgaaagacacggaaaacatcatcagaatataaaaatgaaagggccggtgaaccgacccttaaacatttactaactactaacctaaaccatacaaacttatgaaaaacaatcttttttaaagacggtgcaaaggtaaggacatttcaaacaaatacaacaaccaaacaacaaattaatgttaattattttgttaatatatagttaaaatgcatatatataaaatcagaatcgatacaaaggtttccggcctgcataaatatgtgatattctgccattttcagaacagacaaaaaattattttctgttttttctaaaatattttgccaatataaaaaattcatctacatttgtacccgcaatcagataagatcgcacgggcgcttagctcagttggttcagagcatctggtttacacccagagggtcgggggttcgaatccctcagcgcccacaaaaggaagtcaaaaaaggcttggcttccttttttatgtcctaaattttccgggggccacggtcatttttccggataatccaaagggcgggtgatccaatcgatatttttccaacgggagagttcctgtaccagatcgaagccggaacggcaaaaatcgatgaccattttttcaggattaggataattcaaagcatcctccaacgtaaagaagaactcctgtttttccggtttaaagaaagctttatcgggccgtaaaaatttatcgttaccttgaagatctctcacaaacggataaggcattccataaaaagccggtttcggaaaattcggatcaccgggccaaaatccacattcatagcatttttcatcaaaagcatattgcatcaccttatcctctctgccccaaggtgcggcctcaccgctatacaccagacacgacaaatccatcgtaccgaaataataagccggacaagtcacttttccccggaaaggggcgagaaaacgattcaaggcccgatcggcaaaaagcatattatccagccacaacaacactgcttccttctgatacgaccgatgtttcccgtctttatccagatcgacaggatcataaaattcctgtgatttcacatcgattctggccggcacatcgatttgtttcaatgccgccataaactgccggtaatagtctccgacactcttcccgtcctccaaggccaccttttcggtttttccgttgtaattccggaagaccacctgatcttcgcggaaatcgaaattaatttcaaaaggcacaggtgcctcaggaacgattcccgtcgaaatcccgtccagggtgagatattgcctgatatgcgcccattctggccgtttcgcccgatacagcaatttcactttaccactcatttgcaacaacatatgtaaagtatcggctgtatcttgccagtctgtataattcaaaaagtccatggcttatatatcatctgtcagtgagtttatcgttaccccgaaaaaatggttctgtatttaatacaatttaacaggaccatggtaagggaagaaactttcctccgaaaaaatccgttataccgggataacgattgtagggcaaagccagtgacattaaattcaggacacaatgaaatactattttatattttgcttgtaccttatttttattttacccttatccgcccaggaaagaaaagaacgtccgcaattcaaactcggaggagccttaaggttcaattataacttttcggattggaactcaggacatcgcgaccggggaggcgatctgggttacgatgtgtttatgcttcgtccgacagcctcttacaaaggttttctgctggatgccgattgccggttttacagtacggctttcggtggatttatgctcaaatacggttggatcgggtatcggttttctgaaaaaaatcacctcgaaatcggtttgactaaagtgcctttcggactccaacccggaagtggtaacaactttttcctccaaatctcctattatgtcggtctcgaagacgatgccgatatgggggttaaattcgttcattccgacgaacattggaaatatgccttagcttttttcaaaaatgccgatgaactgttgttcggagcaaattccgagacttccgacgatcgttatggttacgatgtggccggcaggaacaaagaaatcaaccaactcaacgcacaactgatctacaaatacggcaatcaggtcgaacaccaggtcggatgctccgccgaattcggccaactctacaacatcgatacccgaagtaacggttcccatttcgcctttgccctacactacatgttcgactggcaccgcctaaatttcaaagcccaggtatctacttatgccatgtaccccaaaaatgctcccggagaagaccggaatctggtcgtaatgacggcttacggagctccttatctggttgctgccaaagccaacatatacaccctgagcatttcccataccttcccgatcggttggaaatggctcggcaacatcatgatgtaccatgatttcggcattatccaaaaatggcataccgatttcaacaatagttttcaaaatgtatacggttttttactgaacatgggtccggtccagacctatatcgattatgcgatgggcaaacaccaggcttggatcggaccggaccgggacgctttcggacccggaatcggaagcaattcctggcatgcccgttttaatataaacatcggttattatttctaaatctgcctctgctatgattcaggaactattccaactttacgccgatcggtggcaattctttttaaagctcaccctgcaacatctggaaatctcattgatagccatcgtcgctgccttgtgtatcggcttgagcctgggaattctgatcagcagttaccgtcgttcgagtagcctggttttgggactgacaaacttcatgtacaccatcccttccatcgcattattcggttttctgattcccttctcaggcatcggagacacgacagccatttttgccctgaccgtctatgctttactcccgatggtccgcaacacctataccggtatcaccggcatcgaccgggagatcatcgaagccgcccgcgggatgggaagtaccccgtttcagattctttataaaatccagattccgcttgcctttccggtgatcctctccggtcttcggaatatggtggtgatgactatcgcacttgccggcattgctgctttcatcggagcgggaggattaggtgtcgccatctaccggggcatcacgaccaacaatggggtgctcaccgtggccggcagccttctgatcgccgttttagccctactcaccgattggggtataggctgttacgaaacccacatcaaaaagaaacgcaaactgatatgaccatgaaaagagatttactactactccccctgctcgccttttttctcctgacaacagcttgcaaagacaggaaaaatacgatccgtatcgccaccaaaccgatgaccgaacagttcatcctgggagaaatgttaaaactattgatcgaacaagataccggtctcgcggtagaaatcaccaaagggataggaggtggcaccagcaatatccattcggctatgttaaaaggtgaattcgatatctaccctgaatataccgggacggggtggctcgtggtattgaaaaaagacagtttactacctccggacaccctatacgagactttgaaaaaagaatacgaacaaaaattccatttaaaatggctgagtccgtatggattcgacaacacctacagtctggcggtcggcgaacctttggctaagaaatacgacctgacccggttctccgacttagcgcgctatcccgaccaatttattttcggagcggaatacgattttttcgaaattcacgaaggctacgaagccctctgtcagtattacgacctgaaattcaaaaagacccgcgatatggatatcggattaaaatacgaagccattaaatcggggaaagtcgatgtaatgaatatctttaccacagacgggcaactgaatggagccaacctcactgtattgaaagacgataaaaacttttttccttcctattactgtaccaccgtcatccgtgaagagactttaaaggcacatcccgaattagaacaaacgctggaaaaaatgaaaggaatattgacaaacgccgaaatggccgaactgaactacgaggtcgatattgccggccgaccggaacaaaccgtcgctgccgattttctgaaaaagaaaggattattgagatagcatgaatgatatcatacgtttcgaacaagtgacgaaagcttacggggatcaggtgattctgaaagcattcgatctgaagatccgcaaaggtgaatttctgactgtcatcggtagctccggaagcggaaagactacgatgctcaagcttatcaacggattatcggccccgactcagggcaaaatatatatcgacgggaaagacatatcgcaagagaaccaaactcttctacgccgcaatatcggctatgtcatccagggaatcggactgtttcctcacatgactgtccggaaaaatatcgcttatgtaccgagcctgcttaaccagcacgacaaagaacgtacccgcaaagctgtagaacgactcatcggagtcgtcggtctggaacaggaaatgctcgaccgttatccctcggaactctccggaggacaacgccagcgagtaggaattgcacgcgccctggccgccaatcctgacatcctgctcatggacgaaccgttcggagccgtcgacgaaatcacccgaaaaatgttgcaggccgaaattacccgtattcaccgcgaactgggagtgaccatcgtttttatcacacacgatatccgggaagcattgacactcggaacccgtatcatagttatgaaagacgggcacatcgaacaagacggaacaccggaagaaatctgtaaacaccccgaaaccgaattcgtaaaacaactgatcatggattgagatgagcttactttttttatagagaacaaaatttattcatccaaataaatatatatttgctacatgaaaccgatgcgacttatttatatctaccacagtggctttattattgaaagcaaagaatttgccattttgatcgattattatcgggataccccggagttttatgtacaccggcactttttgaaacgccccggaaggctgtatattctgtcttcccatgcccacccggaccatttcaacccggaaatactctcctggaaaccggaaagaccggacatccggtatatcctgtccgaagatatccgcgacagccaaaaagcgtgttttcacgatgccattttcctaaaaaaaggagaagaatggaacgatgatctattaaaaatcaaagccttcggttctaccgacatcggcatttcttttctgctcgatgtcgcagataagcgcatttttcatgccggcgacctgaacaactggcattgggaggaggaatccaccccagaagaaatcagagaagccgcaaacttttatcatcaggaactggaaactctggcccgggaaaccgactatgtcgatttagccctttttcctgtcgatccgcgtttaggcaaggattacacccggggaggccgggaatttgtcgaccggatccgtaccctgcaattcgctcctatgcacttttgggaaaaatacgaaaaagcgaatgctttccgggagtatgtcgaaaagcgtggcggaagatttctggcgatcggaaaaccaggagaagaaaaaacgataaactaatttaattttacacaatggaaataaaaggaagattcgatcatttcaatttcaatgtactggatttagaaaaaagtatccggttttatgaaaaagctttgggattgaaagaagtacggaggaaaaccgcctccgacggttcttttatcctcgtctatatgggagacggggaaacgtctttcaccctcgaattgacctggctgcgcgatcggaaagaaccttacgatctgggagaaggagagtatcacctttgcctgcgtgtcccgggagattatgataaagtgagagcattccacaaagaaatgggatgtgtatgctacgaaaataccgacatgggcctctattttatctgcgatcccgatggatattggatcgaaatattacctctataggtacatcgaaacagaacacacttcacccggatttccgaaaattcgatgaaatccggatactaattatgcataggctcccgacgattacaacgtcattttccactttttcgtgtttaaattcagaaggaaaaatatacttgttgttaaatttcagcgtgtgacgtcaaaaaaattgccggatatttgttattcgaaaatatttcctttagttttgtttttgttatgaagatcgaaaggcaacatattattctgaattgccggactgtttgtcagccggaggatcggattttgtctgtttcgttctctgctgtttctattattactaccactacaacaacaactattacccctatgggggtttaagttgtcatatcaccaatctgtatatccgtatattattccggccgaggctgccggaggttggcttttcaggattctaatctaaagtttatcgtttaaaaatttcaaaaggtatgttagtcatgaaattcaagggtgctgtccttcagaatcaggaaaccctggcagaaattaaaaatagaataaaagagcagaattgttgtagtattgtagtggtatcggctttaaagggcgtgatgccccgtttgcggcagttgtatgggttgagtttgcggagaggagcaggatttgaaaatgagttcaatgaattaaaacaggttcatgaacaattggcttatgagcttttagccggacggaagctcgaagagtataaagttgaattgcagaaggaattgaacgatttgtacggtattctgcatcatgtcggagtattgcgtgaatcttctcattgtatgaaggattatatcctggctaagggagatattctggcttctctgttgttcagcaaattgttcgatcaggcggaatggcacgattcacgtaattttatgctgacggatgggaatttcggtgctccggaagtgttgtgggaagagagttgccgggctgcccggcaggaattcagggggcttcggggaatggccgttgttccggggtattgcgggaagaccgaagcaggttacaccatctctatgggaagagtagggctgtcacttacagctgcagtcctggaggctgcttttcaacaagtgaaagtggcctgatgccctatagacggcagaaaagcattttaaaacaatttgtccggaactccatgaattgaagaaaatccttctaattttgtgatatttaacagaacacaaaatcggttgtatgaaaagttattcgtggattctaattctggtattgttcctgagcggcttctcttcctgtcattcagacgcggaaagatataaagatattttgcgggaaggttcctggtatgtttacgatatcgattattcttataagctgtatgatgatttcgagacgccggaattattcgattttttccattatttgctggatgagagaaacctgttgtttttgccgggagatgagctgatgttttccaaaagaaggatcgatgtcaattgtccggacggcgatcggttcggttacgattattactacagtggtgattatatccggatcggccgggacggtgattatatggatttgtttcctcagggggatatgaatgctctgacattgactctcgatcggatagggttggagaatttgttgtcgtactgggcgccagtagatgaatattatgcttatttgctggaggcagcttaccgtaatctgtatgattttcacatcacttatcatttgcagcgtcctatcccggagatggcgcaggtgatgccggggatatatatcggaccgatgtacgacgggaatcagcaactgatgaatgaagccgctacggtcaatctgttttgggagaaaggacagatgaatatgaccctggacgataaagtgatcctggaagacgagaatggtccgggacctcagttttatgtcgatatagccgggctacaggtcgataaaggacgtacgccgggaagttatgtgtttaccggagagcaatcgtttaccgatcgccaatacggaccggtggaagtccggatcagggaagggcgttataatgctgcggggacagtggctgtgtggctggagattgtctggaatgaaaatgtatatgagctggatttccagaaaggagtacggcaatgggatttccagagtttgaaagtcaaatcgtcggaaaaaacgatcattctgaaaaaataatggtttcggctttgatatgaaaggaattgttttttgtcttttgggtttattgatcggggtggaaagttccgggcagttggtcaggcgtaaggattatgatctggcggtggccctgcaggccggtggcggaacgtcggtgggaattcctttccgcgatgtccggatgtttgttgtgccggtcggtggattgaagatgactattccttttacccggaaatggtttttgggtacggaagtcaattatgcagaccatcggttcgatagccggtatgccccaggggaaaatacagaccggaagcagaaggtacggtttcggctaaaggaactacaacttccggtatatcttaaatatatgctgaactgtaaccgggcatctttgcttttcggtggatatgccggttattattttcaaaataaatccggggtatcgggaccggatccggctgtcgctttagacgatgaaacggagaaatggaatgccggcctgactttcggctatgaataccggatcgtgaaacatctgaatgtgatgtgccgggtgagtgccggcctgaatgatctgatgcattccaggggaatttcgggtaagaatgtatttcctttacaagcctgtataaccgttagttatgatattttccgggtaggagattgtggatgtgattaaaggggtaaagaataaatgacgaactttaggaaacctttttccgtagaaagataaaaaaagtttgttttatgaaagagttgttattgaaattagtagcttctgaccggaaacatctggacggagctttacttttcctgcgtttgtttataggaggaatgatgttgagtcatgggtgggcgaaattagcgtccttttcgactttaagcgctacttttcctgatcctttaggcgtgggtagcaccttatcgctcctattgattctatttgcagaggtgggatgttcgtgtttgctgatcttcgggttaatgacccggttggctgctctccccttgatgttcggaatgctgatggcttttttcgttattcatggtgccgatccttttgcagtgagagagttgcctttactttatctgggcgtgtatgtatttttgctgtggggcggagccggcagctattccctggacgaatggatccggcgaaggattattcaccgggagattgctcgataagtgccggaacatcggtagtcccgagttcttcgtcttcgacgataagcgtacgggcaaaaagccagtaaagcaataatacacagatgacaatgactccgatagtcagccagatgttattttttctttttttcatgtctttgatttttttatttgaacgatgaaagcttatacttggttgctggaaaatgacaaatcttcatgaaaaaaaggcagaatttgtgtcaaaggccgatgtaaacatttttttttgtttctggcataagatttgcctaagcggagaatgagcagtccagctatttttaataaccgttgactactcctatttatgatcaatttatttaaccatttaaaatgagaatagagccatgggagcagctggaaacaaaaaaccgaaaggcatgaagaaaaaacatgaagccagttatatggcagaggaaacaaatcaggaaatcatgcctaaaaaagggaagaaaaaatagagagaggattgaaagaatccgttaaccggatttaaaaagttaccggcagttcaaaaaagatttttgaactgccggtgtattttgttatcggaattgaaggttagtactgtcgaaagtgacctgttcatcttctccttgttgccaatcgttcgcttgtccgccgggagtgatgaaatcttctttggtaccgatttcaatatcctcttcatttcctgtcgtccagtcttcgggagtcaggtcgggatcgatatcggtttcctgctttgtgatatcgtccggcgtgacgttttctttcttgccttcttcgttcttcacctccacttcactgacagaaacattgatttttccggtttctgcaggatccgattcgacggataggttgagtgacacctcggtgttgggctgggtcgtagcaggcacttccagcaattgggcagccaatacctgtccggtttcgtcccgggcaataatattgcattgaattttcttttcaatttctcctgttgtattcacgatggtgacattcaggaaaatactgtattgctttccggtttcggccgctttggtgacggctccggctttcatcgtaacgaagacagtgcctggttcggtccatttatcgtcaccgaatccgaacatcgtaccgactccgggtacgaggaccccggcatcggaaatctgaccggaataatcggttagctgcactttcgtggcagatagagtccgttttacgcttaagccgaccgtcaggtctttgtcgtcgaccgtcagagtacttttagcgaacatcacatctcccaaaggagtgtaatgggtggctccttctgcttttgtcaattgtacagacatgccggaaagtggcgtaccgattgtttcggaggaaatattcccgtcttccggaacattcccgaccagcacaacggtataatttcctttttccaattcgatggctttgagagcatctgcggaagtgtatttatttacggataccaatttctggtctttgtcgtacaaataaaggcgcaaatgggttaatgcagttttcaggtcattgtcctgaacaccgtttatatcacttttcagcgcaaaggacactttggctttgggtgctccgggttcaggtccgggttccggatcgtctgcgttaccgcccgatccgccgcaactctgcaatccgaatgccagtgataaaatcagaaataaatagaatatctttttcactttgattcagtttaatgttaacatttattcatttaaccggcataaggaaccgttatcaattgtccgttctcatcgtataccggattttctgccagataatttttcaatgttttagccgcttcgatcatcttttctgtcgtattgaattcagttcgacccgtaatttcgataatcaaacggtattttatggcagagtattcgcccaggtaacgttctccgagttgattccaccagaccggtttcaaaattacttgttcgtaaggttggtaaacatagaaatcgcggcgatgagatccggctatgaaggagaaattgaaataacggctgttgttgtattcttcaattccctgatttgcgtcaacggtaaggataacagtagcattcccatttcccgtggttcgggagaaatggatgtattcactatcgccttcgctaatttcaacaacccaatcggtattactctcgacggtcagccggcaagtatcccctgcagcagagaatgtagagatatatccgggagtgattttaagaaggataccgtccggaacaaaatcggaatctgattcgatatcgacccgtaaactgttgttgttgtatttttccaatagtttttcgggaagtttaccgtttaaatcaggattcccccataaattcagactagtcagattaataagtccgtccagagaagcaggaacagtggtgagcccgcaattttccagacttaaatcggtgatcgtggtcattgtaccgatccaatccgggaacccgtttttactgaataccggcgaggaaatacccagtgaagtgagggataaattcctgatcggttcgatttgtacaggttgcagatcggtattacagatccccaactttgtgagtgaactcagattcagagacgacggaaactgaagattgttgaatcctatgagcgtcagctcgttcaattgtgaacagttccataaactggccgggaaagtattgttatttatattcatctcggcttcgagttccagtactctgagattgctcaatttcgtgaaatcggtttctatggtgatgccctttttattaaatccagcgagaccgatatattccagttgggtgagatcggcgatatgggccggaaacactgttgtattcgaatagacaagcagataacgtaaatttgccggaaataccggaagtgtattttcatctgtacagctgatggataattgttccagcgtagtcatatctttcaggaatgccggaatctctgtcagcggattatcatcgaaattgaaaatctttagtgctgtcaattgtttaaaagattccggcagactccaggaagcgccgtattcttcatcgggagtagctgtttcgttcattgtcccggcaatcgctttggttgcgtagttgcctaaatacttgagttcgtcgtatccgattccgacaacccgtccttcctcgttcagggtaaccccttcccataaactgatcttttgacctgcccgtttccattgtaaagcgtaatcattgtcggcaggtaaagcatcccgtaaatcgaacatagcctgacggtcggtttccgatactgtaggtagtgccggtaaatgaagacgggctgttccgttttcatcgattatcagggtttgcgggttacacattctgatgtcataaagtctcatacccaggctgtccagacaaatgaattcgtttatgatgtattctccactacttacatatgctgcgtcagagaaatactgtgtaattaacagggtatccttatccgatgataatccaggtaaatagaaaggaatccgataaccgctttttttattttcaagtaatagactgatatcccggatactacctatgtttatctcgtcggtaaaagtaaaatggaggcatacggtatcctgtaaaggtgcttcatcagcagtcacatcttctgaaacagtcgcaccccatggagtggtttccatgtcgaaggtgatgttccaaattcctccggtcaggttagaaatggcatgaatggtatggattttattggcttcaactttattcttcaaaggaatgtcaaatgttttaacgccttcgttgctttccagtacaaattcgagtgaagcgacagaatccgtggtggggaaagtgatggcctgaccgacatatacaccgtcctgctttttagccatcgggatattcagtttgatgctttctccttcggcttctccgctgaaacgaatcttttcaggtgatccggttaaagcgaccgatttcacagtcacatcgttaccgatccctttgagttcgatatccatgcgtcccacaaggcgttgcagggcggcattactcttgttgtctttcccaacagtgagggtatcgatacctttgaaaatacttccggcacttaaaacattgccttccgattcctccagagagagggtgatgtcttctaatttcttatcttcctgaataccgctgattaaatccgatttgatgttggaaagataagcgaaagtatactgtccgatgggaagtttgaccggagagacacttttcagattttcgtattcgctatgtctgacgaaatttcctgtttcgtcgtagataagcacatgaaaggtttcgacgatattacttaattcctctgcgctgaggttggcctgagctccgctgaaattcagttgtactcctccgtcagggactgtcgtgagcgtatcttccttttgacaggaacaaaaaagaacactccaaagcagaacgatgctataggttatttttttcatatcttgattctttttgggttataaaacgcttacttcttcttcgagagtcaactgccaatcttcggctccacttttcgttatggcttttttccggagcatgaaattcaattcgagttttttgttggcttcgattgcatgcttaccggtaaactcaaacattctgattttgttaattccattttcatcgaggtaatcgatttcaatcattccttttaccactccataggttggaaaaacatagtaccaggaattgtctgtccgtatatattcgtcatagtatacaggttcatcttcataatctcccagacagatacatgcaggggaatttgtaatatggcaactaggataaccttgtatatttaaagagtcaaaattggtgatattgatttttactccaccaactaacctttgaagctcaaatttcttttctccagagacaggatctgctttcaatactcctccaaacaggttttcagagacattgtcgtgtctgttgattctgatatagttccgatgaagctccatgtgaagatcttttaattcttcaagagaacccgaacaggctaccgtgataaaggtatgaggttccggttccaaatcctggaggacaatcggatctccccaagccaactcttgttgaaaatagatcggtttgaccggagtcgaactctcggggaaatagaataagaacaaggaatcgattcccgattgataaatagaatctgtgctatacagggataaggcaaaattttttccggtaacgaccggttgctcttcctgtgtctctgtcgaacaagaaaagagagaacacaagatgataaaaaacagtaatttcttcatggtctgtgattttgcaagattaaacgaacgattatattagcgtaataacttgtcaaatcgtatttatgcgcaaatttttgtataaaattgacggctagatgtttagtttgtataaatttttcatacatttgtctcacattttgtattttatttaacccaaataatcgtctattttttttgttacaactattatagcggttagatctgatttctgtaactgtcgtaactaaaaaattccaggatttattttttctttctattccgattccgggttttgtgccgtcagcactacaagtcaaaggaaggagaaggaaagttttattgaatgaaaggacaggcccctatcggagcaggaatacctgagttacctaaccggatttttataaaacactgatttacaagcaaaatcttaatatgaggggttcagaaaatatctgttttgtaggagttcatatttttaaggtcgccgttcgtttcccatgaagtgctagcatcagtcgaaggtatttgtgttcggtgaccattggagctctggcgagtggtatcttacttttttctgaacgccctggtgtctgacggaaatgtaacgtaaagtttttttgcgaagtgaggagttccgccggtcagtgaaagaaaaagccaactgaccgacagaagcgaccgggtcaccgaacacgaacaagtacaaaatgccaggtctttccggcaaagccagaaaaagatcagccttcccttccgggttacgctaatccttcgacgttttaccgatccattcacggataccgttctcgtccattcggttcaatagctttccctctttccagttcaggtcgggataagcctttttcaatgcgccgacactgttggtaatgccgcttccacccgatgtagcgaaaggaataagagtcttacctgccaggtgatgagtttcaatgaacgtatcgataatacgtggagcaagattccaccagatcggatagccgataaaaatcacatcataatcggcaatattctttttcgcttcctgaatggccggacgcgacttcggatcgttcatctctaccgaactacgcgaccttttgtcattccagtcgagatcggcatttgtatacgattcgacaggggttatcgcataaagttctccacccgtaacccgggctaatttctcagctgcacgtgccgtagttcctgtcaccgagaaataggcaacaagcggcttgttatccgattgtttcatattttgtttttcttgggcattcgaggcagtcgccattccaacgaccaccaataatacgaatataaatttatacatagaaagccggtttttatttttgaattttattatatgcttcatcgtttacaggttcgagccactcgttagaagagccttctcccggaatctcgaacgccaggtgagcgaaccaactgtcggctgctgccccatgccaatgtttcacgttagcgggaatatggatcactgtgccgggtaaaatttctacggccggtttaccctcttcctgataccaacctcgtccggcaacaccgataagcatctgtccgcctccctttttcgcgcggtggatatgccaattgttccggcaacccggctcgaacgtgacattggaaatataaacctgttcacgcgatataggtgcaagataactattgccggtgaaataccgggcataggccgcattcggttctccgatgggaaagatcatctcacgttggaaagcagctttcgcatcctcaccgttcgtatcttcggcccacacttccttggcaagccggaacgcagcccaagctttcggccaacccgcataaaaaccgatgtgcgtgataatctctgcaatctctgttcgggtaatgccgttgttccgggccgattgcaaatggaatgtcagcgaactgtccgttatcccctgactgatgagtgaagtgattgttaccaaactacggtcacgcaagccgagtctgtccgtacgactccagacttcgccgaaaagaacgtcgtcattgagttctgcgaatttgggagcgaatgttcccaactggtcacgccccgctgtttgtttgattttttcctgtgccataccgattgttgttaaaatactgaatactaaaaataaatagatcttgttcataatggtatttattggataaagttatgtttcaagaatagttatccgacaaggattttccttttcacgaacagcatacatagtcaatacaccgggttcacgacgcaaggatatttcaccgacttcagtagcatatttcagataggcgtcgagatattccggccgaacttcaattttcgacaagcgcacgataccgtccgaagccatagtaatcctgataaattttaccggtacaccgccgacaaccgtattcacagctacatcgctcgtaacaacaactccagcgcttaccactgcattattcaataaaaattctacatacaaaaatactgcgttgcaaaaaagtcttcgtatctaaattacagattcttataccatttttccgttttaacccgttttaccattcaattgaagaagccactattaccggattttacagattatcgaccaaaagtgtcgatttatggaacgagcgcaggatttcaattaaaaaaaatacaatttcgacacttttctttgcaaacgtctgcacaattatatgtcctttgatctatttttttatttgccgcaaaaggttatctttgtccggtttatgcgctaaacgagtggtgattagcaatatattaatctataaaagcgataaaaatggtatattcacaggaagtacaacacatgtgtgttgtcaaaaaaggtccgaaccatggaccggccccaattcctgaagaaggcaaatgggtgaaagcaaaagaaatcaaagacatctcaggtttaacccacggtatcggttggtgtgctcctcagcaggggacttgtaaactgaccctgaatatcaaagaaggggtaatcgaagaagccttggtggaaactatcggttgttcaggaatgacccactcggcagctatggctgcagaaatcctgccgggcaaaacgattctcgaagcattgaataccgacctggtttgcgatgcgatcaacacagctatgcgtgaattattcctgcaaatcgtatatggacgttcacagagtgctttctctgaaggcggactggtgatcggtgcaggcctcgaagatttgggtaaaggtctgcgcagccaggtgggaaccatgttctctaccaaagcaaaaggcgttcgttacctggaactggctgaaggatatgtaacccgtttggctctcgacgaagacgacgaagtatgcggatacgaattcgtacgcctcggtgttatgatggacctgatcaaaaaaggcaccgacgctaacgaagcattgaagaaagccacttcaaactacggacgtttcgccaatgcagctaaatatattgacccacgtcacgaataaaacaggaggaacacactatggcaaaaagagaagtaaaatttgaaagtcaggatcgtcggatcgctcagatcaacaaagtattgaactcctatggcatcgcttctatcgaagaagccgaagcaatttgcgacgcaaaaggaatcgatccttatctggaatgtgaacagactcagaatatctgtttcgaaaatgcaaaatgggcctacgtagtcggggctgctattgcaatcaagaaaaattgtatccatgcggccgatgctgccgaagctatcggcgaaggcctgcaggctttctgtattcccggatcggtagccgacgaccgcaaagtaggcctgggccacggtaacctcgcagcccgtctgctacgcgaagaaacacagtgcttcgcttttctggcaggccacgaatccttcgcggctgctgaaggtgctatcaaaatcgctgaaatggccaacaaagttcggaaaaatccgttgcgggtgatcctgaacggcctgggaaaagatgctgctatgatcatctcccggatcaacggttttacttacgtacaaaccgaatttgattactataccggcgaactgaaagttgttaaaaccaaagcttactccgacggcccccgggcaaaagtaaactgctacggagccgacgatgtacgcgaaggcgtcgctatcatgtggaaagaagacgtagatgtttccatcaccggtaactctaccaaccctacccgtttccaacaccccgttgccggaacttacaaaaaagaacgtgtactggccggtaaaccctatttttcagtagcatcaggcggaggtacgggccgtaccctgcatcccgacaatatggctgcaggccctgcttcctacggcatgaccgatacactcggacggatgcactcggacgcacagttcgccggttcatcttccgtacctgcccacgtagaaatgatgggattcctcggtatgggtaacaacccgatggtaggagcgactgtagctgttgccgtttctgttgcacaggcactgaccaaataatcggatcatcgttatccagatacaaaaatcctgcaggtccactcccgcaggattttttataattgttttagattacacacgaacaataatataaaaaaatgaagcgtatagtttttttggattacgtgcgcgtattcgcatgctttttggttatagtcgttcatgccagtgaaaatttctatggcgccgccggttccaccgacatggcaggaccacaatcttttctggccaatgagtccgatcggttgtgggtgtccatttacgatggtttctcacgtatggctgttccgttattcatcatcgtctccgcctttcttcttacaccgatgaaagaagagttgacctcctggcagttctaccgccagcgttgcatccgtatcctgcccccgtttcttctgttcatggtgttatacagtaccctgcccctgctgtggggacaaatagatgcagaaacatcggtaaaggatttatctcgaatactactcaacttcccgacacaggccggacacctgtggtttatgtatcccctgatcagcctttatttattattcccgtcatatctccctggctaaaaaaagctacagccaaagaagaacgtttcttcatcggcctgttcctgttatcgacctgcatgccgtatctcaaccgctggtggggagaagtttggggacaatgtttctggaacgaattccacatgctgttctatttctccggcttcctcggttacctggtcatggcacattatatgcacacccacctcacctggagccgctccaaacgcctcagaacaggaatcgctttgatgattatcggagcagtgtggacgatctactcgttttatatccaggcgatacccggagaaaatctgtccactcctgttatagaaatcggatgggctttctgtaccatcaactgtgtgctccttactacaggtaccttcctgatgttcagctgtataaaccagccgaagtccccgcggctcatcaccgaaatatcgaaactcagctacggcatgtacctgatgcacatattttggctcggcctatgggtaacggtattcaagcataacctggcatttcctactgtcgccgccattccctgtattgcagcaacgacatttatctgttgtttcgtgacgacaaagataatctcgctcataccgggcagtaaatggattataggataaaaacgcatactgccattttgagcaaggtatccaatcggttacaccttacgtcaccgattggatacaacaaaaaactacttcgtacaaaaacaattttaccgaaaaccgatagaaagataatccggccgatcactcactatgcctccgtccgctgaaaagagacacaatccatagcaaaacgatcgccccgatcgtagccacaaccagactgccgataatcccaccggtcgaataaatacccagcagactgaacaaccagccccccaatacccctccgattataccgacaaccagattcacaatcaatccgaaacctccgcctcgcataatcttaccggccacatatccggccacaattccgataataataaaccaaagaaatgacataatcctattattttctttgttatactccaatccgaaaaaatagttcatctttccccgctaaaaatttttccctcgtaaaccattatgaacttgcccgacttataatcccggcgaatcagaacttcaccaacccgatttccgtaaacttccaaaaaaacaaaaaaatgatacgtagcggaatttacacattaggaatcatcgtattaaccggaatcttagtaccggcatacgcacaacccgggacggacaccacctggaaaaggggtggaaacatcgggataaacttaagccaagtcagcctgagccaatgggctgccggaggtgataacgcagtaggattcaacctgcaattcaactactttgccaactataaaaaggcgaaacacctctggaacaatcatctggaactcgactacggtctgaataaaaccaaatcggacggcaccaaaaaaacaaacgacaaaatctacctgtcttccacctatggatacgaaatagcgaaaaactggtatgccagtggattgatgaccttccagacccaatttgctaaaggatacgactacaacgtcgacccggacgtgtttatctcgcgttttatgtctccgggatacctcctgatcggtgccggtttcacctggacccccaaaagctggtttacagctaccttcactccagccacctggagaggcactttcgtcagcagtaaaatcctttccgaccagggagatttcggagtcactccgggtaaacacctcttctccgaattcggtgccaacttacgcatggaagccaaatacgaattcctgaaaaacatgaccgttttctcccggctcaatctttacagtaactacctgaaagatccccagaacgtcgatatcagctgggatgtacaactcaacatggctatcaatcaatggttctcctgcaacatcaccaccaatatgatctacgacaacgatactaaaatcttacaaaaagacggcaccaaaggcccccgtctgcaattcaaagaagctctggccgtcggttttcaggttactttctaaaattccgggacagccaaatctgtccctaaattattttcacacaatatggtgatcagagagtccaaatattggttagggcatatccgctccaacgtctgtttataatttgtaatgacccgtcctcagataatactttccgaagattagttaccaggtttttcagtgcacaccgtttcccttcattagccattccctttccccaaaccccttcacacaaatccaccgaactcacattttcatttataaaacggcacaaaattgccagtaatttagcctcgttcaattttaaaatttctttatggtctccgatcatcaaaacaccagaagtgatatgaaaagtcgtaagttcggaaagtttgcaaatctcatttctttgctgttgtttcaatgcccgtttataaagtgctttcaatcgattgaccaactcttcgggctggcaactcttactgataaaatcttcggctctgacactgaaagcatcttccaggcgttcagactcatacaatgaagaatagaacacaatgggcacccattcgtcaatacgtttcaattcacagatcaagtcccatccattttttcccggcatatctatatccaacaaaaccatatccggttttatctgttgaaatatctcccgggtctggtatccatcctctgcaattacgacagagaaaccgttttcctccaataacatccggatagaaactgcccaatccggatcgtcttcggcatacaaaagtcgaataatatcttccatcatctatgctttaatacgaatcacaaaattacaccctttaccccaatcgctttccacccatactctccctccatgtgcccgggcaatcatcatgacataactcagtcccaaaccatatcctttcactttccggttttctcctttgacaattcgataattccttttaaacacattcttcagttccgacttatcaatccctcgtccattgtctttgaccgaaatctctacatatcgtcctatccttctgcaagtgatatcaatctgtacccgatcatcggaatatttccatgcattctccaacagattccaaatagctctcgacaaatgatatgcatctgcccggatcaatgtattctccatctgcatactcacctgaagctttatctctttctctcctgtcaccgatctttgccaatcttcagtcaactgttgtataaaagtactgatctccaattctttcatttctacatgtaaacctttataatcaatagaatcttgtaacagtttgtcgatagaatccagcaactttccggtttttgtctgagctaaggtatataattcctgttgttgaggggaaaacggagccactgattctttctgaatcagataaagtttcattttcaaatcattgataggagatttcaaatcatgattaagtgcctgcacaaaaagctctaaattctccattcgctttttattctgacggattatccggaataacataaaaatacaacttcctaaaaggaatattcctccccaaaccatgatcatatatctccattccaatataaaaaaatatttccatggaaatgtatagtataccgtcagtcggtgtccgtccaaaaagcccataggaacagaatagctgtcgtccaataaattttcaccattcacaaccccgtaataatctaatcgtttacctgtactgtcagtcaatacaagcgtaaaaggcatcctctcgtattcaaacttttgttgtaaaataccagctaatcgtttcaaattccaacgctgaggatcacgtatatcataaagtgcctgaactacattagactcaatgtcaatcattgtatcaactttacaggaatttataataccacccctcgtaataattatggtcgacttatctttggcagaaacaagctctttccctaactgag

SEQ ID NO: 5909 - DNA, 33369 bp, Unknown
  gut microbiota DNA sequence
gttttcggatggcaaacttaggaaagattcttaattttgtaaaaaaatatattctataatattctataaattaggtgtatgaagagtagaatacgtataatggggcgtttatctgtggtactgttaatatgtgtattattaggacaaggggcatggatgtatagagtgcgtgaaatgaaagtcgatgagtttcgaaaaactgctgattatgtattgtaggatattattcagatttttttggataatcaagctccttttgctattaagaaattgaaattagggtatagtttagctaatgaggatgaattttgttggaaatacaataatacagaaaaaaggcttaaaattaattcaatggagaaatatattagtttaggccggcaagttgtttatgattgtttatttgagaacaaatgtttagatatacagaagattgctgttttatatcataaagcattacaagaaaaaggtatatctgaaagtccttatttaataattaaggggttagatggaaataagttattattgtcagataagcttaatgtagaacctaatagtattactacttctccgctaaatttaggatacgattacaaacaccaaatcacggcctccttcaaacttcctttcgttttccgagcccttaaaggagtattatggattgaattactttttctgattggtttcgttatttgtttagtctggcaatggaattcgataaagatgacgctaagaagtgtacgggtacagaccatgggaattgcccatttggaacatgagctgaaaaagcctttagctacgatgatttcggcgataggagggatgttgaaacggaaggaatctgttttatgtcctacagatgaagtaaaattagggatgataaaggcacgtttgatgaagatggccgatattaccgatactatgctgacctctttaaaaacttcggttttggaggtggaacgcgaaccgatcgacctgcaactggaattggagatgatcacagaaatgtttacgatgatccgaaaacatgcccgggtggagtatcacattgccgaaggactcggatacccttgcctcgataaaatatatttcaataatattgttatcaatttagtggacaatgctattaaatatggaggagctcatccggtcgttaaaattaatttctatgaagaggggactgattatattttggttgttgaagacaatggcatgggaattgcacctaaagatcaaaaacagatttttaaacaattctatcgtgtcagaaatcagcaagtcacgaaaacaacaggatttggtttggggttgaccttcgtacataaagtggtttgtgcttacggagggaaaatacatatagagagtgaaataggaaacggtagcaagtttttaattattttaccacaggtatcatggaaaaattgaaggttttatatgcagaggatgatcctctgactgtgatggaggttgcggagcaactcgaagagaggggatttgaagtaatcgtagctaccaatgggacggaggcactgaagctgttccgggagcggcaaccgaatgttgttttgctggatgtcgatatgcccggtcataatgggtttgaggtgctgcaaattatccggcttaccgaccactatacaccgatagtgatctacagttcgttaggggatgaagccaaccagatgcgtggactcgaaagtggcgcctatacctatctggtgaaaaattgcgcgcctgccgttgtggcagcacaggtgtataattgtctaagtaaaaatggcagtgataaaatctgcttgggagaaaaatcatttttcgatctgctttccggagaattatggatcggagaaagaaaagaaaaattggtgggattggaatttaaaatctttaccatgctttgccgtaaccgcgagaaaacagtttcccgtgaattattgatcaaagcaggatgggataaggatgattataaattgcatttgcagttgaataaatacatcagtattctacggcataaaatttcactgacttcggcttccattgtcactgacaaatttaacggctatatgctcaaagtgacccgctagggattccgggacgaaccttttgtcccgttttcttcgattcagcgtattttctcgtcgggtaggttaggcctgacaagtgaatcgtatagataaccgatattgggacaaaaggttcgtcccggaatcccggagtttaaagaggagaggaggagagggaacgttggtagagggtccagattttatcgttttcgaccggactaccgataagcaggacccggttgagcgaatcgagcaggaaagtttggaaagccggttcggcaggaaactggttgattttttgcatatccccctgcggatcgtataggaagggtagctgacaacgattggcacgttgcaggatttccaattcgtcgtaattgtggacccaggcaacgaataggatgtcgacatcgtagcccagactatcgatttcctgtttcaataattgccattcggccagtttcatccggcattccgtacaaccactggtgtcgatgtaattcaggattttatatttgcgttcctgaaaatccgggaggatggtatcccgcccttgtacttttaccaataagggatccggaaaaataacttctttatttttccattcttcaacgattcgagctatttctttccggcgtgaatggcaactacagaggagtaataccaccaggcaaatactaaaaaattttaccataatcgatagatgttttctatttatgaatgcaaaattagaaaagttttgtcaatcgtgtttaaatttccaatttgaatttgtaaataatcatattttcggtgtcgagatctggtttgccatacgcatagtaataaggggctgaataaccgaatatccgaaagttgtcgggtacattgaattctgctaccagggtctgatttttataggcttgaacggtttccccgcaagaaggttctccatggtaaaagtttctgaacaggactttggtttcagggatgtatttcaggtaacggtaagaaccgaattttttataatcttccttgtaattgttagtggcttcttcgaaagtattggtttctctgtaatccgtattcatcggatggccggctaggccgaaagattgcagggtattgttcttaaagtccgtttgatagatcagggagtcgatctggaaagaataaaataaggtattttctgtatcggtatcgaatagaatcgacttgaaattaggaatataacggtactgtttataaatgggagaatgggtacacatcatccgttctactttgccggtacggggatcgatgagtcccagggtataactgttttcataaaaatgagctgcctggctgttcgaacggaaaccgttgtaagtaatacagtcggtaacgatagcgatggccagatagtttcccagtgggcataatcgaccggtaaagtgttcaatttcgtaaattccactttcgtcaggacctggagaagcgagcaggatttcgggggttttatcgttttgccagtcgatccgtaactgttgtttccctccccaactttgatcgaaaatattcaaatgccagtcgtttataattgcataacctccttgtgggagtgcggtaatctcatagatcccctgtatttcctgcggacctcttccgtaggatagatgggtacccaaaaaacgcccgtcccgatcgtagaggaatagggtagattgttcccggtcggcaaaacaaagggtatctcccagaaaaagaaaactccctagcagggaagtcatttcgttttcattaccggcatcgattcgtatggtatcgaaattgacggaagatatcggatgagcggaacgtgacgaataatgagtaatttgtgaataatcggtcttattccgggcttccgggatgttgcttttacaatttatgaggaaaacgaggagcagacagctgtagataaagacttttatcatgacggattagggtttaaaaaagtgattgaaaaggatggttctggccgtttgggctttcatcaaatgaaaagcccgtattcatggcgtagatttacgcaatggcctttacattctaccgatttatagtaggaggcaggggcataataccggacatattcttttttcgccgggtattttttgtaaagttgtttgtgagtgagagcgagaagtcgaggcagtggttgtgcgaggactactgcttcgggcaattcggtgattttttcttttaaccggacgttcggatgttgtttcacttcttgaaaaggcagggctttcatctcatatcccaggcattgaaaaacgagttgttgccgagcggggatatggagcccctttatttctacctcacctttttcattagaggctccgagaagatacgattcgggatattgcaggactacggctccgatgatgatctggcctttttcgtctgtaatccgtaaagtcaatgaatcttgttgggctgttccggactgactcaacaagaagagaggcaaaaggtaataaaaaatttttttcatagattttcagtaataggctatcagagtggtaaccgatatttgttgattgcattttcttcagaagaacttacggtataaagtatattgctgtcttcgtggacatctataccattggtatagtgatcgagcaaaaatttccggatcagcttaccgtcgaggtcgtatactaaaaacaaattgccaccatcaggagtaggctgccccttcatcatttttttgagttcttcttggtgatcggtgcccgagaataaggtgtagatggcttttttcccgacttgtacatcctgataacccttgattttgccgacaaggagtccgtttttatcactcaaaaaatcaggttcacctcctttgccgacaatgaaccgggaagaatccgacgccaggttatggatttccagtaattctccgttttgggtgacaaggactaataggtgattgtcgggattatagtcgagataagagttccatagtgaggctgtcatcgtcgggtaggctttgttttttgcggtatttccccgcggaatctcgtattttttgttcagcagatgtccacaagtatcgataaatgcaatccgttccggtccgtcgaaattgagcaaggcaaacccttggtccgtccggcaaaaattcagtatcggaatgccggcttgagggtagtcgattatccgggcaggggaaatgcgttgttgcatcagactgtctttccggaagatcgaaaggcgggcccggctagtgtcgaaaacataaatatgttgctcgtccatacaaaatcctcctgtcgaaatatattcttccggcccgcggccgttcacggcaaaggaagtgatgaattgcagctcaggataagaatagagatgatagaaccgatctcctccatgcaggtcccaaatacacattatagaatcctgtacttttattttatatggatatttcatatataggtcactgttttttaacaaacattccgaagtcaggggaacgatctccccgttatctccggatgggggagtgggtttacaggaaatcaggagtcctggtaacagcaggaaaagtagagttttattcatatgcttgattttattcatttgtaacctggtggtccatttgatccggtcaaaaaccgagatatcacatgtaggacggatggacgagctgattagttacagcttaaaatcagataatgaataaagttttaaaaaggattacaagttatattagttaagggagcctggtttcggttttgggggattttgggaataggtgaaaagacgtcggctacattcatctatgaccagaaaaaattcggattggggataacagtaacaatcttcttggagagttgctgagttactgagttaaaagagttgctgagttaaataagttttcaataaaattacactgaattgaaataagtatggggattataaactcttctcaacttaataattcttttaacttctccaactcatatcttagttactcagtaacttagcaactcttttaactcatcaacttatcaactctttttaattttttctgccatagcttgggcgatagctttacattgctcgatgtcggaagatttcatagctccgagtgcttcattgggttctgctaccacttcccacttcattttttctgcaaaagctttcagtcgggggatggctccgcctccccaggttttattaccgaaataggccagaaggtgatttttaatgcccatattttccagttcgcacaacagggtttccatagttgggaagataccgccgttataggcacaactgccgaggatcactcctttgtagcggaaaatatcgttgatgatataagaaggatgtgtcttcgaagtgtcgtggatccgtatctttttaacgccttgttcggcgaggaaacgtccgatcgtgtccgccatctgctccgtgtgaccgtacatactgctgaaagcgatcaccactccttcttcggtttcgtatttactccatttttcatatttagcgatgatatcacacacatgtgagcgccagatcggaccatgggtggcacatatcgtgttgaaagtgagtgtattcaatttcttcagggctgtttgtgccggcataccgtatttcccgacgatattcgaataataacggctgatttcctcttccaggtaatccagatcgacctggtcatcgaaaataccaccgtccagggttccgaaagctccgaacacatccccgctgaatacgatattctcgcccggtagataggtaaccatggtttcgggccagtgcaacatcggaaccatataaaaattcagggtacgtttaccgatgttcagtgaatcgccttcctttacttcgagcaagttggaatctactccgtaataattttggagcatggggaaagttttacagttgcccactaccgtcaggtcgggataatggcagagcaggtttttgattgctcccgtatggtccggttccatatgattgatgatcaaataatcaaccttccggccttggagcacagcttgcagactattcagataatcatccatccggctgcgttcgacggtatctatgacgactactttttcgtctgcaatcacatacgaattgtaggctactcctttagggagaggccagtagttttcgaaaatatgagttcttctgtcatttacgccgatccagtagatgttgtctttgattttgatagcattattcatatgtcgttgatttaatcttatattctttgcaaagttagttaaaaggtcgaaaacctcaaaggcgtaaaatagaaaaggccgaagaaattatcataacttccttggcctttcaaaacttttacgtcacaaatgtctattttatacccaatttctttttcaggtctttgggaagagcatctttgtgaatcatcactgaagtagtcttgtaagctacaaaaggataagaagcatacaggtatcccttgtatttaccatagtcaccccaagagtttttcacgatgaaatatttatttccgatttgatcgacagctttacctattacatgcatgccatggtcgtcggtagtcagtttattgtcgaattcttgctgacgcagtttctgggtaatttctttttctttacccggtttctttagcaattcggcttgttgttgtgttttcggcattttcacccatttcgcgatttcagcgtcgctcatttctttgatgttcacatccggaacaacagccaggccgtcgcgtgtgaaaccgatttcagaaacgtctgatccccaggagaaagtgtagcctttgtcgatcgctttgtcgagtacatccatcaattcatccaacggaagattgtatgacatttcgccgatccagttatcttctacttccagagcgaattgagtatagaacggatggtgggtgaaagaagtcaggctgacataatcgtccatattcagcccacaggcatctgttgcgaaagtcatcggagtatattcttttccttgccaggtgaatttttccggtttttcgcccagataagcattcagtataccgtcataacctcttaaccacgcagtgcttaattttttgttaggattgctgacaacagcgtccagataacctttcaggatagcatccaattcgccgtgtacatgtacctcttcgccgtagttcaggccgctgtataaagacaacggaacaataccgtagttccggattgcccaggtcacatcggcagaagcgcctccctgtccgaagtttacatggccgttcatccgtacgtatttatctcctttggcatgataggtgttccatacgacatacatcggagacaggctgagcgaatctttgcccatacgcatgatttcagattccaaaaaagaaatagtcgaccaggaccaacaggttccggcacgatcctgcgatttaacacttgttgtcggaaggcgtttgatatccgtaaatttgtaaccttcctgatcattcttttgttcctgggcattcacggtcactgcacaagctaacagtaagcccaaggtgaaacaggtaaattttctcatgtttgtaaatagttattgatataaaaaaaatctaacgtttgcgatgctgccaaaggtaatcaattgaaaatttaaaaataagtctcagcacggaaatgccgaagttttaagaaaaaaataacactttacatttcgttgctttccttttggatctttttccataaacagatctttccccaaaagtgatatttccggttgcaaatccagatgaagatcacaccggcgacaagcatcgtcagcgtgtcgaaatgcgaagctgtcggatgcaggtctttgaaaagggcgtgggtttgcagggtagaagaatcggaggttatggtgatggctgctataatattattggccatatgcaatcccagggataattccatgccgtcgtctttcaccgctacaaagcccaggatcaatcccatcaggatgtattggggaagggccacccacatgccgaattcttcgacttcggggttggcgccgtgcaggatgccgaacaggacacccgtgataacgacagctacccagcggtatttgaagagcagggccgaccactgcatgaggtacccccggaaaagcaactcctcaaaagaggtctgaaaaggaaaaaggagtagcgagataacgaccagaatcaggaaatgaaccggttcgaattgaaataccagatgggaggtatctccgaaaaagaaagggagggccagggtgatcagggataaaataccccagacggcagcaccgaaaaaaatcctgccccaatctatccgttgccggccggttacgatatctgccgtttttttatgatggatatatttaacacaaaataagatggtgaagaaacctacggcaaaactgagtaaggttaaagccaaccctgtattcgtacttgtggctgccgatatatcccctccttgcaagatggaagggtcttccataatcatatatcccgccaggggaagactgccgatttgtgttgcagtgaaaataatcagtaacgaaaaaatgtagaaataccattgatttcggccggagtaaactttttctaggaacatcggtaaaaaattaaaaattagaagttgaagagcaaatgcctcattttagcatttgctcgagtgaatattcgtcggatatcaacacttgccgggctttgcttccttcgaagggaccgacgatgccggctgcctcgagttggtccatgatacggccggcccggttgtagccgatagaaaaccgccgctggatggaagaggtggaaccctgttgggtgctgactacgagccgggctgcttcttcgaacaacggatcgcgtgatcccgggtcgatgtcgttgaggccgttcccttcgttttcaggtacatattccggtagggcaaaagcactcggatatgactgttggctggcaatatggtgggtgatcgcatctacttcgggagtatccacaaaagcacattgcacccgtgtcatctcactacctaccgatatcagcatatcaccacgtccgatcagctggttggcacccggtgaatccaggattgtccgggagtcgatcatggaagcgaccttaaaagcgattcgggccgggaagttggctttgatcaccccggtgatgatattcgtagaaggccgctgggtagcgatgatcatatgaatacctacagcacgtgccagctgggcgatccgggcgatcggggtttctacttccttaccggcagtcatgatcaggtcggcgaattcatccacaaccaccacgatatagggaaggtatttatgtccattattggggttcagttgtcttttgatgaatttttcattatattctttaatgtttcttacctgtgccattttgagcaggtcgtaacggctgtccatttcaatacacagggagttgagcgtattgactactttagcggtctcggtgatgatcgcttcttcttcatccggcaatttggccaggaaatgtttttctatgatagaatagatactgagctctacttttttaggatcgaccatcacaaacttcagttgggacgggtgtttcttgtaaagcagtgaagtgatgatcgcattcaatccgaccgatttaccttgtccggtagctccggcaaccaaaaggtggggcatctttgtcagatcgaaagtatacgtctcgttagagatggttctgcccaaagctaccggcaaagcgtatttggattcctggaatttcttggaagcgatgataccgcgcatggagactacctccggattttggttcggcacttcgataccgatcgttcctgctccgggaataggggcgatgatccggatgcccaaagcagaaaggctaagcgctatgtcgtcctcaaggtttttgattttggaaatcttgacacccggagccggtacgatctcatacaaggtgacggtcggaccgatggttgctttgatcttggtgatttcgattttgtaattacgcaacgtttctacaatcctgtttttgttggcatccaattcttcctgggtgactttcggattaccggaggaatgctcttcgaggagttctaaaccgggatattggtaattggacaggtcgagggtcggatcgtaatcttcggtcggctggttctgatcgacggtttcttcctgatccttattgctgatggtcaaggtgatgtcctgatcgtttccggccggtaagtcggtatctccttcttcttcatcatcggtagacgattttgctcggtcatccgataaatccgatagttcctggctgaattcgaaatcgttgatagaagcggacatgcggttgaaaccttgttgcaaggtgattgcttccggattttgatccgttgtttctttcggtgctaacaaacgctccggttgactggaaaaatcggtatcctccggttggaacgtaccgtcgttgtcatggggaaaatcctcttgttcttcgtctgcgttctccttgtcggaatcgcttgttgtatcttcgtcttcgggatcttgttgtgcgtcggcttgccgttgtgcttcttcacgggcagctgcagcacgggcttcccgttcggctagtgcggccagtgccttttcctggtgacggcggatttgttctttgatataatcgacacatttatagaaagtccgttcgaatccgaaaaacagaatggcgataaaagtgaggatcagaatcagcatagtcccgatacgtcctaccaatgagttcaaccagacgctgacaaaatgtccatggcctccccccgggaataggtagcctgtgccgacttcgaaaagattggaaatactctccgagagaaaacccaggaataaagagatccaaagaataatacacataccgatgaataacctgcggctgaagttttttactttgatactccccagacggaaactgcataataataaaagatagcaaagaatgaaagaagatataccgaaccaccggttgatcaataggtccgaaatccaggctccgatctttccggcaggattactgacttcgatttccggattggtaatgattttcccccagggaccatcgaccagactttgatcgatacctcccgaaaagaagaaaccgatcagggcgaagagaatatacaacgataccaaagccaacgcaattcccagaaggatacgtgtccgttgttcttttaaaaattccggtagcaaagaaacctgttttttctccgttttggaggaaacaggtttatgttttatttttttcatctttacaatttttcagcctacgaaggtacgaaaaattgaaaatttatcttgcttttactgatacaaaaatcgtttaatactccgtttcggggttttctcgaactcttcgttatagagcttgtaagtattcagctggctgtaagccgggagctgttggttgatttctttcaggttggcggtcatcagttcgtccagtttctcatcggtaattttttcttcgtttaccagatcgaaatcggggtagatcagggctacgagttttccttctttttcgataacgatggattcgctgatatagggcatgttgttgagtttatcctcgatttcttcaggataaatgttctgaccgtttgagctgaggatcatgtttttacatcgtcctttgataaacaggtagccgtcttggtcgatgattcccatatctccggtatgtagccagccgtcccggtcgatggcggcagccgtagcttccggatttttgtagtaaccggtcatcacacaaatccctttagccaggatttcccctacgatatgttggggatcgccggagtcgatccgaagttcgacacgaggcactgccttgccacaggagctctgacggaaagttttccagttgtcgtaagtgagcagaggaccacattcggtcatgccgtatcccaccgtgtaaggaaaacgaatcgagcggagaaagatctctacttccttgttcagggctgctcctccgatgattaattctttgaattttcctccgaaggcgtcgatgaccttttgccggatgctttccctgattttatcgttgatgatcggtatgttcatcagtaatttcatatgcggtttctcgatggtcgggaaaactttcttcttgatgatcttttcaataaccaggggaaccgtaatgatcagatcgggctttaccgtggcgaaagcatctgctatgattttcggtgacggggtacgggataaaaaatggatgtgggtcccgttgacaaattggtaaataaattcaaaagccaggccgtacatatgagccatcgggagcatacatacgatttgttcacccggattgatcccgtaggtatcgatggcaaattgcaggttggtccacaagctacggtaaggcagcatcactcctttggaagaactggtggtgcccgaggtataattgatcacggccagctggtcgggcgtatcgtattcgtaatgaacatcttcggcacggaaacgatcggggaatttttttccgaacagttcgtttaatctggctctggcttcggtcagttgcttactattcgaggtgcggagcgagtaatcttcgatccggagtacgccgtcgaggtcgggcatagccgattcgtcgagattttcccagaccacatctccggcaaagagcaaacgggcttccgaatggttcacgatgtgatggacattatcgggtttaaactcgttgagtatgggtacagctacagctccgtaagaaagtgtggccagaaaagcgataccccaactgctggtattccggctgcaaagagcgatcttatcccctttacggattccgcaatgttcgaaaagaaggtgtaatttctcgattttacgggctacatctttgtaagaactggtagctcccttaaagtcggtcaaggcaggcagatcccaatgatctttaatgctctgttcaatatattttataaaattttcttccataatcatgggtttatttgagcaaagatagaattttaggtattaaaccggaaacgttggaagaaaaaaatgagtccgtatttttctattttattgatacagataacgttttatacttcgttttggcgttttctcgaattcggtttcctggatttttaaacgggcaacctggctgtacatcggcagcatatggttgaggagtttacggttttcgtccattttagttttaagctgctcagggctgatcttttcttttttcactacttcataatccggatagacgagggcgattaatttaccgtccttttcaatgaccagcgattcggaaacatagggtagggcattcagccggtcctcgatttcttcgggataaatattttgtccgctgggacccaggatcatgttcttacttctgcctttgataaagagataaccctcactgtcgatagttcccaggtcgccggtatgcaaccagccgtcttcgtcgatagcggacgaagtggcttcgtggtttttataatagccgtccatgacattcgctccccgcactaatatttctccgacgatattttcggggtcggaggagttgatggcaatttccatccggtcgacagctttaccgcacgaaccggctttgaaggtgtgccagtcgtcataagaaatggccggaccgcattcggtcataccgtaaccgacggtgtaaggaaattgtacggaagaaaggaatttctctacttcgaaatttaatgctgcgcctccgatagcgatcagtttgaaacgtcccccgaaagcattgacgattttatcccggatcgacagccttaatctgcggttcagataggggattttcaggaatagcttgatatgaaatttttccagttgtggcagtacccggtgtttgatgattttctcgataatcaagggtacggcaacgatcaggttgggacggacagccgaaaatatttcgttaatgattttcggggccggagttttggagataaaataaacgtgtgtaccactggcaaagggatagatcagttcgaaggccagaccgtacatatgagccatggtcagtatggagaccagccgttcgcccggattgtagcccattttgtccagggcatacttcaggttcgaccacatactgcggtaagacaatatcactcctttcgaagcgctggttgtaccggaagtataattgatcatggccagctggtcaggttgatccggctcgtaatggatatcttccggacgcagggcggcggggtatttttgcctgaataactcttcccaatgtccgtgagcttttgccagtgccggattggtattatagaaaagagaatagtcctccatcttgatgacggtttccggtttcggcatttcttctttttgcagttcttcccagatgggagtaccggcaaatagaatccgggcttccgaatggttgacgatatggcggatattgtcggctttgaattcgtgtaaaataggtactgctactgctccatacgaaaggattgccagaaaagcgattccccagttggtctgattccggctgcaaagagcgattttatctccccggcggattccgctttcttcgaataacaggtgcaaacgggcaatatggtgggctacatctccgaaggtatgggtttggccctggtagtcggttaaggccggttcttcccaatggattcggatactatgttctatatagtataaaaaattctcttccatcttgttatagattgatgagaaaacgcatctcaggtccgggtggaatgtgcttcagcacggtcgtgtttaatttcgtccataattccaccgttgagggggctcgaggtgcgttctctgtgtatgtatactgaatagggaaaagaaggttacaaaaaagaggtaaaaggtagaaagtaaaaagtataaagttaaatattgtgagaagtcgaaactaaaaaacgacggtgggcgtagttattgacgagtgaatgcaaaaagctcattattattacgttacaataatttaactttattattatgaaaacagaaaatccaaacactccaattttcggaacacctgaagaagcccgtgtagctcctaagtttgaaatgcctaaaacctctatgccgggagaggtggcttatcagttggtacacgatgaagcgatgatggatggaaatgcccgattgaatctggccactttcgttaccacttggatggacgactatgcccgccgggtgatgaccgaaaatatggacaaaaacatgatcgataaaaccgagtatccgcaaactgccgagatagaaagacgttgtgtgaacattatcgctaaattgtggcattcacccgaacctccctattgtaccggtaccagtaccgtcggttcatccgaagcttgtatgctgggaggtattgctgccctgaaacgctggcaaaaacgtcgtcgtgccaaaggtttgcctaccaataaacctaattttatcatttccacctgtatgcaggtcgtttgggaaaaatttgccatctattgggacgttgaaatgagaatggttcccgtgacgatggaaaaaattaccatggatccgcaggatgtggtcggtatgtgtgatgaaaataccatttgtgtcgttccgattcagggggttacgatcaccggattgaatgataatgtaaaagagatcaacgatgccctggataaactgaacgcagaaaaaggatgggaaatatgtattcatgtggatgctgctaccggtggttttatccatccgtttatcgatccggataccgtttgggatttccgtttgaaatgggtgttatctatcagtgtttccggccataagttcggattggtatatccgggtgtcggttgggtggtttggaaagataaacaatatctgcccgaagagatgaactttgccgtgaactatctgggagccaacattccgagtatttctattaacttctcccgtccgggcaatcaggtattggcacaatactaccagttcctgcgtttaggtatggaaggttaccggcagatccagcagaattgtatcgatgtatgtctctatctgaaacaacagttaaaagagatggggatctttgaatttttcagtgacgatatgcctaatccgttgtttatctggaaactgaaaaatgattcttcccggaaatggacgttatatgacctttcggatgctttgcatgcccagggatggcaggtgccggcttataccatgccgaagaatatggaagatgtcgtgatcatgcgtgtcgttgtacggcagggaaccggtaaagacctggccgatctattggtgaaagatattaaaaccaatattgcccagttgaatcaattgcaggaaccgactaatagcgctattttgtggaataagagagaaccacaaaagcccagaggatttaatcactccagataatctcttttagagaaaagaaggagctggtccccaatgggaccggtgttcctttcaagaatggataggcgtaaaaggaatcgacaaaattagaatgatcggtacgaatggatcagagccgcagattcgccggtcaaaattctgaaagaattcgctaacccaatttgtaaaccgctaatctatctgaaaaactttgcagacagattagcggtttttatttattctgtcacacaagaaagattcagatattcaaaccagttgatattggttttacttagaaggtaaattggggataagcctaataaaaagtaccataaaaagctccgtttgccttccatctggatgcgggaatgaataaggatatgatgaaattcaattatcaggccgaaagaattcatatcgataccgtttatccgaaatgtaagagtcgggctgcttaccgaggaaaagaggataaagattggtatttgtatccggcaaagtttgcaggtaattaatttgggggattacgactttagataaatcgattgtttgcatctttcgtgtaattccgggaaaaactcccggaatattttttgtaatcgttctccgtgctcctgcataaatagcggcgtttgggcaggatcgatctgcaatccccggtagcgggtcatgatttccagggattgctggattcccgttagggaggcataacggcacaatcggtcagtcaggatgaaatgccatatgaacccctgaaaacgttccggcaggtggcggtagttccaggctaaggcggtataaaacctccggctgaaccgtttgaggggaagaccggcatagtcctgaaaccggctggccaggaaataatcgaacaagatgtcgttcactacagccgaataacgcccgaaagtttcccggcctatccctacggcttcccggaccaacggatgccggtccgagaaagcatcgatttcgcggtgtaacaaaattccttgctggaatttccggggatattgtttatacccgtcccctttgaccccatccccgataaaattaccgatctgaatacaacggtcattacccgaaaggaaaatgtgggcgagatagttcataattcgttcagcttatttgtaaaggacaaatttgcacattataaacgatactaccaaagcccctttgcgggttaaaagctgaaaagatcgttcaaggcctcactcatagaaggatgcgtatagatctgatcccggagcgacgaatagtctagtccggctttcatgaccagggccacattgttgatcacttcgcccgaatcgatacaaaacagggtacatcccagaatttttccgtttttggcatttacgacagatttcaataccccgttggtattacctgatacccgcgctcgggggatggcctcgaccggaatggttttggtcatcacttcgtatcctttggcgatggcttcttgttctgtcaaaccgatgcgggatagaggtggatcgataaataccgtatatacgacaggttcccggtcgacaatggtccggctgcctttaccgaacagttgatcccggataatcctgtaatcgtcctgggaaatataggtgaattgtttccctccgctgacatctcccaacgcccagatatccgatgcggttgtttgcagatattcgtttacgatgatcgctccatgttcgtttaaatgtattccggccactcccggatcgaggctttcggtgttgggctgacggcctgtcgctaccagaacagcgttggcaaagaggctgtgttcggttttatcggtcgtatcccgataggtcactacggtctcttcgtcggtatcctggatcgattgcatttctatactgaaatgaaattctattccttggttttccattactttccgtacagcttcggcaatggttctgtcttcgcgggataaaaattccgttgtgttttccaatacgattaccttacttccgaaagccgcaaacatagaagcgaattccaacccgatgtatcctcctccgatgatgaccagggtttccggtagcaggtccagttccaggagtgaggtactggtatatacccgtcggctttcccggatacctgatatcggcgggatcaccggaagagctccggtatcgataaagatccgtttcccctcgatctccagacggtctgtttcggtggttacctctattttacgggatgagcggaatgaggcgactcctgtatataccgttatattcggatggtcgttgagccggtcgaaatttaattttcgtaaagcggtggtaatttcgtttttctttatgatagctttccgataagctgctgccttttcttcaaaagaagccagattcagttcctttatcatttgggcctgatggatcaatgctttggtcggaatacaggcgatattgatgcaggagcctccgtacatcgcagccgaacgttcgattatggctacttgctgtccccggttagctaaatcagcagccagtagtttacccccttttccaaatccgataatgattgcgtcaaaatgttccataaaatgggtgattgattaaaatttacagaaatctccactacttacgaaaatcaaaggtgaattgtttgattactccttagaacatcccttccgcgattatcgtatacagcagacaaacgatcacataaaaatgaaaaatatgaaaaccagattgattctttttattttgttattcatcagtggctttgcaatagccggttgtaaacaacaaaaccagtatcgtcccgatgcgaaaatcgttgcggcatttaataacaaatatcctcaggccgataaagtagagtgggaacaaaagcaggggtattatgtcgcagaattccgggaagacggtatcgaacacgaggcttggttcgacggaaccggtaaatgggtgatgacggaaagtaatctgaggtatagttccctgccacaggccatccgcgaacaattcgagaaaagtgtttacagtacctggaaaaaagacgatatcgacaagatcgaacgggctggaatggaagcagtgtatatcatcgaactcgaaaaagaaggattggataccgacctgtattatgtcggtaacggcaatctgatcaaaaccgtgaatgaagtgtctaaagagaaacggagttcttatatgcctgtcgcttcggatatccagatttggatcaaacaaaaatatccggatgctaccatcattgaaatggataatgaaaaaggtaaattggaagtggacatcctggatggaggaaaagctaaagaattgatttttcagggaaacgattggttatcgacttcctgggaagtgagcaaggccgaagttccttcggtagtaatggaaactttccggcattcgaattttggaaaataccgcatcgacgatattcatttttatgagacgccgaacaattcgtattactatttcgatctggaacaaggaaattctgaagtacatctgtctatcgatcctaccggaaatatcctacagtgatccgatttatcgggacgatgaaggttaatttataaagtctgtaaagtttatgaagtccgaagaatccgatgactatataaactttacagactttataactctgaatttaattggaataagggtcccgctttacgcatgtgtgtgtgtatgtgtgtatgtatgtaagaaatgcataagtagaatttatcgtgtgaaatatcataaagagtgtatgaatcgatttcacctgattagaagataattccgcgggaccctgtctttttatgcagcctgtttctcttatatctggtcaattcccggcgacgtcaccggaagaatcttttacgtccaaaacattcaaagatcttgaatactaatgatgtagaaaaatggaaaaagttattttttgaggaaatttatttatcgaaaagtccgttaccggctaatttaatcgacgtttattttcttctcaaaacaaacaaatatttcctttttttaacattattaagtaactcttattcagtcaataaagtattttggttttgtgacctatccctttttacatctaactatttaaacgtccattttttattgcaaggaactgtttgaaacagtacttgatagcgatgacaaaaatagtttattttttattattcgccaaataaatttgttgatttcaattattttctcttgaaaggctttttgaaagccggccgctctatttttgtttctatttaatttatctgagtttgttaatgatattttttgtatttattattgtcgacaacactaggttgattggacggttgggaacaaattttcctgtaccggtggaggtatttcctgttgctctgggtcgagcaggaaataagaaaattaggggctacggaaattatgctccggctggcaaaagggaaagacggaccggtggtgacagaaaacataatctggttctggatgttcgtttccgggacatcggtcccgcatcggaaaaagatcaccggtgtcgtggagagtggggggatatcggcccgaagtggtagttactgggtgagagtaggtggaaataaacttttctgggatgattacgtacaataaattcgatgagatcgttcatttgtaaacttgtatattggattatgttgaagttgtacgtatttattttatgggctttattgccgttactgactatgggaaagggaattctgattcaaaatgtcgtgattttcgacgggaaaagtgaaaagaccgtcacgggaaatgtatggatcgaggacaatgcgatccggaaagtatcggccgaaccgattgttgccggagcagaagtagaagtgatcgatgggcggggaaaatttctgatgcccggattgatcgatgcacattggcatgcttatctggctgctaatacgatggtcgatttgttgaccgctcatgcttcttatacacagctgagagccggagaggaagccgggaagactcttttgcggggttttacgacgatccgggatgcggggggaccggtattcggactgaaaagggcgatcgatgagggaacactgccgggaccgcgtatttatcctagtggggcgattatttccgaaacaggcggacatgccgattttcgtatggtatacgatatccctgagcctttcgattgttgcggcctgactcataccgagaaaatcggggctgctatcatcgccgacggggtggatgccgtgatcgtcgcttcgcggaataacctgcgtctgggtgcgagtcagatcaagctgatggcaggcggaggggtctcttcgttgtatgaccagctggaagatgtgcagtatttcgaagatgaactgcatgcggcggtaatggccgccgaggatgcgggtacttatgtgatggtgcatgtctatgtgccggaggcgatccgccgggctatccgggctggggtgaaaagtatcgaacacggtcaactgatcgatgaaccgacgatgaaactgattgcagagaaaggcgtgtggttgtcgatgcaaccctttatcggagaaggaaataatcattataccaatcctgtacagcaggcgaaacacgaactggtggtacaaggcaccgaccgggcctatcagctggcgaagaaatacggggtgaagctggcatggggtaccgacttgcttttcagtccggccaatgcacggaatcaaaacctgaatatcgaaaagatgacccgctggttttccaactttgaaatcctgaagatgatcactcacgataatgccgaactgttggctctgtccggccgccgtaatccttatcccggtaaactgggggtgatcgaagagggggctctggccgatctgattgtggtggatggaaatgcactcgaagatataaaagtgctgaccgatcctggcaagaatatgctgttgatcatgaaagacggcaaaatatataaaaacgatttataatatccgctaccccagagccttttagaccgggatttttccccggttatcgattaaacactgctttgtatatttggaaaaaacagagcagtggttaatcgataaccgggagatttatgtgtgtagacgatacagataatcggggtatccgggtagttttgtcttctagatttcaggatatgaaggcagaaagaaattatcttgtagagaagatataattggggggcataaaattggatttatgttaggggataacgcaagaacagactggcaacggtaagggaaccgaaatttacttgtacgggattgaatattcccgccctttggggcgaacggtatgtatttccactccggaaaagagggggcgtgcgatatgttttctatgtgcagagtctggaagtataagtctacaactctatcatgttttggggatgatcctttgtggtcttcagacattcaatctaaccttgcagttaatgaaaaaacgtatggagttatcagtaccagattctgatttacgacagcatgaagatcgtagtgaaagagtccggtattccggttatacatgtctgtcacaaatgaggattcgaatacattttctgataatttttgttcgatatagttgtttgttactgcaattatttattatatttaaggcataaatataaattattattatgcgtttgaaattggtacttaaaattgtggaaggaaccgttttaccttgtaattatatgtatgaattgtcaagttgtttgtacaaggtattgaatgaaggtaatccggtttttactgcctggctacatgataaaggatattgtaaggaaaagaaagcatttaaattatttaccttttcgaatttctattttccgtgtttcagaatcgagggggatcggatttttgttttggcggatacggcccagttgattgtgtcgttctatccgatagaagcaattgatgcttttgtaatgggtctgtttaagaacaggcaattggaggttggtgaccggaaatcgagggtccgctttgaagtctttaacttagagcggcaggctgagccggaattcacttcccggatgttttttaaaactctatcgcctatgtttattgaagagcaattaccggaaacccggaaagcgatacatctttcaccggggaatccgaagtttgcagaattgttgcatttgaatctgctggataaatacagggtgttttatggacaggaacccgatccgtcctggcctctgacccgcttgcatttgttgtctgagcccaagcctaaaacaattgtgctgaaggtaggtactccggaggaaaccagaatgaaaggatatactttccgctttgagctggaaggacagccggaattattgcgtctgggttacgaaggtggtttcggacgattgaacagccagggattcggttgtgtggaagtgttgaaacagtgataataagtttagtgtgtgtggtgtttgagtttttattctgttgtaaacgggaaaacaaaacttttaactccttgtttgggtatccaggttgttttgggtgaatttgtaatagtagtgggatagaattgaaataacccgccgatgtccatcgggataccgtaggtacttattttaattgacctaagtagatttttacagaatgaaaataaaacaataatatgcttcaggaaattaataactttatgaatagtttgcctgctgagttaaagcaggcggggctgaagcctaaagaaggactgcatgttttgctgaaaatccaggaaaaggagggaactcattttatggacgaacagtctgtctgccgggtttgtctgacccggaaagcgacagaattcgattatccttttttacagcattgtgctgagctggctcaggtgggatggtgtgtgaataccaataaatgtttcgatcttccggctaaggggctgcattcctgttctccttattgcattgccttgaaacgggaatctctggaaggaggaggaaaatatgcgaaagataagactaaaatctacgaccgtatcgatacttattttgctaatgctttatcctacgtcgaagaggatagcgagaaagaaagaataagggtttttcagcattttatcaactccaaagagaaactgaatgctttatttgcctgttttcagtcagaggttgatgaagtcaaggataaggagtacattattctttatttggaggaggagatggaaaaatatcgccgggttcatgaaaaatatttgtcggacaaattattcaataccaatgaatacaatatttcggtagaaaatcaactctatgggaccagcgatttcctgaatggatttccaactaaaaagccttttttatcccatcagtcggctgttttcgatattgccgggcggattaccggagagatggctggaaatctccatgattttcaggaaatcatgcgccggaatgttttaccccgtcctttgccgttgtttgtttaccgggaagagttgcagaccgaaatgcttgcggttttctcccggtatttggcggatggcaagaggatcggttatcaggagatcatacgggagctttataaaaatcatcaggacgatatcggtgattattatttattgtattactatggcgatacggtttgtgatttcgattttgtttcccgtttccgctatcgtttgcagagtggggataaagaaggttggatggtaaaagatcattttcagatcggttttacggagaaaataagccatgtatttgagttggaggaaaaagtgttacgcgaaatatttaataactcgttgattacacgaacgaaagccggagatacacaacgtaaatatttcgatgaattagaaccgaaatactgtaaatcggaaaataactatttattggtattgaagtatcggcaagctttttatgattatatctataaatccagattacaggctgttacccgtcctatgttcgatcatattttattgaccggtattttggaggatatccgtttggatgaattaaaaggaaaccagcatacccaacgctgggggattttgtctaaaatgaacatttggttcagtttggctgaacgttttgatttacaatttaaaaatacagatactatggcaagtaaattggaagaacagagagtgtttatggttgccttatcgcaaggtgaggctatattggaaaacgacgaacaatatgcttttgcagccggacaggtgatttactatttattacataagagtaagacggcagacaaaagttataaacggctggagccttttttgcagcaggtgcacgcctctgaattgaataaagcgattgcccggcttttcgatacctataagcatgagaatttttcaggcaatttccgtcatccgtttgcatcggttatggcctatcagacccaagcgaatatgcgggactacctgcccatgatgctggccgggattttttcggataatctgctttttagcgttaataaatcagaagaaacaaatgaagaaaactaacttaaaataaaacattatgagtaatacatttaaaaacagagtgtttggttgtgtggtaatcaaatctgtcaattccaattataatgcggacttttcacatcagccccgtactttgcccgatggggcggtatatgcaacagataaagcattgaaatataccgttcggaattatatagataaaaattatccggaagacaaggtattttattttaaaagcctgaatggagatatgcagccccgggatttagaccagaattatgcccgtttcttcggcgattatccgaaagcggataagaaagaggcggtcaaggcgcgtaaagtgattctgggaaatttgttgagctgtctggatgtacggttatttggcggaacttttgccagtaaaacggccaatttgtctattcatggtgttgtacaaccgacgcatggggtgaaccgatatgtggaagggattatctattcagagcagattgcttcgcctttccggaactccaatgataatagtacggattcgatgcaaacgactttaggaacccaatttaaattacaggaaggccattacgtacatcatttttcagtcaatcccggtaatttagacgaactgactgaatttgtcgataatggaagattaacgggggaggatattgccaaattgaaagaagctttacgttgcggagtgacatattatgattcctcttccaaggcaggaacggagaatgaggccttgttgtgggtggaattgaaagaagagtcgaagctggtattaccctctttcgtggatttgatagaggtaaatgcagaacgggaaattgattttgcgaaagtgagtaccttattgtccaaagaaaaaatcaaaaatgagatctcaaaaattgaattgttttacaataagggaattacaaaagtgattcatctgccggaaggaacggtcgaacttgaattgaacgggttatgaataatcaacgactgatttcatttgatatacaggctgatttcggtttcttcaaaaagcccgattacaatgatggggtgttgctgacctataatatgttacataagcccgccctgttaggcatattgggggctattatcggtttgcggggttatcggaaaaaaggagaatggccggaatattaccagcggttggctgccctcccggtgggaatagaacctttggaggggagacatgagaaagggagttttcagaaaacgatagtcaagtatacgaatacggtcggatatgctaatcaggatggtaacctgctggttgaagagagtatgctgattcgtccggcctatcgctgctatcttttgttgtcggaagagcatccggatcaccggaagttgtacgagtatatccgggaaggatgggccgagtatattccctatttgggtaaaaatgaatatccggcctggttcggagattcgttccgggaatatgcttttaaaacttttgtaccggaaactgattttcgggtttcatccttgtttatcaaagaaggagtattgaaaggacagcaggtaaaggccagtttttcgttttcgctgaaaggcatagtgaatcgaggtagttttgtgtatttcgaacgtttgcctgttggttttcatccggttctgatgcaatatgaattggccgacttcgcttttacggattggaccttacaggctgccacgcagatggtaaatttgtatcagctggaagaggaaggaaagattgttcaattgttttgaatatgaaagactgtaaagaaataattcagggccagatggagtcattgttcggcaggttgaaaaatgattcttatctggcacatatttgtcccggaaaatctgccgaatctttgcaggaacatacggccaaagtggttgaaagggcttgttggctgatcggcaagcacggtttggagaaggtcgtcgatcgtttgattccggggattgccggaaaatactcggagaatgtgcaggaagagttgaaacggatgtttatggcggtgtttgtttttcatgatacaggtaaggtaaacgataattttcaatattccaggatgttgaatcggttgtttaaacatcggaagacggaaatattggtacctgcctatggacattcgtttttgagcgcctggctgtttctggcttttgaattggaccgtgtgtggcaagatccgtgcctgacggaggaagaaaaaaagatgctgtttgtctatgcttttttctttgcctatgttatccggcagcatcatagcggcggtttgggatgtgccgatgaggaggagttttttaattcatttgccgggggatatgaagaattgcatacttatctgacggtttggggatatgaaggggattttacttgtgtcgaagctgtattcgagcatattgttgctatccgaaaggaaacggatgcgcaacgggaagcttcttttgctttgtatgcgctgattaaattgaattcttctgttctgacggctgccgattatctggcgactcatgcatatatgactgggagacaggtgaaagaggccggaatttttgaagaccgtcaccgggtagaggaaatgatcgggcatctgcgaaattacaagcataaccgggggatatatgaacaattggataaatttgtttttgagtatccgcaggaaaaatccggtgatcacttgaatcggctgcgaaccggaatggctgtggaagtcatccggaccgttcgtgaacattctgatgatcgtttgttttatattgaggctccgacgggagggggaaagacaaatttatccatgctggcggtgactgaattaatggccgtccatcctgagattcagaaagtattttatgtatttccctatacgactctgattacccagacaaatcagacactgaaaaatgctttgggcttgacttctacggaactggcggagttacattccaaagccggatttaatgaaaaaacggaggaaagagaggatggactgtatgcggataaaaagcaggattatatcgatcgtttgttcgccctttttcctgtgtgcgttatgtcgcatgtgaagttcttcgatatgttgaaaacaaaccggaaggaagcgaattatttactccaccgcctggcgaatgcggtggtggttatcgatgaattgcagacctataatccgcttttgtgggataaaatgtattatttgattgaacattatgcccgcttttttcaggttcgttttattctgatgtccgcgactttacctaagatcggtaaactgagaattcctttgaaggaaagaaccggatttgtggatttgttgcctcaggcaaaatcttatatgcagaatccaaattttgccgggagagtggagttcaggtttgagttgttccaggaagagatcgatatgaacgatttagcggattttgttcttgggaaatcagtggaatatcgggataaaccggggaagaacgggacggttcataccataatagagtttatcactaaaaaatctgccgcggaattttatgctttcatacaagaaaaggagcccttttttgacgaggtattccttctctccgggacaattctggaaccccggaggcgggaaattatcaatgagctgaaaaatccgctcagccggaagaaaaatatattgctaatcacgacacaggttgttgaagctggggtcgatatcgatatggatttaggatttaaaaatatatccttgatcgacagtgatgaacagttggccgggagggtaaaccggaatgcctgtaaagtgggctgtgaagtctatttgttccgactggataatgcaagtgtcttgtatggaaaagataaaagatatcagatggtccgggaacaaatttctgtcggtgaatatgaacgtattcttcgtgaaaaagatttcggatgtttgtatgaattggtttttgagaagataaattggatgaacgaacagacttatgtgcagaatttccgttcgggatttttgagatttgtcgaagggttggattttcaacaggtagatcgtaattttcaggtaatcgagcagcagaatgaaactgtttttgtccctataccgttgccggtagaagtggattcgatgacagaaggtgttaaagagcgtctgttttctgaccgggaacttcaatttctggaagattttggggttgtgccttgtgagggactgttggatggaaaggaagtgtgggaggtgtacgaacgtctcgtatatcgtgatcatcctgcaaaatttgatctggaagaaaaggtcggttttaaaatcatgcagcggatattgtcgtgttttactttttctttggttggttattcgaaagaattgcaggagttgaaaggggggacgggggaagaaaagttggggtatttttatttatcccattgggaagatgagggggtgaacggaaaattgtacgactataaaatgggattgaataacagagcattgaaagatataacttttatatgataaatgtgacaggaactttgattaatctttatcaggtgtgtaaacgggaaacgtggttacatgccaatggtatccggatggaacatacctcggatgtagtcacggaaggaaagctggtacatgagacttcgtatccgaaccgggcagccagatatgaagaagtgagaatcggtggttctgtgattgatttttatgatccgaaagagaaggtgattcatgaaatcaaaaaatctacatcgaaagaggaggcgtatatctggcaggtgaaatattatttgcttttgtttgaacgggaaggaatagccgatgtggtggggatgttggaataccctttactgagggagacgatgcgggtggagttggaagagggggaccgggaaatattgcgtcagatggaggtggagatccgacagctgatcggggaggaggcatgtccgcctgctttatccaaaggaaaatgcggagcctgttcatattatgaattttgttattccggagaaggggaatgaaacagggaataaatgttttttaatggacttaaaattgttttatgaaaaggacgtactatttatttaatcccgggcggttgagccggaaggataatacgctgaaatttactccggtagacgaagagggacaggaagggcaaccccgttacattcctattgaaaccgtagataatctctttgtattcggtagtttggataccaatagtatgatgtacaattttctgggtaagcatcaggtggcggttcattttttcgattattatgaacattataccggttcgtttatgcctaaagattacctgttatccggcaagatgcagattgcccagatgaagcaccatatccggcaggaaaaacggatggcaattgcccgaagttttatcgatggggcagcgtttaacatgttgaagaatctgagatattatacgaatcggggaaaagataccaggcaacagattgaacggatagaagcctatattccattgattgctactgcaaccgatattccgatgttgatgggaatcgaggggaatatccgtcaaacctattatgaggcatttgatacgattatcgatggtttttccatgggaaaccggacaaagatgccaccttccaatgaggtgaatgcgatgatttcttttgctaacagtatgtgttattcgttatgtctggatgccatttatcatacccaattgaatccgacgatcagctttctgcatgagccgggggaaaggcgttattctctggctctggatatggcagaaatctttaaacccatattggcggaccgattgattttctccatgtttaaccgtaaacagttaagggaatcggatttcgatcaacacttaaatcgatgtctgctaaagcaatcttctatgaaaaaagtagcccaggaatgggaagagaggacgaaagagacgataaaacaccggaagttgggaagaagtgtcagttacaggcatttgattaaattagaatgttataaactgaccaagcatttattggggatggaagaatataaacctttgaaaatgtggtggtaatgtatgtcattttagtatatgatgtcgatcagaagcggacggctaaaatgttgaaattgtgccggcgttacctttcatggatacaaaacagtgtatttgaaggggagatttcagaagtacagttgaagcaattaacatcggaagcccggaatcttatggatgaaaaggatagtttgattttctttaaaagccgggacgaaaaatggctggaaaaagagattataggagatgaaaaagccagcgtttctaattttttatagcgtcgaccttaaaaaaatgattgggggttgagagagtaattacaatagaaatggaataatagttctttgacatgttgaaaatgaataatttaaaagttgttgtcgaaggtcagggtaaatttaagaattgaaggtcgactgcaaatgtttgtaaaaaatgagaataaatggatgataaatcattgattttgaagtatatttgttggcgtttttaac

SEQ ID NO: 5910 - DNA, 1050 bp, Unknown
  gut microbiota DNA sequence
gtgatggtgaaatcttccgtggaaagcgtggaaagcggagaaggcctattgaaagtgaacatcaaaaacaagaaaggcgagatcgaagtacacgaggctgaaatcgtgttgtctgccgtgggtatcgccccgaacgtggaaaacatcggtctggaagaattgaatattgaaatggaaagaggtcgtgtgaaagtagacgactactaccgcacgaacgtggaaggcgtttacgctatcggtgacatcgttcacggtccggctctggctcatgtggcatctgccgaggctatctgctgcgtagaacacatcgcaggagtacacacggaacccatcgactataccaacatccccggatgtacctacacgacaccggaagttgcatctgtcggtttgaacgaggcaaaagcactggaagccggttatgaaatcaaaatcggtaaattcccattcacggcatcaggtaaagcgagtgcagccggggcaaacgaaggattcatcaaattaatcttcaatgctgccgacaacaccctgctgggagctcacatggtaggaatgaatgtgaccgaaatgatcgccgagatggtacttgcccgcaaagtaaaagcgaccgctcatgacatcatcaaaacggttcacccgcacccgacaatgagcgaggccgtgatggaagctgccgccgccgcttacgatgaagtaatccatatctaattggaaatggagaattgaaaattcaaaatgagaatataaaatgaaaatcacactactcacaagctctttattattcatcggagcgtcattatgcgctcaaacgatcggtgaaaaagaactgaatgacatcaaggggagcttccagaaagacgcttccacgaaagccattcagaacgtgttgaccaatgacaagaatatccgggataatgctcttaaccgggaaattcaaggaaaaatagaccactatttcaaatatcgggtaaaagtacagggtatcacggatcagcaaagctctggacgttgctggatgtttacctcaatgaacgtgttacgcccgagtat

SEQ ID NO: 5911 - DNA, 9582 bp, Unknown
  gut microbiota DNA sequence
acgaataagtaacaaaataattctaccttatatttataaaaaacaataaaaaacgttatcttgtcgcactgaaagaagaagacggatacggctcttcacgataaaatagaatagagatgtttacatttggattactttgttttacctcgttttttacgttgatcaatccgttaggagcgatgccggtttttatgaccatgacgatggagctggatgaaaaagaacgtagaaaagtggcccgccgggcttctttggtctcttttctcatcatgatgttttttgctatttcaggcgatttgttattccgttttttcggtatttccatcgatagtctgcggattgtcggaggaatcatcttcttgattatggggatggatatgttgcaggcccgtttggtgaaaaccaaggtgaaagaatcggaagtgaagagttatgtcaacgatatctcgatcacgcctttatctattccgatgttatgtggccctggtgcgattaccaacgcaatcgttatgtggaacaaagctaccgattgggaaaccaaaatgattatggtcatcgccgtagctgtggtgattactttggtatatcttattttaagaagttcctcccggattatcaagatactcggcgaaaccggcaataacgtgatgatgcggttgatggggctgatcgtgatggtgattgctgtcgaatttttctttagcgggctaaaaccgatcgtgatcgatattttgcgttcggtaggctgatcttttattcgaaaaataggaaaataactaaagtgtacaagttttttaagcgtttgcggagatattgttttgcccgttggcgttgtgtttttacagtagattcggcaatttgtaatttttctgtaatttcccggatgtccatgtgctccaggtagctcattttgaaaatccgccggcattcggaaggcaattcttcaatggcagcaaaaatttcctcgaatatctccgcttcgatctggtggcggaaataggtggcttcttcatatttgggagtgtccagacgttgttttaaaaatgtccgggtattttgcttctccaaagcattcagggctttggattgtacacagctgtacaagaatgatttcagagcgatcaggtttgggaaatcatagcttttctcatagaaacgaataaacacttcctgaacgacatctcttgctgcttcttcatcttttaatattttattggcaaaaaagcataatgcggcgtaataacgatgaaacaacaattcgaaagttttttcatcgccctctttgagtcgttgtaaaacgagcgtttgatctgtgatctccggattcatgtctggccctgataattcgacgatcaaatttatgactttatcttagaattttctctaataaaaccattaattttgaattccatgaatgataacagcatgttatatctcgttttattgggttttgcttccgggtttatcaatatgttcgccggaggtggctcgatgttggtggttccgtttttgatttttctcggtttgccaccccatgtggctaacgcaaccaaccgagtggctattcttctgcaaaatatcgtttcgacagctacttttcgacagaagaaaatattgaattttaaaacggattatcctttactgctccccactaccttgggaagtattttgggagcttttacggctgtcgacatccaggctgccgttttacaaaaaatgatcgggggattattggtggtgatgttttttatgattttgctggatcccaatacctgggtgaaatctaatattgaaaaagcaaaagcccggcatccctgggtacgttttttgatatttttggggatcggcttctatggcggttttatacaaatcggtgtcggtttttttatgctgggtggtttggtattgggatgtggttacgatttgctcaaggcaaatgctttaaaagtattgcttatcttgatctatactttcggggcactcgttatttttatctggtatgatttggtagattggcgtaccggtttgattctggcttgcggtaacatggcgggagcctggatcgggacccggttgagtgtgaaatggggagcgaagtacatacgttatattttattgcttgcattagtaatggtcgctctaaaacttttcggaatattttgattattttttcatcttttgtcatccttttgcttctttcaccggttttaatagaaaatgaagaaaagatgacctctaaaaaatatactcctcaggaaattgcccgtttgattttgctttgttggcacggagaagcagataaacagcaaatgaccgaactggaagaatggttggaagagagtgcagacaaccgctcgttttatgaaagcctcggggcccgttcatatcaaggaacagaatggcaagaatatatgaaatacgactcccggaaagattggaaacgggtgaaagtagcgatgaaacggaggaagcgtgttcctttccggtatttattgccgtatgctgcattggtactgatagcgatagggcttgcctggatgataaaatataaaaataccggaaaatctgagcagcctgtctcgatggttgaaactattcgtccaggtagttcaaaagcgcagttggtcttaccggatggacgtcgcgtggatttagaagtggataggggatgccagcaattgaaaggcgagaattttgtaaatgatggaaaacaactggtttatcatgaacaggaaaacggtaaaaggatacaatggcatactttgtcggtaccccgtggaggagaatacaaattggttttggccgacggaacccgggtgtggttgaatgctgcatcggaattgatgtatccggaccatttttcagcagatcagcggaaagtggtgttaaagggggaagcttacttcgaagtgacgaaagatgtgaagcgacctttttcagtcgttttgggggatatggaagtaaaggtactgggtacttcgtttaatgtgtcggcttaccccggcgttaagcgtcagacgactttgatagaagggcaggtggcggtcaattggcaccggcagcaggttgtcatcaggcccggccaacaggccgccgaaacggatgaaggactgcgggtggcttctgtgaatgtcatgaattatgtcggttggaaggagcaccgttttgtatatgaaaataaattattaggggaggtattggaagacctggaacgctggtatgatgtcgaagtgttcgtcatgcacgatgaaatccggaatttacatttgacagctaatttaccgagatacgaaaatatggataaggtgttggaaatcattgaatatgcggcttgtgtgaaatttgaagtaaaaggccggacggttgtggtgagacgggattgactcaagaaaaacaggaaagcgcgctaacactttcctgtcgataataaataacgcccttttggcgaagggtcattattcacttaattaaaacacgacaaatctatgaaaaaaaatcaagaatccgatgtcggaaaagcttccggtgtagtttggaaaatgtggttgactatgaaattgctgttttgtttccttctgataggattttctactgtctatggcaatgctttttcacaagtaaaaatcagtatttcggtaaacgaggtttccttgcaggaagtgtttgaaaaactgactgaacagacggggtatcattttgtgtacagtaatgaaatgttacaacggaccggaaaggtaagtgtagatatgcaaaattgtgatcttggacagattatggctgtatgcctgaaaaatacaggtttatggtatcggttggaagacaatatcattgtgatttctccgaaattcaggcaacctgatgttcctcagaaaaaaatcacccttaccgggaatgtaaaagacaaagagggacgtccgttgccgggagtaaccattctgctgaaaggttctgccgtgggagtggtgagtgatgtggatggaaatttcactctgacagtgccggaggaatcgggactgacgcttgtattttcgtttgtggggatgaaaacgcaagaagtagtcttaagcggtcagcaagtgttacatattgtcatgctggaagatgtgtctcaaatggaagaagttatcgttaccggttaccaggaagtcaagaaagagaaaatgaccggggcggtaaccaccatctcctccgaaaaacttagtgaccgttacactccgaatcttatccagaatcttgaggctcgcgttgccggtctgtcgacctacggcggcaaaccgattatccgcggaacgggtacgctctatggcgaatcggctccgttgctcgttgtggacggtcttccggtcgaaggctctatcgaagacctcaatccctatgacatcgcttcggtgaacgttctgaaagacgctgcagcgtcggctatctacggtgcgcgcgccgcaaacggaatcattgttgtaacaaccaagaatgcccgtaacaaaggcaagatcgacattgacttccaggcaaacataaccttgtatgaaaacaagaatgtcgattatcatgataacttcctgatgaacgccgaagaacaggtggaacgcgccagcgaatactatgactattatttcaaccgcaagtatgccgacgatccgagtatgacccgggacaaagtcatagagaatttcggaaagaacattaccgacggcgctcagataaaccccgtggcctatgcctggtatcagcacgcggcgggcaatatcggtcgctccgaactcgacaacattctcgctgatttgtcgaaaaacaacttcgcacaggatttcgccgacaacatctatcgtcgccaggtcatgcagcagtataacctctcgctccgtggtagttccgacaagttccgcaacaacttagtgataaactatcgcactgacaacatgggcatcatagagcataagagcaactggctcaacgtttactacaaaggtagttgcgaccttgcaaaatggctcgtggccacattctcggtaaacggcgtatacgccaatataaagcagtatggcaacgattacaacgttaatctcgacccgttctcctatgcccagtatcagtcgttctataatgccgacggctccgttaagaaactctattcatggtactgcggcaatgaatacatgccccttcaggaaggcatggaagatctcggattcaacctcgttgacgagcttagggataaccagacaaagacgcgccgtcaggaaatgcgctaccatggcgatcttctctttaagattatccccggacttacggctcagacccagttcgtatatgaagtcaactctcagaacgtccagcaacatgcgacacaggagagtcacgccgcacgcacaatcaagaatgcgtacgccaaaatggatacagagagccacaagctcgtttatatgactcccgaaaccggtggatttcttcagactactcataccagcggaaacttttggactgcccgtggccagctgaactacaccaacactttcggcaagcacgagatttcggctatcgctggtctggaattccgggagacgaaaaccagtggtgacaaatcgcttgttctcggatatgacgaacagcttcaaagcagtgctacccatactgttgatttcggaactttatcgcagatgagcaattcgccttactttcaaatgaacggctctcctttcccgtgcaaccagttcgcgttcacaccctatcttgaaaacggaatgggaatcgtgaaagaagttcgccatcgctatggttcgggttatttcaacgcaacctacacctatgataacaaatataacattttcggttcgtttcgaaaagactatgccgacatctacggtctcgacgccaagttccgtggcagacccctgtggtcggtaggtataggctggaacgcccacaacgagagtttcctccgcgacctgtcctggatggatttcctgaaactccgtttctcctacggtgttaccggtaatatctatcaaggtgctacctctcacatgacggcatcgtcgggtgacataaattcaacgaccaatctgcctgtcgcctccatttcatcgcccgccaatcctgacttgcgctgggagcagaaccggacgaccaacgtcggtctcgactacggttttatgagctatcgtttgcgtggatcgctcgactattacgtgaagaccggtaaggatatttttgccccgatcactcttgacccgacaaccggtttctcatcgatggttgccaacgtggcctcaatccggaacaatggtattgagcttgccatcggctatgactggtttgttcccggaaaccgccgtggattcagctggacaaccaacctcaccgtaacctacaataagaacaaggttctcgaagtggagaatcctgccactcgcgcctatgatctcgtcagcttaccttataagaccggttatcccgtaaatgcgctatgggcttatcgtttcgctgggatcgatgaccggccgggtctggtgggccagtcgatgtattacgttgagaatggcaacacatcgcacaacgcaagtagtgctagcgtcgacgttcttgaattcggtggtcagtccgatccgaaagcgatcgtcggaatggataatcagctgcgctggaatggcttgagtctcggatttctccttgtctactacggtggccacaaaatgttcgcccagcccaaatcggaagtgttcgaatcgtcatgggacagtccgctgaacattgtctatctcaattcctggactcccgaaaaccattccgatgttccgggtatcggcgaatatgcctctacgtcactgggcagtgaatgtcgtacggcgacaaactgtctctatgacgctgatttcctgaaaatccgtaatataactatcggttatgatcttcctgagcacctaacggaaaaagtcggtatcagtaagatttcactccgttttcagatcaacgacccgaaagccctctggattaagaacaacgccggaatcgaccccgagacactcggaatccgtaaacaggcatcgtatatgttcggcgtgaacctgagtctctaacatttagtaatatttaattttgacatgacaatgaaaacaagatatatcgtaggtctttttctggtgggagcttcggtgcttagttcctgttccgatttcacagaaatcgaccagaaaggaatgaaccttctctccaccactgaccagctcgagatgcttctcaaccaggagtataatatcagaattgccgatattcagcgtgtatgcggttcggtacagtattatcccggcaacgtagggactgttcttgccaatccggttaagacaacaacccagatccttctgaaatacgacgaggcggggcatgctttggaacaggtagacctgacttcgagcgacagttattatgcaaattgctacaactatatcggaacagttgccaatcctattctgagtcttgtggatgccgcgacaggttccgaagaaaagaaaacggcactaaaagccgaagctctgacgatccgcgcctatttccactggctcgctgccgtgaagtttaccaaagcctatgatccggctacggctgactccgagaaatctatcgcatatgttctggaaacacaggatatcaaacaacctaccgaacagcttactcagaaagaggtctacgaatacattctcgctgacctcgatgctgcgatcgagctgaacgcgcttccgcagtcggctgtaaaccgaatgcgcttcaacgccgcatgtccgcatgcgatcaaagctcatgtgctgatgtatatgcagcagcccggcgaagctgcaaaagaggcacagaaagcgcttgcggttaacagctcggtatcagactatgccaactactgcaccgaggcaccgagcagtgcgggaattctggtaaaaacattcgagacgccccaactggcacttgcccaagactattttactgataccgatgtcgaatttttctcgtggcttacaccgcgctactacgaacgttatgaacagaagaacattcagaaagactggtttgccacctatcacaccatgatgtggatgggtagctgggagacgacctctcaggtggtaaagggggcgttggaaagtatgtttggggttaccgaaggttccatgagctacggagtacaaggaaatggccgcgtcggacgaataaatctgagcgtgccgcagatgtatctgattctcgccgagaatgccatcaacaacaacctgatcgacgacgcaatggactatctcgacaaaatccgtgtgggccgcttctttccggaagactatcatgcgctgaaaggctcggtaacaacaaaaaacgatgccatagagatgctcagaaaagttgcccatggcgagaatgtatttaacatctacgacttcattactcttaaacgctggacactgctcagtgattacaaagaggatatcagctggacattctcgggtacgacttacacgttgaaaccggaatcaaccatctgggtgttcccgtttccgaagagtctgatggaaaagaacggtaatttcgaacacaattatccggttacccaaaactaatgattgatcgaccggttcggatctataggacccacaatcgtgtctaacagaatattggacaagccggacttatccggtttgtccgaaaaatcaattaaatcaaatgaaagcacaaaaaatcatttttcttgcaggtgtaaccgccatgttctgtgcctgcaacacaaagccggttggctatttctgcgtaagcggcaaaatttccgatgccgacggtcgggaaatctatctttacagaacttcaaacaaccgttcggctgcaacggtcgacacagctgtgatcgagaacggacgttttattttcgaaggcattcaggaaactccaatcggggcgacccttatgatgggcgacccacggaacgggaagaacaaaactcgtgtggggctttttgtggaaccgggtgaaatcgtcgtttcagggcttatgggctcggatttctctcatgctgccatagccggttcgctgtcgaccgaccagcaaaaagcatatgaaagcttgctccaaccgttcacagaacagataactcgtctgcatgagtcgataaaagtcgacccggacaatgctgccctgcgtgattcgctcgaaaccctccgggaaagtatgcagcaaacgagcattgactttattcgtaacaatggcaagtcgttcgttgctccttgggttcttgtacagattcagggaaacctcgactacccgacgatgaaagaactctatgacgctcttgctcccgaggttcagtccgaagctgccgggactaaaaaagaaatcgatgccttcgaagccgtgctgccggggaaaccggctcccgacctgataaatagaaatcctgaaggcaaggaaataaagctgagtgatctgaaaggcaaggttgttctggttgatttctgggccacctggtgcggaccatgcgttgcctcgcttccccacattcaggaactctacaacaaataccatgacaaaggatttgaagttttctgtgtggccgat

SEQ ID NO: 5912 - DNA, 5926 bp, Unknown
  gut microbiota DNA sequence
agtgttttgaaacaaatattattatatctgtgcttgtttttaggggtggcgaccctgaaagctcagcatgtagaatatggggtggcgcttgacaccaattatatgatgattggagatcaacaacatcttacttttaaagcgaaggtagacccgggagtccggattgtgttccctcggttacaggatacggttgttcatggattggagattatctccggtcctgtacgggattctgtaaaagaaaaggatggaagatggcttttggaggaaaaatatgtcgtcactgctttcgatacaggagtatatgttgtgcctcctcagcccattacgatcgaaagtcaggaatataataatattgttcggaccgatcccgtaggattggtggtgaatactttccaggtagatccgcaaaaggggaattacgatatcgttatgccttatgccgccccctggacttttgccgagattttgccttatctgttgtgggttttgttagggattgcccttattctgatcttctggttgtattgggaccggaggcggaagaacaaacccttgtttacgccgaagaaagaagagattccgccttatgtcatggctatccgttccttggatgaaatcaagggcaataagctttggcaggccggaaaagaaaaggaatattatacccgattgacggataccgtacgccaataccttgacggagagttcgctatacctgccatggaacagacctcctccgaaacaatgcaggccttggtaaattgtaaagaggtagaagccaaagaacgggagagaatagcagagatgttgacaacggccgattatgtgaaattcgctaagtttactcccttgcaggatgaaaattcccgttatctggatgccgcttacgaatttgtcaataacactcaccaacgggtagaggctgaaattgctcagcagcagaaacaggaagaagaaaggaaacgtcaggaagaagaacaacagcgaaaagaagctgaaaaaagcgaaactcccgaagacgtaaaagataaatgaggcgatcaggcactttgaaaagagtgtatgagttaatttgtaaactgaaataaaatgtttggattcgaatttgcaaacccgaaatatttcctgttattgatacttttagtaccaatgatcgtctggtatatcctgaaggaaaaaaagtcgcatgctgatttacagttttcttcattacaggcgtttaaggggatcaaacattccggccggatctggtggcggcatgttttgttcgtattggaattgcttgccattatcttattggtgacggccttggctcgtccgcagtccagtaatagctggcaaacttataccagtgaaggtatcgatatcgcactggctctggacgtctccacgagtatgctggcccgtgactttacgcccgaccgtttagaggcggctaaagaggtggctacgaaatttatcctcgaacgtcctcaggataaaatcggattggtggtttttgccggcgagagctttacccagtgtccgttgactaccgatcaggctgtattggtcaatctactccgggaggtgaaaagcggtatgatccaggatggaacggcgatcggtttgggtttggctaatgcggtcaatcggttgaaagatagccccggtaaatcgaaagtggtgattttgttgacagacggtatcaataatcagggagcgatagcacctgtcacggctgccgaattagctaaagctttcggtatccgggtatatacgatcggagtcggaacctatggcgaagctccttatcctgttcccactcccttcggcgtgcaattgcagaatatgcctgtggaaatcgacgaaggggtattacaacagattgctaacgtgaccagcggtaaatatttccgggcgacggataacgataaattacagcagatctattccgagatcgatcagttggagaaaagtaagatagaagtgaaacatttcagtaaaaagaatgaacagtattttattttcggtttgctgggtatgtgtttactgattgcacaggcagttctgaagtatactcttttaaggaaaataccgtaaaattatttggctatgtttagatttgcacatcctgaattattatatctcttgattgttatcccactgttgattgttttttatgtggtgatgatccgacgaaaaaagaaggcgatagcagaattcggtaatccggaattactcgggcctttgatgcctcttttatcgttcaagcggggcacgtggaagttcgttatgctgatgctggccttattgtttgtcattgtcggagtggcaggccctcagttcggttcgaaactgcagcaggtgaagaaaaaaggtgtagagttgatgatcgctctcgacgtttccaattcgatgatggcccaggatatcaaacccagtcggttggaaaaagctaagatggccatttcccggatggtagagaaattatcgaacgataagatcggtttgattgtatttgcgggggatgcttatgtgcaattacctattactaccgattattcttcggccaagcttttcctgtcgaatatcagtacggatatcgtaccggtacaggggacggctatcgggagtgcgatcgatctggccgcccggtcgtttacaccggaaaccgagacgtccaaagcgattattgtcattacggacggagaaaaccatcaggatgatgcggttgcggctgctaagcaagcccatgaaaaaggaatcgtaatccataccatagggatgggattggaacagggtgctccgatcccggagaaaggaaaacccggacaatttatgcaggacgcacaggggaatgtagtcatctccaaactggacgaacaaactttgcaggatatagctaaagccggagaggggctgtatatccgggccagcaataccgaagtcggactcaaccggctcctggacgaagtcaatcgtatggagaaaagcttgcttgaagagcgggtatatagtgattatgccgagaagtaccagtacttcctgttggtggggttgtttttcatctttgtggagtttatgattctgggcagaaagaataaacattttatgaagatcaatcttttcaaacgctaaaagaaaagacagagaatcggattgacgataataatgtacgaaaaatgatgaatgttatgataaagtctatgataataacggtggtgaccttgttggctgcatggcccgctattgctcagcaagaacggaaatttatccgggaaggaaacgaattattcgaaaaacaggatttcgaaaaggctgaggtggaatatcgtaaagctgccgataaaaaggcaaattcatttgaagcggcttttaatatggccgatgctttatataagcagaaaaagtacgatgaagctctggaacagttttctgctttggcaaaacaagaaaccgataaagaacggttgggcgaaatttatcataatatcgggaatactttgttagcgatggagaaaaccgacgagagcatcgaagcgtataaaaactcattaaggaatcgtccggcttctgaacaaacgaaatataacctggaatttgcacgccataaacaacaacaggatcaacagaatcaggatcagaacaaggaccagaataaagatcaaaacaaagatcagaacaaggataatcaagaccaaaataaggaccaaaaccaggatcagcaagatcagaataaagatcaacaggatcagaataaagaccgtcaagatcagaacaaagatcaacaaaataaggatcagcaagatcagaacaaagaccagcaaaataaagaccgtcaagatcagaataaagaccagcagaataaaaatgatcagaataaagaccagcaacaacaacctcagcaacagcagggtaagatttctaaggaggatgcggaacgtttgttagaggctttgcagaacgatgaaaagaatgttcaggaaaaagtgcagaaacaaaaagcacaggaacagaaagcaaagaaaatgaaaatcgaaaaagattggtaattttgcggcttaaataaatatggcaatgagacaaatcggattaatcatattgttatttttcacttcactggcttacgcccaaaatgtagaattcaaggcttctgctccttctgtagttgccgtcggtgagcagtttaagttggaatataccctgaataaagaaggggacaatcttaaagtgcctaccctggaaggattcgacctgctgatgggaccttccgtaggacaatctttttattcatcgaatatcaatgggaaaatgacgcagaatgtcactttctcctatacctatattttggaaggaactaaaaaaggtacttttcagattcccggagcgacagtgattatcgatggaaaagaatatacatccaatgctctgaaaatagaggtcgtcgaaggtagtcgtaattcaaacggtaatcaggcggcgacaaaccggccggtgcagccggatgccaatgctacggtcaatgacaataacctgttcgttaaagtcgaggtcagtcggcgtagcctgtatatgggagaaagtctgatggctacgattaaagtgtatacaaaggtcgatctggtcaatctgggcagaactaaatttccggatttcaacggatttctggccgaagaagtacccacgccgcaacgtatcgaattggttcgggaagcggtggacgggcagatttacaatgtcggaactatccggaaagtattgttgtatccgcaacataccggagagattacgatcgagcctttcgagttggaatgtattgtccgtcagcgtttagctaacggaggccgtagtttcttcgacgagtttttcggtaattacaaagatgtccgggcgatgcggagaagtaaaccggtcactattcgggtgaaagaacttcctcagcttgggaaacctgccggttttggcggaacggtagggaatgtaacgatggctacctccctttcggcggatacggtgaatgccaatgatgcgatcacttataaagtgactttccgcggaacgggcaacctgaagttattaaaagcaccgacgattaatttccccctggatttcgaagtgtatgatccgaaagaatccagagatctgaatattacggaaaatggcatggcgggtagtgtttcttttgaatacctgatcatcccccgttattccggagactataagattccggccattcggttttcttatttcgattcacaatcgaacacttacaagaccattgcgggggctgaatacaatatccatgtcagaaaaggagccgataaagggcaggtggaaacttcgaccggtaatcaggtgaagtcgttcaagaaagaagatgtccgtaaagtgggtgaagatatccgttacctgaaaacggagggattgaatctgaaggctgccggggtacgtttcttcggaactaccttatactggctggctttattgatcccgttcgtattgttcgttgtcggtgcagtcttgaaccgccggagaatcaaagcgaatgccgatatagtccgggtgaagaataaagcggccaacaagatggcccgcaaacgcctcaaagtggctgccagcgcgatgaaaaatcacaatgcagagcaattctacgatgaagtattgaaagccctttggggatatatgagttataaactgaatatcgaccgtgccgaattgaaccgggataatatcagtgaaattctccagtcgaaaggagtagaggaagacagaatcaaggaatttatcgctgtattggatacttgtgaatatgcccgttatgctcccggaagtaattccgatcaggaaatggggaaagtatatacagatagtattgatgtgattacaaagctggataaagccatccggtgattaaagattagaaactatgaaaaagatattg

SEQ ID NO: 5913 - DNA, 19789 bp, Unknown
  gut microbiota DNA sequence
cttgttacagccaagtggcttggaggaggaatccacagaggaaagaaagagtgatattgtatttaagtataatataagagccttctaatatccactatgattgctcaatcgaatacaaaagtatttgtttgtccaccatttcctcccatcgcctcagaccgtctcagacggtgcggtttgtttgtgcaaatttcattgttttctgcataatatattgataatcaatatagataaatttcttcaacgaggacgagtattgatacaaaagacgctaaaatgagctgaaacaatgaattacgaaatgaaagaccactgctaaacggtggcctttctcgtttttatctgcggcatattccggcataactgcaagtccggcatttcttttcgttatcggtttggcaaaaaggatgttccggggagaataattcttccagtaactgccggagatgatccgaaaattcctgctgataataccggaaattttgtatcagctctttatcacattttaaccggaaatcataatctttcccgaataacagtttggtactgtaaattccagggatcagaggctgttcgctgggatgaacatgatcgtacatcaggcaatacaccatggtctgaaaagctgctttattccgggtaggatttgccggatcgaaaaccgaagcgatagttttgaaagccgtcgtatcggctcctgttttgtagtctattacccggatgccttgatcggtacggtctatgcgatcgatgaaacctccgacgaaaactgtcttttcctggccttcgataccgatttttacaggcacgtgaaaacggttctccatagccagcaaccggaaaggacatatctttttatcgtaagaaaacatctcccggaggtattttttgattactcccaggatcagttcgttgctgccgctatcgatcagcctggaaattttcgggtcgtatacttttagataagaacggcggatgtgttcttcgatcagagatccgttagccagaatggtatcgatggccgctttcgtgatttcgcctccaggtatcgtggcatacagtgattcggagcattcgtgaaagatatttcccaaaagacggtggtccagttcttcggccagttcttctttctcttttatttgtgctatgtatttgaaataaaatttcagggaacattccatataagtgtttagggccgaaggagagatcgtctgatcctccgatcgggtataccgctccagaatatggagtatcggcggggttttaccgattctgatttctttgggattttgggtagaaatcgggttttggaaattcctttccgctacggtaagtcccgattcatatttgatttgatagagaaaacgactcatttcccctccgttcatcccttttacgcctgaagtatataaaatatgaatgtctctggaacgttgtaaaagccggtaaaagtaataggcgaaaacagcgtcctggtgttcgggggtgggcaaacggaaaccgaatcggaggttataaggaataaacgaagcgggaagtgtggttttgggtaaaataccttcgttggccgaaaggatgatcagatgattgaaatccagcatacgggtttccattaatcccatcagttgtaagccttccagaggttctcccgaaaaaggaatactgagattaccgatcactttattgatgatttgcatataaagtttgttctccggctcgatgccctcttcttcgaatgtattttgcaggttttggatttgggtatataccgtaaagacaaattctttttcgataggatcggcttcttctttcaataccgaccgggtcagcaaattcaggattttcagtagatatacaggtatcttttcgtgctggtcggaggaaaaaatagcccgggtgagctcatgaaagtgtaaacttttttctataacatagacgatgttcttttgattgatatagttggtgatctgctgaatctcttcaggacataggtctttgattaatttgtgattcagcagagcgatgaccggtttgtaatagtagtaggtggtgtcgccttcctgcctggcataattttttaaatcgcataacatagaaatgagggccgccaccgaagtgttgcgtgccggataccccatcgtaacattgatttttgagaaatactccggaatcgaatgcatcacgggaatcagcatctgttcttcacataacacgatggctgtctgtcgcggattctcttcccggagactttcggtcagggcaggaagaagcttggcctgaccgatcgtcgaggggacagccaggtattcgatggttttgccgttgtatctgaagttattgaaatgttcgatatccaattcgttcggaaacagctttagattctcccggatataatggcctgcttcctgatgttcatcagcggtataataaatatcgtaatcccagtagaagcgggctattcccgaatcttgccaaaacgaaaagatctttttttcgcataagttcaaagcgttgaaacccgcgattaatatatgtgcaggatgggcataggtttctatatgttcgcaaaaataccgttcgttcattccttcatagcagattccggtttcagccaggtgagttttgaaatgagtataggtggcatataatttatcccacacttttaggaattcttgttgttcccggctgaatttttccggattgaagctcttccagaatcggtgtatggccttgatttgttcttcggtcagatacgggaagttcaaatccaattctttgagtgctatcagattagaaaaaagatctttggcatctaccaggtatttgtcgatatcgtcgaaatcagccagtagcatatttccccaaaaatagaaatcttcgaatttctcggaagagcccgatacggctgtataagatttgtagagtttgataattaaagaaagtgtttcagcttttttcagacccgaatgcttttcgatgtattctgtcaaagtcaggatctccggcatccacaccggacggtcgatttggcgggagagttcttcggccaaaaagagaccggctcttttattaggaaaaataatagtcagatcggcgaaatccgtaccgtatttccggataatatcctttgccagtaactgaagaaaagaagccatatatcgaattaaaagttaaagagttatttgggcttattgtattttgttgttatttttgtcgaatagtcggtagggactactgatatcggcaaatttacaatttataatgattaaaacagcgaaaataggataaacctgaaagtaaacagatatgttgaaagatttattattgagaaatcgtagctatcggcggtttgagcaagaggtacggatttcagaggaagaattgacagaattggtcggtttgacttgtttgtgtgcttccgcccggaatgcacaagccttgaaatatgtaattgttcatgaggaggaaaagtgtgcggaggtttttccacagctggcttgggcgggatatctgaaagattgggacggacctgaagaaggagaacgtccggctgcttacctgatccagttgttagatacccggattgttgaaaattgtttgtgtgatgacggtattcaggcccagacgattttattgggagcggtagaaaaggggtggggaggatgtataatcaaggctttccggaatgaagatttacgtcgtctgtttcacttacccgaagagctgaaaatcaactacgtgattgctttgggaaaaccgaaagaaaaggtggtgctggaacaaatgaaaggggaggattatcggtattggagggatgctgaaggtggccatcacgtacctaaacgggaagccggtagtttgatttataagattgaagtatgaaaatactgtgtgcggaatataacgacgccggagaggtggctgtcgtaccggtgggggatgatgtgctgttaaggaataacggggatttttatataccggattatacacaacaggtgagcggtgtgcctcagttggttgtcagaatttgtaagttgggaaaaagtgtgggagaacggtttgccggccgttattttgaagagatcggagtcggagtccggttttatgccgattcgctggaggaacagctgattgcaaaaaaattacccgggatcatggcagcctcttttgacagctcttgtgctatcagtgctttgatgggtatagaggaagccagggaggcaaactatgaaatgaaggtcaacggtgaagccgttacttccgggaatagacagcatttaccggtgggtattgaaaaattgattgcttttgcgtctgagtttcatacattgaaaatcggtgattatctgttttgcggacaccccttccgtttccggggactcagaccgggcgataaagtgcaaatgacattggatggaaagacgatgctggattttagaattaaataaataaccataattatgaaaaaaagatttgttgtattaggattacttctgctctgtttgggtggaaaggctcaggatgcttatgtaccgtctcctgaaaatctggaagcccggaaagaatttcaggatagtaaattcggtatttttttacattgggggttgtatagtatgttggctcagggagaatgggtgatgacgaaccagaacctggaccacatggaataccgcaagttggcttctgctttttatccttcccgtttcgatgcggctgaatgggtggctgcaataaaagcggccggagcgaaatatatttgttttactacccggcatcatgaggggttttctatgttcgattcccggtttacggattataacatcgtcaaggcgacacctttcggcagggatgttttgaaggaattggcagaagaatgtcataaacaagggataaaattgcatctttattattctcatctggattgggaccgggacgattattatccgttggggcggaccggacgtggtacgggacgtacgacccatggagaatggaaaacgtattatcagtttatgaacgatcagattactgagttgctgaccaattacggaccgatcggtgccatctggttcgacggttggtgggatcatgatcaggatcccggattcgattggcagttgcctgaacaatatgccatgatccatcggttacaaccggcttgtctgatcggtaataaccatcatcaggtaccttttgccggtgaagatattcagatttttgaacgggatttgcccggagagaataatgccggtttgtccggacaggacatcagccgtttgccgttagagacttgcgagacgatgaatggcatgtgggggtataaaattgtagaccagaattataaatcggtgaaaaccttgatccattatctggtgaaagctgccggtagaaatgcaaacctcctgatgaatatcggaccgcaacctaacggggaattgcctgctgctgcactcgaaagactgaaagcaatcggagagtggacgaagcaatatggagagacgatttatggaacacgggggggagatatcagtcccagagattggggggtaacaacccgcaaaggagataagctgtatgtacatattctgaatttgcctgataaaggattgtttttgcctttgacgacggggaaagtgaaaagtgctgtcgtatttaaagaccggaaaccggtgaagttctcacaagataagaatggggtagttttggagttggctgaagtgcctgccgagctggattacgtgatcgaattgaccataaaataatagacagatagttgtatgcgacgtcaggattttaaaatagaggtttgtactaattctgtggagagtgtgagggctgctcttgcaggtggggcggaccggatagagctttgtgccggaatgccggagggaggaacgactccttcgtatggtgagatttgtttagtaagagagttgatgcccgcagggatgcatgtgatcgtgcgtccacgagggggcgatttcctataccgggaggatgaacttgaagtgatgtacagggatatagaaatggcacgaaaactgggtgtcgatggagtcgttttgggttgtctgacccgtgaaggagaagtggacgaaggcgttatgagaaaattaatggctgcttgcggagaaatgtcggtgacgtttcaccgggctttcgatatgtgccgtgatccttttcaggctttgcagacgatcgaaaagctcgggtgtgcacgaattctgacttccggacaaagtaattctgctgaaaccggagtgcctttgctgaaagaattggtgtcccgggcccggaacgtaattattatgcccgggtgcggggtcaatgcggctaatgtgcggaagattgccgaaagcaccggtgccttcgaattccatctttctgcccgtatccgcctcgggagcgatatggtttatcgcaatccggccgtttcaatgggaggtacggtgcaagtggatgagtacggacgtgaggtaagtagtagcgaaaaggtggaggaggtgatccggaggctggagtactgacgacttgaaggcctgagataatgtaggttcgttacttattcgtcggaggtgttcgtgttcggagaccggtcgcttctgtcggtcatctggctttttctttcactgaccggcggaactcctcactacgcaaaaaactttacgttacgtttccgtcagacaccaccggtcggtcagaaaaagcaagacgacactcgccagagctccaatggtccccgaacacgaacaccgcagactcccgttatcactgcatggaaagctaatcttgatttggaaaacaggaacactatgaaacagaggttttctgatttctttttcttctccttcctttgaactgtagtacaaacagaagatgcagggatttgtggcggaagaccattggagcaggaacgaggatccggttaggttttccgaacgtccgaccggtggtgtctgacgagcttgcgaggagttcccccggtcagtgaaggaaagccttaccggatcgttccaggcgaaccggtctgacggcataaaacctggaatcgaatagaaagaaaaatataaacctgtgttttaactataatttatgtatcgttttcatcaattgttctcctaatccgatcgtatagccttgggagataaaaacgatccggttgaacgtatcggcgatgacgaaaatcggcagattgtcatgcgatagtttcatattttcctgaatcattttttgtatcgtctgattttggtctactcctaaagtaatagtaccggggagattcggaaattctgtgggatgaaaactttttaactgtttttcatccgggaaaagcaataccatgcctcgtccccatgtctcgaaatcctgttttaaagccgctatatcccgtaaggcgtggttcgtcggttcctgaccggcccctagtataccgataatgaaatatccgcgtccggtggtttgcaggatactctgaggggtagagctatttgccggaaggaagaaagcttccgaattcaaactgccgatcactttcacttcgtccggattttcccgcatgatgagttcggttgtggtcgtttttccttcttcgatattgaaaaatgtcgtattactcagtacaccgccgctggctaatcgggtaccggtaaccagcatatagtatccggtgtccagggacatcgggtgctttaagaggttctcccaattactactgttgtcttcgggaaaagtcaatagttgaaatgttccgttatgatatttcgaaagggtgaaatgagaataatataagggattggtgagtgcttttacaggcttgtaagtggcaaccaatttcccttgtggaatatttgcttcggttgtggcagtgaaatcgacgtcctgccatttaccgtcggttccggcatattgggttttaccggttacttcgtcgatacgtgaggctatacccagactcctcaaaactgctacataaaaaatagctctggaatgttggtcggcaatccgggaattccagactccttgaggcatcatcggaatatgctgcggattcagttcgtcctggattgaaatatttttaatacaccattgggtccagaaggaggggttctccttgattttttcggctaacccgggagatatcgctttttgaaaaaagtctttataggctgtaagcatttcattggctattcgtggattcaggatatacgcgtcgaataagggattttcagataccggcgtgtgttgcaggtggtctttgagtacggcttcgggagtatcacgcaggtctttgtcagaaatcacttgcaataattgcaacgcctgaactcgctgagctttcggtgtatggcgcaggaaaccgagtatctggtcgtggttaccccggctggcaataagaagtttcgtcaaaggggctgaaggtaaacctaattcaccggcgatgtcgtcagcttgtccggcatttataaaagtggctgtataggcattgcggatcgaatcttccattgccatccggcgggtgttctctgcccgttgttccggggtaacggtaaccgggttgacatgctcggccggaggtacgatgtcgagtgctagggtacttacctctccggcttgtttatccaggatgatggtgattgcagcatcttttgcaaaagagagtttgccgtatccgaatcgttcgccgtcggtggcccagaccagcatatctccttttccggctgataaagaggctttgccttggtcatttgtcgttttagatgctacggtgtaaaactctgcgtaattatatagtttaaaatcgacttgtgcattttttaccggttggttgtccggcgttgtgacggtaactgttgcctgtgtcgtcggggcataattgccgataacattgatttcggtataaccggaggttcggctcatgacttcttccgggccgttgtagcgaccgaatactttggtgtgcatcagcatcccccggctcgccggtgcattgaaccagcctaaatccaataccggttccggttcgcaagctcccagaaaatgccattgtccgtctacccaggcttctacccaggcatggttatcgtcggtatgcgcccagcggggagtataaacctgacgtgccgggattcctacagaacggagagcggcaaccagaaaggtcgattcttcaccacaacgtccataagcggttttaaccgatgctaagggcgaactggtgcgggaatcagaaggagtatagatcactttctcgtgacaccagtggttgacttcgagtatcgcatcgtaaagtgaaagattttttacccgctctttcaattccttgtaaaatactttccgcgattcgtccaggttttcgttattgacccgcaccggtaaaacaaagtggcggaattcccgttcaggaatccggttaccccaaggcatttcctgtctggttttcaatgcatatctgacattcatcagataataatccccgctatagtcggtgatatctccgatgggcatgtaggcatagagaaacatcagggcttcacgttcttcggtagtcaatgaggttgtaaatatccggaacaggtccccgtgggggagggctttttgtttgtcttcgaaatcacgggtcactgttgccaattccgattgatccgaaaataaatgccgctctttacaagataaggtaagcaatagaaaaaaaactaatgccagtttgaatgtaagattcatagatcgttttttagattaagtttgtatttagccgaatgaataataacccccaaaattaatcaaaaggaaacggtgacaatacagtcttaaaccgttttaactgctgtcaccgttattactgttttaaccgtaaacccttacttgatattgatgttattgtagaggaaacgtttaatcttatgtgtcggtgttttttcaaagggttcatgctgtaccagcactaattgaagcttagaaaaattgtttacccttgaatttacatattcgaataattcttttttctgctcttctatatagtcattgatagcggttttgtaatttccggcctggctttttattttttggacttgtttttccagttcttccatattgaaatgtaccatagccactaatttccctttggattctacaaccagggattcattgacaaaacggaaattattgatgatcgattcgatttcttcgggatagatattttcaccggaagaacctaatatcatggttttgattcgtccgcggatcgaaagccgccctttgcgatcgaaagaacctaaatctccggtcttaaaccagccgtcttcgctgaatacttcctgagttaattccggttttttataatagcctttcataacatggggacctttgatccagatctctccctggccggtcttatccggttcgttgattttgatttgcaccccttccatggcaggacctacgccctgtaagaaggttccccggggagcagaacctgcggacatcggagaagtctctgtcaaaccataaccgatggcataagggaatttagcctctctgagaaaacgttctactacaggatctattttcgaaccaccgataccgaagaaaacgatttttcccccgaaagtctgcatcagtttttttccggccagccgattgaataatttccgggtaggcccgaaattgtataaggtcttcatcaaggcagacgaagtaaatttaggcaatacctgggttttatatattttttcgatgatcaaaggtacggataacataaccgtaggccttatcttctgcatggcaggtaccaataatttaggtgtcggtacacggtccagataataaatctgagctccgaacatcaccggtagtaacaggcccagggtattttcgtaggtatgggccaaaggtaaaatgctgagaaaacggtcttggatacttacaggttggatcgtagcacattgccgcgcattccagaccagattacggtgagttaattccacccctttggaaaaacctgtagttcctgacgtatagatgatcgaagccgtatcttcttcttctacttgtattgcaggaaggggagtcaggttatccagaccgatattgttctccagtttgtcgatcgcttctaccggatagtcttccggaatccgggcgaaagtattcatcagaatcttttgttccagataactcgtctttatatcggcgactaatttataaagcaatttagatacaaagatgattttagattccgaatgttctaaaatattttgtatttctatactgctgaaacccggaagaaccggtactgcaatagcgccgatccgggcaatagcaaattgagtaataccccaattcggcatgttagcacttaaaattgctattttatcacctttttgaatgccggatgaaagaagataattagctatcgaagttacttcgttatagaagtcctggtaagttcgtttgccactttgaacaaagttcaaagataaattgttcttgaatttggaacagctgttagaaaggagttccggtaaagtcaatttctttaagagcattatatttaatagttgcaatttgctcacaaagttacacaaaaatcttgaattcaatattgaaaaatgctaataattctaagagaataaaacgtaaattgttaaaaatgaaaaactttatttgaagaaattctgtcggaggagtctggtggaaacctggaattaaatcggtttataaagttcataagtttataaagtcggtaacttatgcgggcgtaaaaaagcgcctgcaggggggacacataaaaaaaagagtcccggaggactctttttttatttagcaggaatgtttttcaaagtagctttgaggtattcccagaattttccgaccgaggcgatgtttacccgttcgtccggagagtgaggagagcaaatggtcggaccgaaagagatcatatcccaatgggtatatttagaacccagaataccacattcgagtccggcatgaacagccataacagcaggcttcttaccgtataattgttcataaatctcctgcatttcttttaaaatagcagaatccggattgggtttccagcctggataatcgccgtcgaacatgattttatctgctttggctaattcgaatactgcctgaatggtttgtgccaaggcttctttggctgtttctaccgaagaacgaagcaaggtgttgatgataatttttccttgttctgatcttacaatggccaggttatttgaagtctctaccgtatcgggcatcgaatcgatcatccggacagctccgttcgggcaagccagaatggaattggtcagacggaactgggtacattcgtctattacggaggccggtagctcacaagcttcggcggttacttgcagggtaggctccttagcacttaattcggctttataaattccttcagcttctttaatagctgcctgtaattttgtttcgttggcagccggaatgacgacgagggcaaaagattcacgcggaatagcattccgaagtgtacctccgctgacagaagctatgcgaatacctaattctgctgcataagttttcaaaaaacggaataacaatttattcgagttacctcttcccaggttgatgtccatcccggaatggcctcctttcaaacctttgatccccaaacggaaagctttgacttgtgctggtacagcttcttccttgtaattaaattcgatcgtagaatcaagaccaccggcacaacctacataaagttctccttccgtttctgagtcgagatttaacaagatgtcgccttttaatacacccggttttaaaccgttagcaccgtccataccggtttcttcggtagctgtgatcagcacttccagtggaccgtgaggaatgtcggtcgccgtaagcatagccataccggcagcaactcccatgccgttgtcagcccccagagtggtgccttttgcccgtacccattctccgtcgacataagcttggatcggatctttttcgaaatcatggtccgtatcttcatttttttgaggtaccatatccaggtggccctgaagaatcactcccttgcggttttccatacccggagtggccggttttctcataataatattccccacctcgtctatctctgcctcgatattgttctcttttgcccattcgagcataaatttacgggcttgttcttcgtggttggaaggacgggggacttgagtcaatttgtaaaaattctgccagatagcagtcggttttaagtctttgattgagttcatatttaaatttttaggttgattttttctttattgattagcggtttcgtctgatcggcgcttatcttttcatgtgttcattcaaatatttcacaaaccgattgtacaactgcaaggttgtattgcctccgaagatactgtggttgcggttggtgtaaatggccatgtcgaactgtttgttggcttgtaccagacgttcggccagttcataggtattctgtacgtgtacgttatcatcggcagtaccatgacaaatcaacaggttgccttttaatttatcggcccagttcaagggggcattatcttcataaccccgttcgttttctgccggtgtacgcatatagcgttcggtatagatcgaatcgtaatatttgtaatgagtgacaggagctactgcaatcgctgtcgtgaaaatgtcatttcctttcatgatacagagcgaagacataaaccctccgtaactccatccccaaataccgatatttttaacgtctacatcaggttgtgtggccagccatttggcagctgcgatcatatcgtcgctttccagtttaccgagttgcatgtacgtacatttccggaactcttctccacgagctgccgtaccacgcgggtcgatacaggcaacgatatacccttcctgggccagataattcaaccaactcagactccagttgttttttacttgttgtgaattaggcccgctgtattgggtgatcagcagcggatattttttgccggtttcctgatttaccggtttcatgatccacgcattgagcatcgttttaccgtctgctgccggaatttgaatgaattcaggttttgccagattatatgctttcaccgcctctttcaccgctttattatcttcaagcactctgacctgtttgcctttagcattataaagagcggtgaccggaggagtatccgtattcgaaacaacgttgatataataattgaagttcttactgaaactagcttcattccagccttttaccggggtcagtttcttttttaatcccttttcgttaatgctataaatgtatttttcaagtggagattcttcgtaggaagaatagtagaagagtttgcgaacaggatcataaccgtagaaatcgatgatatcgaaatttcctttggtaatcgcttgtctttcccgtccgttgagatcgtaaagatagaggtgcatatagccgcttttctcgcttgtaatgacaaactgtgtaccgttatccagaaagaccagattgtccagattgctttcgtcgatataatatttgttttcttcccggtaaagaggaacaatcgttccgactttggcattggctaagaggacttccattttattctggtgacggttcaggcgaatgatagccagttttttagggtcctgggtccagcgtatccgcggaagatagatgtcgtcttcttctcctgtgtccatcttggtcgttgtccggtccgaaacatcgtaaacataaacggatactttggaatttttctctccggctttcggatatttgtaaacataattcgagggatacagttcgttttgttttaaagcaggactttgtccttcgaacatattcatttgaaattcgcgtacatccgattcgtcgaatttgatgtaagcgatggccgatccgtcgggggcccattcaaaagcgcggttgaatgcgaattcctcttcgtaaacccagtccggtgcgccgttgatgatgtgattgtattgtccgtctctggtgatctgacgttctgaaccgaaacggatatcatggataaacaggttgttatctctcacgaaagcaacttgcaaaccggtgggagaaaaagtcgccaaccgttggctgccaccttccgacaaaggtttgatttctttatttttgaaatcgaaaagataataatcggcagtgaacgaacggcggtaaatcggtttcttattggtacaaatcagtatccggctttcatctgcattgaaggtataatcgtcgatccggctgacaggagaatcctccagtgttttcaaatccagtaaagtagcgacaggcagacccgttttatagctgtatttgactatacgtgtgccattgttctctaaaactgtataatgttcgccgtcattcatggaacgtaatccgtaaactcctttggtacggaaagtcccgtcgacaaaaaaatcctccagggttaattgtttttgtgcagataactggctgcaaaagataaacataagtaaaaagattccgaaaaaatttctcatatcgttctgtaatttttatttttttagtttgcagtcccaaaggtttgaaaaaaatctttgttttgcaaatgtttgcagaattatcctgaactaaaagtgtctgaatactttttaccttttaaccttttacctttaacctgaaattattacctttgcgcactaaaatacatagctcggaataataatatgcaatatactcttttagcgaaagataagaacagtgaagcccggtgtggtgttttgaccacagcacacggggagattcatacccctgtctttatgccggtgggaacggtgggatctgtgaaagcagtgcatatgagagaactgaaagaggatatccgggctgagattattctggggaatacctaccatctttatttacgaccgggaaccgaaattctgcaggcagccggaggattgcaccgttttaatggctgggaccggccgatattgaccgatagtggcggatttcaggtgttttcactgaccggtaccggacggaagattacagaggaaggagtgactttccgatcacacatagatggttctaaacatctttttacgccggaaaatgtcatggatatccagcgtcaaatcggcgccgatatcgtgatggcttttgacgaatgtccgccgggaaccagtgattataattatgccaggcattcactcgggctgactcagaggtggctggaacggtgtgtcgcgcgttttgacgaaactgcaccgctatacggttacgagcaaaatttatttccgatcgttcagggatgtacttaccgggatttgagagagaaagccgcagaacatgccgtatccctgaacagagccggctatgcgatcggtggtctggctgtcggagaacctgctgaagaaatgtatgccatgatcgaggtcgtcaatcgtatattgcctcaggataaaccacgttatctgatgggagtcgggacgcctgaaaatatactcgaaggtatacaaaggggagtagatatgttcgattgcgtgatgcctacccgtaatggacgtaatggtatgatttttacaaccgaagggacgatcaatattaaaaatcaaaaatgggagcgggatttttcttctatagatcctgctgcattgagttatgtcgataccgattattcgaaggcttatttgcggcatttgattaaatccgacgagatattagggttgcaaatttgttccatccataatctctctttttatttgtggttggtgagagaagcccggaaacatattcaggaaggagatttcgtagcatggaagacaaagctgcttccgaaaataaccagaagactttagatgaaaaaacttgatttatatattatacgcaaattcctggggacctttttcttttcattggtcctgattctgtgtatcgtcgtcgttttcgatctttccgaaaaattggaaaaatttttggaaaacgaagctccggtaaaagcgattgtgttcgattattataagaattttattccctattttgcgaacgtgttctcttcgctgtttactttcatctcagtaatcttttttacttcgaagatggcctatgacagtgagattatcgctattttgagtaccgggatcagtttcaggcgttttttattcccctatctgatgtcggctaccgttattgctattttgtcatttttgttgggagcttttattatcccgaatgccaatgagaaacggattgaattcgaaaagcaatatatgggtaaaagatatgccaataaggaacagaatatacatcgtcagatagctccgggtacttatatctatatgtcgtcttattcggtggcttcgaatgtgggatatgatttctccatcgaaaatttcaggggggataccttgatcaataagctgacctcttcgcggattacctgggataaggaaaataaaaaatgggtgatccataactggaaactccgggaaatagagggagataaagaaacgtatacgacgggacagaaactggatactgtcatggctttccaaccttctgaattttcagagaatccgaagaaaatccgggaacaattgacttttccggaactggatcgttatatcgaccggatgaaaatgcgggggagttcgaatgtgatcgagtttcagattgaaaaatataaaatgattgccaatgcattcgctacttttatattgactttcatcggtgtcagtatctcgtcacgtaaaatcaggggcggaatgggactacatcttggaataggcttgctgatcagcttttcttatatcttatttatgcaattttcaacagtttttgcaacaaatggaaatatgaatccgttattagcagtgtggttgcctaatattttgtttgccattatcggagtgtttgtgtataggacggcgcccaaatagtttgaatgaaatacctgagtgagagagacgtgtaaacgagaaaaaaattaaaatcaatgaattaatattatttaggatggaaagagattataataaaaatcggcgttcttttcgttccgaacggtctgaaaaccgtagaggatatggagcagagcaaggagaaagacatacggccggatctgtggggaaccgtaacactgccagaaggtttgaaaggacttctgaacgggacaacggagaaagaagagaacggaattttaaccgggagaaagatacttacagagaacgtccggctaaattcagtaaccgccgggattaccgtcctagtacagaggcaaccgaccggcaggaccggaccgaacgttcggaacggaaggtattggtgaaacgtgattctcatacggataatccacgcagaccacgtattttccggccaagaggtgaggagaccaccgggaacaatcattcgaattataatcgtcctttcgaccgcgatcggaaaaagatttccgggagagagaaagaaggactgagacagaaacactatagtaaaaagaaattgttggctcatcggctgaaaaatgaagatgagaacgccgaattgcgtctgaatcgctacatttcaatgggaggcgtatgttctcgtagggatgcggatgaattgatcgttgccggacgggtgaaggtaaacggagaggtagttcagaccgtcggtttgaaagtacggaagaaagacaaggtggaggtggacgacgttcagattttccccgaaaagaaagtatatctcgttttaaataaaccgaaagattatgtgacaaccgtcgaggatccgttggaacgtaagacggttatggccttggtcgaaggtgcttgtaaagaaagaatctatccggtagggcgtctggaccggcagacgacaggagtgttgttgtttacgaatgacggcgatctggctaagaaattgacccatccgaaatacgatcacaaaaagatatatcatgtttttctggatcgtgtattgactgaagaagattttcaggctatagcgaatggagtccagctggaagacggatttatcaaagcggacgagatcagttatacctctccggattgtactgaagtggggatagagattcattccggaaaaaatcgtatcgtcagacgtatatttgaacatttcggttaccagatcataaagctcgaccgggtatattttgccggtattacgaaaaaaaatctgccgcggggaacatggcgtttccttactccgaaggaagtgactatgctgaaagtttattaagtgctaagctattgtttatggagagtgttttttcctggtatgctgtgtatacagcagccagggctgaaaaaaaagtgaaagaacgactcgatcagattggtattgaaaattatcttccgttaaggactgaatacagggtgtggagtgaccggaaaaaaaaagtatcggtacctttgatttccggatatatttttgtacatataaaagaagaaacctttgttcctgtgctgacaactccgggggtggttactttcctgaaagaaaagggaaaagcggtagctattccggctgaacagatcgaacgcttacgttttgtcgaaaaccaggccgacgaaccgctggaaatttcttacgaggatattcctgcaggtactttagtagaagttgttcggggtaaattagctggatttcaaggagaaatggtgcagatccgggataaataccggattgttttacgtttggaaaaattagggtgtgctttgattacggtagcggccagttgtgttgaaaaagtgaaaaattattctaagaaggggtatgtttggggctttttgttta

SEQ ID NO: 5914 - DNA, 1679 bp, Unknown
  gut microbiota DNA sequence
tattccaaagtataatagttttagatgttgggatagaattatctcctatatatacatacaaaaaaataacaaaaattatgccgaagtctgatcaaagtttaaaatatacaaaaaaaatcgcattattatataaataaaaaaacagtctgaaagattttcagactgtaaagttttcagatatccggatcaataatgggccaaacaataccaataaagtccggcaaccgcatcttccaataaatcgagcaccagctcgaatccttggggaccttcataataagggtcgggaatttcggaatatgaagtggatttccggcaaaaatcagtcattttaaagattttcgctctttcttcctcatttattgctgcacgttttaaagcctcgatattctggtcatccataccgatgatcatatcgaactctgcaaaatcggcagtcggataaaaagtacgggcacgactatccaggacatatccccggcggcttgcgtgccggcgcatccgctcatcaggaagagctccggcatgtccgctataaagtccggccgaatcgatcaagaactctttttctttgccctctttctttatccatgccttcatgattgcttccgcacccggagaacggcaaatattccccagacatacaaacaatatcttcttcatttaactaaacaacgaatcgacaaattcctcccggttgaatacctgcaaatcttcgattttctcaccgataccgatatatttcacagggatcttgaactggtcggatataccgataaccacacctcctttggcggttccatcgagttttgtaatagccaaagcgttcacttccgtcgccagtgtaaactgcttggcctgttcgtaagcattttgtccggtggagccatccaataccaacaacacttcattcggagcctccggcaagacctttttcattacgtttttgatctttgtcagctcattcatcaagtttattttattatgcaaccgtccggcggtgtcgataatcacgacatcagctccgtcggccttggctttacttaacgtatcgtaagcaacagaagcgggatcggcacccattgcctgttttacaatcggcactccgacccggtctgcccagatcaccaattgatcgacagcagcagcacgaaaagtatcggcagctcccaataccacttttttaccggcttctttaaatttataggccaactttccgatcgtagtcgttttccccactccattcactcccaccaccatgatcacatagggcacaccgttttcaggtaattcgaacgaagcggcatcgttaacagtattctctttcaacaaagcgacgatctcctctttcaacacccggttcaattcatcgacacccatatatttgtcgcgttgtacacgctcctcgatacgttcgataatcctgaccgtagtctcgacacctacatccgaggtgatcaaaacctcttccagattatccaacacctcgtcatctactttagatttgccgaccaccactctggccagctttttaaaaacactttctttggtcttttctaaccccttattcaggttctcttttttagtctttccgaataatccgaataatgccatttcaataaaatatgataaaaatttcaaagccctaaagtacaaataattttaatatcaatatgata

SEQ ID NO: 5915 - DNA, 1555 bp, Unknown
  gut microbiota DNA sequence
aaaacaagcgtataaattagtccaaaagcatactggcgatgaatcagatccaagctccctacaaccgaataaaccaacacgatatattcaacgagaaaatgtcatcccaacccaaacaagaagaaagaaaaaaacgagatccattttattgaatcccgtttcctatttttccatccggtcggataaattcagacattttccctatcgggcatttttatcttgctttgtaagcgatatctttgacgataccgaatccggtatacgtctcgccgaactgcgttaaatctccggcaaattcagggacatcatagaagcgtaaaattccttcgctaccggcttccgcatcggaattaacggagcctaccgccaaacgatactgacaatcaatggcaacatcgggataatgaatactatgtcctaagcctaatcgcggcagcttattgaatttaagcatagatacgctgttttcgccaggcagaataagaacccgccgggccgaacgagtggacatatcgtataaatacacttcattgccgctattatatatcaggaacggcagagtggggtggaatgcgaaacaggttgcgttcgccaatcccggcgctttggcagcatctatatccatgtaggtgctctgcacaggcgaatcctgatattgtcctgctgtgatgccatatatactatattgtcccgcagcatctttcagcaaagcgaacaccagattgccgcctccctgtctcgtacctgccatgtaaaccatgtcctttcccgtgttccagtcgaaaagtttggaaccggtctcgggctctttgggatcgaataaatactttgttccgttaggaatcacagcatattgcaaaaagtatttaaacctccggttcgtcttatcgtacaggattccgttgtaaccgtttgaccatccgacaccgataaagggagccattttgtagttaggttccccgaacggctcgtctacgttaattttcacatcatataaagccgaactactgctcattttttgataaacatctccatctgcggtaatgactatatagctgtaattattttcctctctcacaataaagtcatctatggagcgtgcaaataccgtacttctcgggtcattaaaattacggttgaaattgccgttataagaccatatacaaaaactattatcttccgtatataaatttaaataaggagaattagctgtgtacagcatattactctccaaaaggatctgacaagcgccatgtgattccggtaaaaagtccagcagatttctcgaaacagcaatccggtcaccaacctcaccgatcatatctattctgactttacgttcgctgccttcctcacataatacgacccaccctttggtcgtggaggtcaccacgctcagtttgaattcagcagaagtgacaatattggtccgcaaatccttcaccttgaaccagacagtataattaccgggatctatttctgccagaatattcagatctttcaccctactggaatccaacagccttggttccaggaaatcacctcctaccggtct

SEQ ID NO: 5916 - DNA, 6905 bp, Unknown
  gut microbiota DNA sequence
ttggacaccctcttttagtttataaagttcatggtttggaaactgcctttcaacagatcgatcagcagtaatttgccggaaagagtatcctggcttcccaggataagcttgatggcttcattagcctggatcgaaccgacgactcccggtaatgcgccgatgacgccttgtggttgctgaaactcagcgatagcatcatggtattcgtaaaggtcacggtaagtaggacctccctggtaattaaaaacggaaacctgacctttaaactcacaaatacttccataaacgaacggtttaccgtatcggacgcaggcttcgtcgatcaggtaacgggaaggcagattatcggttgcgtctattaccagatcgtattcagcgatgataaaagtgttttccgaagtcagccgctgagcgtagggtacaatagttgtatagggatttaaagcctgaagcttccgggcagcgacttcgaccttcagggctcctaaacattgggtatcgtagagaatctgacgttgaagattactctccgagactatatcattgtcgagtataccgatccggccgattccggcagcagtcaaatagagtaagacgggggaacctaatccgccggctcctacaaccaatactttcgcccgtttcaatttttcttgtccaggctctccgatttcttccaaaatcaaatgcctggcatagcgttctttttctcccatagtcgattatttatctggtattggggatgtaattccggttgaattacatccatccgtcccagtctttccataccggttcgtatcctttttgacgtatactgtcggcaacttcctcaggagtgcgttcgtcactgatgtggaattgttccagagcctgaggataagtgaaataccctccgggttcggttttcgatccggcactcagggaagtaatacccaaagggagcatattattgcggaactcggccccttcccgggtagaaatcgagatatcgacatcatggtcgaatatacggaaagcgaagatcaattgggccaaggcacggtcctccaggataacattaggctggaaatggccttccgaaggacgcatccgtggaaaattgacgctgtatttggtttgccagtaatgtttttgcaggtaacgcaggtggcgggccatcatagttacatccgtacgccattcctccagaccgattaaaactcccaaaccgattttgtgtacatgggcttgccccatacggtcgaaaccgttgacccgccagtcgaatttggatttcatgcctttcggatgataaacgttatagcgtgcccggttataggtctcctgaaaacaaaccactccatttaatcctgaatgcgtaagacgtttataatcttccgctttcagaggcattacttcaatagaaaggttagcaaaaagaggatgggccaactgcaatgcgcgttccagatagtcgacaccggcctccttcggattctcccctgtaacgatcaataaattttcaaaatttcccagttttttgatagcatgcaattcattgagaatctcttcctcattgaggatgacccgtttgaggggattgttgtgattgaatccgcaatagacacagaaatttgtacacgaattagtgatatacaaggggatatacatcgatatggttttcccgaatctttgtaaggtatatttttggcttaatgcggccatcggttccaggtatttctctgcagccggagaaatcagggccataaaatcgtcgatggccaactggcttttacttaaagccagttctacatcggcggctgttttagagtagatttcccgggtcgtttcttcccaggaatatttttcaagttcttccgaaaacatattattaaaattaaatcggattgtctgtttatttcaagaaagcggtcagaggactgcttgcttcggcagcgatactttttccggctagtccggcctcataagccatccgtccggcttcgacggctaccttaaaagctttggccatttccaccggattgcctgcgacggctatcgctgtgtttacaagtactgcatctgctcctaattccatcgcttctgcagcatggctgggagcaccgataccggcatctacgactaccggaatattgctttgttcgatgatgatacgtaaaaattcacgggtttgtaacccctgattcgtaccgataggtgctcctaaaggcatcaccgttgcggctccggcatcttccagacgtttacacaataccgggtcggcctgacagtaaggaagtacaataaaccccagcttagccagttcttcggtggctttcagggtttctaccggatcgggcagcagatagcggggatcgggatgaatttccagtttcagccagttggtaccgaaagcttcccgggataattgagcggcaaaaatggcttccttggcatcccgtacgccggaggtgttgggtaataattgtacacctggacggagaatgtgctttaacatatcgtcgttcttatcttccatccggatccgtttcatggctacggtaaccaattgactttcagaagcgattatcgcttcttccatcacttgattggaagagaattttccggttccggtgaataagcgggaagtaaaggttttatctgcaattttgagtgtttccatggtttatgaatttaataaatttaatatttttattgtttgcctttttaggtcaggactatttttgatcaggcccgataaagcgattccctgaatacctgtttgcattagcggcggaatatcggtttccgttattccgccgatagcgaagaccggaatcgaaatcttattttcctgcattcggcccaatagaaaccggtaaccttccaatccgaggaccggactgagtttctctttcgttgtggtaaaagcataaggccccagaccgatatagtcgacctgctgtttttgccggagcaggatgtcatcccaggtgttacaagtggcaccgacgatcttaccggggcccagtatccgcctggcttcccatggatccatatcctctttgcccaggtgcacaccgtcggcttccagtaaacgggcgacgtcgacccgatcgttgataataaagagtgcccggtgacgccggcaaatctcttttacctttctcccttcacagagcatttcggcgagggaggctcctttcatacggagttgaatccagcgcattcctccctgacagaccgcttcaacctgctcgcagagggtcatcccttctttgggagcggtgatatactgcaaagacaattcaccgagccagggctttgagtcgggagtatattttccaatgcaatgataacctaacaggctgttgttgctttcgataaagcgggatacatagagctgtgctttattacaggaagtagctagggcatctccttgagccagggctgacaggagggccgacgatagggtacaaccggttccgtgtttggtgtaccgactacggggaaccgagaaattagtcgtccggtcgggttggaataagacgtcggtagcatccactccagcgttgtgtcctcctttccagaggatattcaggtggtgatcccgacagacgatttgtaaccgatcgggagtgattccttctccgaataatcggtaaagttcgtccgtattcggggtgataagataaacacggtcaaggatgcgttttagtctttcctgatcttcgggggtataccggtgaaatgaaaaaccggcactggctttcaggatagggtcccagattattttgagtcgtttgtcctgatcgagcaaataatccaataaccggtccaggatttcgaaactttcgatcagtccgattttcagaaattcgacattgtacttttgcaataataaatcacattgttttttgatatcctcccaggcggtccaatgtactccggtaaaagtgtcttcattttgaaaagtcagagccgaacaaacgcccaatccataacttcccgtggcttcgaaagttttcaaatcggcaccgattcctgcacccgaggagggatcgaaccctgcgatactgagtacgaatggagttttcaggcggatgtatctttcgatagcttcatcgggattattccaaaggtaccctaaaacggcgattccttcgaaaccggctcggcggcataagccggttttatcaggctcgaggcctcccaaggcgatcacaggacaatcgatgtccgataagtccggtaattgcccgaatcggctccggtatcccgttttggagatactatcgaaaataggactcagaaaacaataggcaggacggaaaggaagttgccggatttcatccacacggtgacaagagatactcacggcatattgctgaatatagtagatatattcattcgcttgtggatactttaaatgtattccgtgcaaccgatattttttcactaattcataatgctcgtgaagtacgatcctgttccggtagacagggaaaatctgccggataaatctttcatacacttcggctgaagcacccggttttcttaaatgcaggtacttcaggccgtgtgtaaagagatgattacaaatggctgcttcgtctttgaccggagtgggtgaagtaatgacgattattttcataaataactgtttcgcggctcgagacctttattatttattttcctggctgattttttcccttagttttttactggcccgcatggagcagaaatgttcaccgcacatggaacagaaatgtgcctccttgtggccttcgtccggtagggtttcatcgtggaattttatcgctttttccgaatcgagtgccaggtgaaactgatctttccagcggaattcgaagcgggctttactcatggcataatcccggaaataagcggccggatggcctttagctaaatcggctgcatgggctgccagtttgaacgtgatcactccttctttaacatcgtcacggttcggtaagccgagatgttctttttgagtaacataacacaacatagcggtaccgaaccagccgatcatcgctccgccgatagctgaagtgatgtgatcgtaaccgggagcgatatcggttaccagcggtcccagggtatagaagggagcttcccggcagtatttcaattgcaggtccatattttccttgatcttttgcatgggtacatgtcccggaccttcgatgatcgcctgtacattgtatttccaggcagtttggcagagttcgcccagtgtcttcaattcttcgatctgagccgtgtcgttggcatcggcgatacaaccgggacgcaggccgtctcccaaggaaataccgacatcatatttagccagaatctggcagatctcttcgaaatgttcgtaaatgaagctttcctgtttgtgggtcgtacaccaatgtgccatgatcgaacctccccgggaaacaatgccggtaaggcgtttcaaggtcagaggcacatgtttccaacgcaagccggcgtgaatggtaaaatagtctactccttgttcggcttgttcgatcagggtatcccggaaaatctcccaattgagtttttcaacattcccgccgactttctccagggtctggtataaaggaaccgtacctacgggtaccggtgaattgcggataatccattccctggtttcgtgtatattctttccggtcgacaggtccatgatcgtatcggctccccagcggaatgcccatactgctttttcgacttcctcggcaatcgaagaagttaccggcgaattaccgatattggcattgatttttaccagaaagttccggccgataatcatcggctcgcattccggatgattgatgttggccggaataatggccctgccggcagccacttcctgccggacaaattcgggagtgatataatcgggaatatgagcaccgaacgattcgcctttttcttttttatatttttcccggattcggtctgccaattgattttcccggatagcgatatactccatttccggggtaatgattccctgacgggcatagtataattgggatacctgagccccttcgcgggcgattcgcggatgggtatttacatgttcgaagcgaagagaatccagacttttgtcttcctgcctcattctgccgtattccgaactgagtccctctaatttaacggtatcctggcgttcctcgatccagttttctctcagtttaggaagacctttttgcagatcgacagtataattcgtatctgtataaggaccggaagtatcgtatacgacgacatcttcattttcaatcttactgccatccagatcgacggtaggggataatttgattttccgcatcggaacccggatatccgaccgggagcctgttacgtaaattttttcggaacccggtagtgggcctgaagtgatttcaaaattttccattatgattagattctgattttaatatactgattattaattaggaaagtcggtttatcctccctgtaccgctttgataatgagtagttgcgaaccgtcccgaaccaatgtcgtttcccattgtgctttaggtacgaccgtattgtccaaggcaatggcgatgtttaggggagaaatgtcttgttgggtcagtacctgtaaaatagtgctgttttcggggcattccgtggctacgtcgttgataaaaatatgcatgatctactgttttaggtttagcggaccatctgaaagggggaataattttaaaaaatgaaattttgctcactctacctacgccggcattacccggatcaggttattgggtataatctcagcccgtaatattaaggcaccccttctgaaaatccggttcaaagataacggaaaaaaatgatgaaacaaatcattcggatcgtttttaatcatttccaaaatatatattggcaat

SEQ ID NO: 5917 - DNA, 1809 bp, Unknown
  gut microbiota DNA sequence
gctgtttgggtagcacgcatggttccggacgggtatgtttccgcccacgcaaaccaagctcgtatcacgactttcccgctagaaggtaaaacttctatctcttccgacaaaatgaacaagatttacgatcccaatatcaccaccgtgtattccaaggacgtaatctctttcgcaaaagaaaaaggattctatcctcaagatgggaaaaataaagacttcagtttctctgatacttacgctccggttgacttcagcggggctcgtgcctgtgaaatccgtgtttgggcattctttaatgccgtgaacccggacatggctcaatactgggattacgcaacagggagaaacattcaacgtgatagtaaaggttacgcaaccaaccgtatgccgttatggattaaacccagcgagaaagtagacgtgatgcaagtgatggatttcatgcgtgatcacttggaaggaacagaactggatatgagcaaggatatgggagccggtccgtacgaatgtccgtacagatggcgtccgatgagtttcaaagtagacgggaaagaatatgttcacgaaagagcaacagcaacccaacaaaccggattcacatttgtagcacaatgtagaagttggttacctgatgaaatcggaggaatcctttggtttggagttgatgatgcagccagttccgtgtatttcccaatgtattcagcagccacagaagtgcctttcgcgttcgcagttggcaacggcagcatgatggaattcactaataaagcagccttctgggtattcaaccaagtaacgaatttcgcatacacacgctataacttgattcacccggaaattcgtgcaaaacaagttgcactggagaaacaatacgtgaatttcgtccaaatgatcgatgccggagcaaaagaaatgttagctcaagacaaagaatcagcgattaaatttatcacggatttctcctgtcgcacgggaaatcatctggtggatacgtggagagatttctacggttacctgttctgcaaattcatggatggtaacgtgaaaaccgcaatcccgggagagaaaaacccgaaagttgaacagcctgctttaccggaatggtatctccgaatgattatcgaacagacaggtaaaaaacttgaggtggtagaataaacactacaaaataaatattccgatgtttgcatcggaatatttatttttctacctttgccactcaattttgaaacgtacgtagtctcttacataaaagacaaaagtcgtaatactgcgttcgataaataaactttttaaaataaagacaatggacttaattaaaattgcggaacaggcttttgctcaggaaaacgctattgaaattccttcattcaacacgggtgataccattagcgtacactacaaaattaaagaaggaaacaaagaacgtattcagattttcaaaggtgttgttatccaaattaagggtacgggaacgaccaaaacctttacggttagaaaaatgtccggtaacgttggagtagaacgaatcatccctttcaattctccttacattcatgcaatcgaggtgaacaagagaggtgttgttcgtagatcaagaatcttctatttccgtgaacttaccggaaagaaagcaaaaattaaagagaagaaattttaatttaagctttagctatataaaaaagcctcgtttgacacgaggctttttttattccccaaaaatttcttcgctgaaacgtaacaatttaattccaaaatccatattattcatttaggaaaatcctaactttgcaagaaggtaaataataa

SEQ ID NO: 5918 - DNA, 2789 bp, Unknown
  gut microbiota DNA sequence
atcatcatagtactacgaaatggttttgccgtaaatgaataatacaaggtaattttatgttatcattattcaatgttttccacgacatctttgtcacagagacatcataacccaatttctcagcggcatcgcgcatagatgaaattgaagtcccgtctctagatacttgacacaattctcttagatatgcaagagaatactcttggccatagtattttgatatgatttttagacaactcggaccgcaatcttttgtattatattgaataaatgatgggaacttcattgacaactcacaaattaattattatctactcaaaataccggaatctttgtctttgttttgtatcttaaatttcacatttgacttgttcttaccgaatgcaaaattatatacaaggttgatatagaccatattggcattattgattatgcgttctgtttcatctcgttgtagaagtgatgtccctgatacagatgttgtctgtttccacgagtcataaaacgggtatcttattcctcctgtcaaagtgaggtttttaaccggactgtacgacacttctacgcttgccatacttggaattgttttcattgtctgacctacaagagatttcttttcagtctgatagaataccgaaacgccccattttttgtaagctaaatttacggatggaataaaagagtatcctgtataattccatttttcgttttccaaagcgttgatttggtggaatacttcggaatacagtcttagtcgcagaatattgttcgagaatggataccactgtagaaacagactggctttcatgttctgtgcattatccaaatttccgaatgtctcaatgatattcgtatcgtctgattgaaaaaccggagcgatggcatctttgttataggagtaagcgacttctgcactaatgacaaatttcttgaatcctttgaaatacgacaaagacaggtcgtgattgttacttggtttcagattcggatttcctacatacagatagtttgcatctttgaaataaggattgtatgtcaatgaagaaattgcgggattttcggtattcacttcatagttgaatgtcaaatcagaactttcgtcgatgaagtaaccgagtttcacctgtggtctgaaataaacaaacttatattccttgttttctattgtggtaaatatatttccgtttacaccggcactgacactataattgaatttctttccaagcatacctgcaattccgagatatgagtagatttcattcgtcagtgtacggttgtttgaagggagattcttttgcgtactattgttgtacatataccgagaaccgacatataactgtgccgtcttcatattgtagttatatacggcttctccaataaacgaatatttatcgagatttatattcgttgccgtttcaaaatcagttactccaccgctcaattcagaatatcggtagtcataatcggatttgtagtaagttccgacaaggttcatcgttagctcatgcttggcattaaatgttttgctgaaatacatatccattactggactgatgtatttgtctttatcggaactttctccaaatttttcaaataccacatcgtcaatagtagaaaaaatatcttgcttggaagaacgtctgcggttcagagaattgaaagagagttttgtactgaaaatatagttgtccggtttagagttgttgaaactgatttctgccaattgctgttcgtacgcgtatggactgttcttacctgtcttttgtttttgatatgttttacctcctacggcataagtcatattttcatccaatatgcgtttgttgtaattgcggtagttgatattgtatgttaccccaagttgtgagtgtccccagttatatttgaaattcactacattgtttccgaatccggtagttactgcattttgggtgtttaatccgacagaacctccattttgcttttctttagtcacgacattgattactgcacctaatcccatattggaatattggataggtggctgggtgtaataatctattttagaaatattttcgggagaaattacagaaaggtcagtcggtgtagaaggtatgccgtttatcaaaatttttactgctttcccgtctacagaattgacagtttggtcgataacttgtattttgggcagatgttctaatgcagacaatgcactactgtattgtcctttctctatgttggtaagtttatattccttcttgtccgcaaacctcttgaccatgctcgatgtaactacaacttcatccaataacatggtattttctgataatactatttctcctaaatcaagagattggtctaattcaaattcttgtcgatagtccgtataaccgatgaatgatatttcaatgcgatacttgccggactttattttctctatagtgaattgtccattttcaccggtgatacatcctttatgattcagcgtgtcttgcaaagagcgtattattacgcttgcaccgataacagggtgcgtttccttatctttaacaactcctttgactgtatgctgactccatgccgatacagaacataaagtatagcataagaccataaataggacattaaatcttttcatgattatcataaacaaggctattaagtaattgatgttggttcggaagattttctatatacaaatcttccatcctcttggctaatgccaagattgtttttactctgcaggttgtttggatattacaagaatgacaattataacagttcgatgtgcttaaatatttaagatattc

SEQ ID NO: 5919 - DNA, 6428 bp, Unknown
  gut microbiota DNA sequence
ggcgttgtttccacagataacagaagaactcctgaacaatatcttccgcgatctcccgttccttgacaatacgactgctatagaccaccaacggagcatagtattcccgaaaaacagccgtataggcctccctatctccttgcgataatctttgtatgacagacgcgtctattttcatacttcccagttcaacgcatatattttaaattcaaggcatacatcacgataaagataacagcaaaaatagcagaaaacaacataccggcaagtaccataaaattaaaaccggcaaaataaggcagcacaaacaacatcaggatttgagccgccgtatagaaataaaaaccgatacggcgcaattgaaacatcagaatagctcccagcaaactgatcacactcaacaccaggtttatgacagcaatctctttagcatgtacaaaagtggcctgtaaactcgccatggtcgaactcaggatatcggaaagcacggcagaatcgcccccctggtccataccgttcagcatggaagaataatgttccatctgcatcgatgagttggtcaatccggctgtaaatacagaaaataaattggataaagttccccaaccactaccgataaaagtaagaatacacaataccaataaaaaagtcgggcgctgaagcttgttctgctgttcttcaaaaggattttccatgtttttcaattctgtttgttcacattctattgggtacaaagatacaaaattcaaaaaatatctaaccgattacatcactttcaattcaaaacttttcaacaaataaaagtttaaaatgctttgctttggaaaaggatttagtttaattttgacaaaaatatttttaactacttaactatggaaagagataccgttatatttgacctgattaaaaaggagtgccagcgtcaaaaagaaggaatcgaactgattgcttctgaaaattttgtgagtgatgaagtcatggaagccatgggatcctgcctgactaataaatatgcagaaggttatcccggagcccgttattacggtggttgccagatcgtcgaccagaccgaacaattggcgatcgaccgggcatgcaaattattcggtgccgaatatgcgaacgtgcagcctcattccggagcacaagccaatgctgccgtattctttgcctgtatgaaaccgggcgatacttacctgggactggatttggctcacggaggtcatctgtctcacggctcacctgtcaacctttcaggaatcaactataaaccgatcgcttatcatgtaaaagaggataccggtctggtagactatgatgaaatggaacgcctggcgctggaacacaaaccgaaaatgatcgtttcgggagcttctgcctattcccgtgactgggattataaacggatgcgtgaaatcgccgataaagtaggtgcaatcctgatgtacgatatggctcatccggccggtttgatcgccaaaggcctgctgaacaatccgttcgaatattgtcacattgtaacgaccaccacgcataagaccttacgcggaccacgtggaggtatgattttacttcccaaagattttccgaatccctggggattgaaaacaccgaaaggagaaatcaagatgatgtcacaagtcatcaatttttcagtattcccgggacaacagggcggaccgctggaacatgtcatcgcagctaaagcggtcgctttcgaagaagcgttgtccgattcttataccgaatatgcaaagcaagtgcagaaaaacgcaaaagttatggcacaagctttcatggataaaggatataaagtggtttcaggcggaacagacaaccattgcatgctgatcgacctgcggaccaaattcccggaactgaccggtaaaaaagctgaaaacaccctggtaaaagccgacattacgatcaacaaaaacatggtgcctttcgacagccgttctccgttccagacttccggtatccgtgtcggaactccggctatcacaacccggggactgaaagaagaggatatgaaagtgatcgtcgacatgatcgaccggatcctgtcgaatatcgacgatgaaaacgtcattgcagaagtgaagaaagaagtcaatgcgatgatgaatcctcgtccgatgttcgcctggtaatagaaagatataacccattaaaagctgccttgagggcagcttttttgttttcctctcactccagtatcttaaaagcaatatcgagataagcatccatatcgatcgttttctcccggatatattcgtcactgcgtttatgccccaaacgaatcacgatagcctttttctgaggaatgacaaacatatactgtcctcctagcccccgaaacgcaggaaaccgcatctctttgtaatgcataatccagatttgaaaaccataataatccaatgatccgtctccgaattcattttccaaatatccggctggggttatcgcttcattcagataagtttcggagatcagctgccggccgttccaatttcctttattcagaatcaaacgtccgagccgcgccaaatcccgggccgtcgtattgaaacaacaatatgttttctcatccccgtcttcccggtccaggttccacaaagcgtcgttgcaggctcccaggggtttccataattttctttcagcatattcactgatactcaccgggctatggactttcacttctgtcttaaagatcccccactcatattccttctctttatgcaccttatctaaagctgcttcgagcacaaatgaaagtaattgagtatcaccgcttttataggaatacttttttccaggttcttcgactactttcaaatccataatcaaatcccggatccgatcaccatagtaagcctgagtggttttcgaaatcagggcggtataggcttcatcccagtccaatcccgaactcatcgtcaaaagattgcggatcgtaattttatccccctccccgaattcaggcaaatatttgctgactttatcgtccagactttcgataaatccttcgtcataagctatgccgaccagcaggccgacaatacttttagtagcggaaaatatattggaaagcttttgcggtgtccaatcttcccggtattcctcataccggatactatcgtcctgaatgacgagataagccaccgttccgtatttttcgagatacgcctcttcgtcgtcggtcatccggtatcgattggcgtccctggcctccggccattcccagcaggaatcagcttttcccaccgtatccgacggaaaaatataggtatccgaaatatccgggaaccagtgaatcaaagcctcctgcatataagtcggcatcagcagaaacagcagggcaatccccagaaacaacaaggcactgatttttttccattttctgctcttcatattccgccgaacttttctttaacctcccttttcacattccctcaaatcctcggttgtcaaacgttccggtaagaaacgggtgacatccccgccgttcaaataaatattacggacaatcgtcgaacttacaaatgtatgctcggtcgaggtcagcacaaagaccgtctcgatacgtccgtccatggcccggttagcttgtccgacagcacgttcgtattcaaaatcggccgccgtcctcaggccccggataatgatgtgggcattcacctgcctgcaaaaatctacggtcaaaccgaaataaggttctaccgtcacccgatcggtatcttcaaaagcctttctaatcaaacgaatacgacaatccgtatcgagaaattccttcttaacgggattgacaccgacagcaataataatcttatcgaacaatttcaagccccttcttacgatctcttcatgcccgaccgtaaaaggatcaaaggatccgggaaatacagcaattttttccatagtcgaataaatcaattcggcaaacatagcgaaacaaacgttataaataaaagaaaaagtcaaaaatattgccattcacttacaatttagaagcagaaacaaattctcacaaacaattaatgaattttttctatattttcttgccactttattagaagttgtcgtttaaatttaatatgtttgtacaaatcaaaataacaaaatacaaacactcaagttatggcacaaaaattattaatcagagatcttactttgagagacggccagcaatcttcttttgcaacccgtatgactcagcagcagatcgacagggtattaccgttttataaagatgcaaacttctatgcaatggaagtttggggaggagctgttcctgattcagtaatgcgttacctgaatgaaaatccatgggacagattggaaaaaatcaaagccgtagtgggtaatgtatccaaattaacagcattatccagaggtcgtaacctattcggatatgctccttacacagacgaaattatcgaaggtttctgccgcaattcgatcgaatcgggcttaggaatcatgcgtattttcgatgcattgaacgatgtgaacaacgtcaaatcgaccattaaatatgtgaagaaatacggtggaatcgccgactgtgcagtatgttacaccatcgacccgaaatatccgaaactgggcttactcgacaaattgaaaggtaaaaagaatccggaacctgtatttaccaacgcctatttcctggacaaagcaaaacaaatggctgccctgggagccgacatggtgaccatcaaagatatgagtggtttgatccaaccttcacggattgcagaattaattccgttattcaaacagaatctgtctattccggtagatttccatactcactgtaccccgggttatggattgggtgccgtcctgatggctatcatcaaaggcgtagatatcgtcgataccaatatctggaactttgccggcggaaccggagcccctgctatcgaactggtttatatattctgtaagaaattaggtgtcgaactggacgtcaacatggaagccgttgctaaaatcaacaaagagctttacggcatccgtaaagaactggaagcggtagatgccagcaagcaattcccgaatccgttcaacccgttgacagaccagttaccagctgaaatcgacaaagaattcgataaagcgatcgaagctgccaaagcaaacaacgaagaagccttattgaatgcttgtcatgctatcgaggcgtatttcaatttcccgaaacccaatgaattggtaaagaaagccgaagttcccggtggtatgtacagtaatatggtcgctcagctgaaacaattgaattctatggatattctggaaaaagctatggaattgattccgaccgtacgtttagcagccggattgcctcctttggtaactcctaccagccagatcgtcggtgcacaagcggttaactgtgctctggatattaaagccgggaaaccgatgtacagcaatgtttccaatcaatttgtgaacctggtgaaaggggaatatggaaaaactccggtccctgtagatcccgaattccgtctgaaaatagcaggtacccgcgaggaaatcccttacgataccagcaaataccaaatgcagccaaaccccgaattaccggaagcaggcggtgtgaaactggctgccaatgagaaagaagtattgttgctcgaactcttcccgcaggtagctaaaaacttcctgactaaacagaaagtggctgcttatgaagcacagcataaagctgacgcaccccaggcagaaaaagtggttgctgaagagaagaaaaacgaaccgatcaccggtaagacggtaaaagcaccgatgccgggtagtattttacgtttcaccgtaaaaccaggcgatacggtaaccaaaagtcagactgtagtcatactcgaagccatgaaaatggaaaacagcatcgcaaccgactatgcaggtactgtaaaacgtttgttggtaaaagaaggtactactgtagctgccgatgctccgatgatcgaaatcgaagcttaatcattataaagtccatgaaaaattctttcatggactttttttatatccattcgtcccaagctttacaagcccaatttgggaaacataaccttttcgtccccctcggccaaaacagcatccaggtcttccccttcctgaaggtagaggttaatattattgatccgggcaaactgatgactactacgaaaatcctcatatctttcgtccaataattcattaaaacggtctgtcctttcttccggagtcatctcctcccactcttcttcttccaggatatccagcagaaactctgccgcccaacttcccaattccttttctttattccaatccggctcgtaactgtctaaaactttaaaaagctcctgcaaatacgcagaatccccccactctttataaacctggaccagatcttcctgatccggataagctacggc

SEQ ID NO: 5920 - DNA, 22917 bp, Unknown
  gut microbiota DNA sequence
tataaaatacaccgttttattcaatatacctaattagaaatagtgtatcgaagaatagttgcatagccatattcttcgatactataatcaattattaatgtaaaaatataaaagaaaaaagaaagaagccaaaatcatcagtattaattggtacttttttctttctttaatataataataccattcttcgggtaattttctttatcaaattggaaagaatggaaaagggccgggggaatatgtcaacttgcaatcttctgttcaaataaaaaaaattcttcttttgatattatcgatctcaatggagccaaatatttaaattactctcccgataacggagtgaatatagaacaacctctccctgtcagagtagaaggttatcctgaagtgtggcttaacgatacattgcttttgatgagttataaacgatcggtcattgcgacattgatttttttgttgtaattttggaagctaaaaaatcggggcatggctaaagaaaaagtaagactttgggatcgtctgaaatataaatataaactttctgtcattaacgagacttcttatgaggaggtgttcaatttcagattgtcccagttgcatgtattgactgcattgagtgtgctggcggtaattttggtcgttctgaccattttattgatagctttcaccgacttgcgggaatttattcctggctatccggatggaaatatgcggcagatgatcgcccaaaatgcgctccgggtagattcgctggagaatgaattgctgaagagagaccgctttttcaaatccatccggttggttttgaatgggggagataccacttccctcgaacgttcgcgggaggatacggcgcgctaccggaacgataccatccgatttcagatcagcgaacaggaaaatgaattccgggctgctatcgaagagcgtgaacgctttaatctatcgctgggaatgaaagaacaaaaccacgattattatcattttttcccgcctgtggaaggaattgtaacccaaagcttcgatgagaagaaacggcattacggcactgatattgtggcgaaagccaatgctaaggtggctgcggtattggatggggtcgtgatttttaccgattggacggtgaagaccggatatgtgatccaggtgcaacataccaacgacctgatttctgtatacaaacacaattctatcctattgaaaaaacagggagattatgtcagggccggagaggtcctgggggtagtgggaaataccggagaggagtccagcggcccccatttgcattttgaattgtggcgggcaggtaatccgctcaacccggagaattttattaagtttaaataaagaatcggtaaccggaagttgtttcggcaatttcggtttggaagaatgaatatatgagaaagattgcgatattaggttcgacaggatcgatcggaacacagacgctggaagtggtggaagccaatcccgaacggttcagtgtcgaagtgctgacagccaataatcatgtcgatttattgatcgaacaggcattgaaattccacccggatagtgtggtgattgccaatgaggagaaatatccgcttctgcgcgatgccttacaacatgaagatataaaagtatttgccggagccgatgcgcttgtccagatcgtgacttttgcagacgtcgatctggtggtgacagctttagtcggatacagcggtttaatcccgacggtaaatgccattaaagccggaaaaaatattgctttggctaacaaagagactctggttgtagccggagaattggtcaacgaatcggtcgcagaacatcgggtagctattctgcctgtcgattcggaacattctgccatcttccagtgtttggccggagagagccggagtaaagccgaaaaactgattttgaccgcttccggaggtcctttccggggaaaagaccgggcttttttggaaaaggtgactcctgccgatgctttgaaacaccctaactggcatatgggtgctaaggtgacgatcgattcggcttctatgatgaacaaagggtttgaagtgatcgaagccaaatggttgttcggcatgaaacccgaacaaatcgaagtggtggtgcatccccaatctatcgttcattcgatggtacagtttacggatggctgcgtgaaagcccagctcggagtgccggatatgcggctgccgattcagtatgccctgactttccccgaacggactacagctgatttcggacgtttggatttcaaggtatgtcattccctgactttcgaacagcctgacgagaaaacctttcgtaaccttggattggcttacgaggctatgcggcaaggcggaaacatgccctgtatcctgaatgcggccaatgaagtcgctgtggctgccttcctgcaagggcgcctgtctttcaccggtatgtccgatctgatcgaaaaaacaatgcaacaagtagatttcctgaagaaaccgactttggaggattatatggaaaccgatcgcctgacccgtgaaatcgccaggaaaaatgtatcccccaaaatacctcctctatagctttttagcttatagtcttttaactttaaccttttactttttacctcatatcatggatatttttataaaaatagtacaatttgtcttgagtctttctatcctggttttgttccacgaattcggacactttttgtttgcgaagttgtttaagacccgggtagaaaagttttatatgttttttaatccctggttctctttatttaaatttaaaaagggagagaccgagtatggagtcggttggttgccgttgggtggatatgtgaagatcgccggaatgatcgatgaatcgatggataccgagcagatgaaacaaccggctcagccttgggaattccgggctaaaccggcctggcaacgcttgctgattatgttgggcggggtattggtgaacgtcttactggcttttgtcatttatatcggcatcctattcacctggggggagacctatcttcctgcaaaaaacgtcacttacggagtggtatgcgacagcgtcttcaaaaatatcggaatgcgaaacggtgatattatcgttgctctcgacaataaagaagtggtccgttttgacgatgtgcttcccgaaatattgttcaatcgttccaagaccattcaggtattgcgcaatggagagcaagtttctttggatattccggatgactttattgctacgctgctggaattatcgtccaagagtttcaagctgaatccgctgcttactccccgtatcccggtcgatggaatcgagatacaggacttcggggattattctgtggcttatgatgcaggtatgcgaaaaggggataagattctgtctgtcaacggacatacttttcgtttttacgatgaattttcggatttgctcgccgccaataaaggaaagcgggtggaaacgaccgtattgcggggagcggatacattgtcttatgcttttgctttgggggaagacggaaaattcggtttttatcctttgctgactgccaatgcctatgaattggcgactcagaaatatacactggcagaagcgattcctgccggaatcgagatggggatcggacaactcggctcttatgtgaaacagctgaaattactcttttctcagggagataccgcttataagtcggtcggtgggatggcttcgatcgccaacattttcccggggtattggaattggcattctttctgggaactgaccgctttgatctcgatcatgctggccgtcgtgaatattctgcctataccggctttggacggaggacatgtcctgttcctgttgtatgaagtggttacccgtcgtaaaccgggagagaaatttatggagtatgctcagattacaggcatgatttttatcttcggcttatttattctggctaatgtaaatgatataattaaatttttcgggtaatgaaagatcagattgaagaattcagagcttaccgggccaaaatgaacgagaggattctggcagccgataataaagtgatcaaaagaatctacaatatcgataccaatacttatatggaaggggcactctcctccaaggtaaaggagatgttgggactggccacttccatggttttgagatgtgacgattgcatcaagtatcatttggaaaaatgttatgaacaaggggtgactactcccgaattgttcgaagtttttgctgtggccgacgtggtgggggggactatcgttatccctcatttgagaagagctgtcgaatattgggagctgttgcaggctcaaaccggcccggaggtcgaaaacgaaaaataaagcatgaggtataacggttcttccttttcgatgagaacggaaagctgatagaacgtctgtattattatctggactgccggcggggaagtatgattctggattatatcggttcggatttgtataaagatatggtgtggagtgattatgtcaggatgaggtcgaaagaatgcctgtgatcgggttggttgataaagctcatttcaaaattcagacaaaaatgaaattattgggtatattattcttgctttgtgtgctgacgatgcctgttttggcacaggatcattgccggattatgttttataatgtagagaatttattcgataccgccgatgatccctcgactgccgacgacgagttcactccccggggaaagaaacattggacgaaggctaaatatacggataaattattgaaaatcgcagaagtgatcgatagcgtgggagataaagaactgccttgtatcatcggtttggcggaagtggaaaatcgctgggtattggaagatttaacgcagaaaacggctttggccgacgggaattatggaattgttcatcaggattctcccgaccgccggggtatcgatgttgctttgctttaccggaaagattgtttcgaacttttagaaaccgatttcttgcgcttgtcatttcccgaagataccaccatccgtacccgggatattttgtatgcttccggggtgttggattcggatacccttcatttttttgtctgccatttcccttcgatgatcggtggagagaagcaaagcgagtggcgcagagaacgggcagcttcgacggtacggcataaagtcgattcattattggctgttcagccccgcgccggtattgtaatcatgggtgatctgaacgggaaagcaaataccccggcacaaaaggtgttgggtaccaaaagttccgataaaaaaccgaggtgtaaagatttatataatacaggctattatttattgaaaaagaattacggcagttaccgttacaaaggcaactggcagaccatcgaccacctgattctttcgggagctttactggatgggcactctgtctggaaagccgatcggcggcttactgttttttcagctccttttctactggaagaagataaaacttatttcggatacaaaccttgtcctacttaccggggaccgcgttatgtcggtggatatagcgatcatttaccgatatatatcgatttgaaaaaatgatttctttttctatttttgccgcgcaaaattcataacaatagatatggacgattatcatcaaaagtattaatctgaacaaaggttttctcaggcctttgttcgtaacgaatggagggttttatatgagaaaatttttatgttgcagggataattttgccgaaaagcaggcctggcaaaaatactgttgggtgaatatcgaaatgccgaccgaggaagatacgctctaccttactcgtgatttgaagattccttctgcatttttatccgatatccgggatgtcgacgaacgtccccgtatcgaaacggaagatggctggaccttgatgattctgcgcatcccctaccgggatgaagggaacgatattccctatatcaccgttcctttgggaattatcatgaaagccgattattttgtgacgatctgtcaccatgcaacggatatgctgcccgattttatccggtatatgcagcgtaagaaattgccgatcgatgggagttgggatctgttgttcagattgtttttgtcttcctccgtgtggtatctcaaatatttgaaacagatcaataaccaaagccgggccgttgaaaaagaattggaaagatcgattcagaatgccgaattgcaacggttgctgaaaatcgaaaaatcattggtgttttttattacctctttgagaggaaatgacaacctgctggtgaaattgaagaatttaaaaagccaacgggaatttttcgatcccgatctggtagaagatgtagagatcgaactgcggcaggctcaggacaccgcccgaatctatagtgatatcctgagcggtacgatggatgcctttgcttcggttatctctaataatctgaacgtaatcatgaagcgtatgaccgctatttccctgcttttgatgattccgacattgattgccagtttatatggtatgaatgttcacaatggattggaagacagccattatggactgtttgtcatcgctattatatcggttgctttttctatattgagttattggatgttcaggagaaaaaactggctttaacaaagtgttaacattttgagggataaactcccggaagttttgtttgtctaaacctcaaaacagttatttttattgaaaaaagaactgaaaaaggtggcttataatttttagatcgtttattaagttcgtaaagtctgtcaggtttgtaaaggttctgaatcctgcgggcattttttacggttgtcggtgggaccgaccgggatctccggttccgttaaaaaggtgcacatagactttatggacttttagcgatgaaagggcaactttatgaactttataaactaaaaagggttgatttattggatgaaatatgaataaatacgtaaagagatcattacagatcgggattccgctggctttggcggcttggattataatcccccggataggtggagatggggtgcaatcaaaacaaaatacaccaggtaacatggggaaaggtagacttccggtaacggggattattgctaagaattccgttgtggctgccggatttccggtgaatggttctttgttggcaaacgaagaggtcgatttggtagcagagatcgtgggaaaagtcagaaagatttactttcaggaaggggtggccgttaaaaagggacagctgctattaaaagtagacgatgccgatttgcaggctcagttgacccgggcggagtttcagaaaaaattactggccgagaagctcgaacggcaacggattcttttgaagcgcgaatcgatcagccgcgaagccttcgatcagttacagaccgattataatatgctcgaagcggatatcgaactgctgaaagtgaaaatcagccgtaccgaaatccgggctccgttcgacggggtaatggggttccggtatgtcagtgaaggtagttatgtgcagcccagctcacaaattgcccggatcgtagacaactctaccctgaaatatgagttcaatattccggagaaatatgccgataataacctgaaagggcaggaagtattttttaaagtgaccggaaatgataaactttattcggccaaggtttatgctgtagatccttttatcgacgtgaaaacccgtatgattcttctacgggctcgtttccggaatacaaacggggagttgatgcccggtatgtttgctaaaggaaatctggtggtgggtggaaaaactgaattcattgccgtaccgacagaagccgtcgtgcccgaaatggacggaaaaagaatgtggatcgtgaaaaatggaaaagccttaagtgtacctgtcgaaacagaaagccgcgatgagaaaaatgtagaggtgacttccggtatcagtgtcggagataccatactcaccggtgggttgatgcaactcagagatgggatggcagtggaggtgaagatgaaaaggtaaaagctaaaggctagaggcaggggagaaggtaaaaaggagaagggattctgagatttgacaatttagtgattcgatgatgtaataatgaataacttaataaactcacaaactctgcaacttagtaactctattaactcagcaactcagtaactctataaactcagtaactctataaactcagtaactctataaactcagtaactctataaactcagtaactctataaactcagtaactcagcaactctataacaaatgagcttatcgtcaacatgtataaagcgaccggtatttgcaacggtgatgaacatcattatgatgttggtcggttgtatcggtctggtatttttgggggtacgtgactatcccagtgtcgatccgcctattatttcggtatcgaccagttttccaggtgctaatgccgatgtaatcgagacgcagattaccgagcctttggagtcggctatcaacggaatcccggggattcgttcgttgaccagccagagtagggacggacggagtaatataacggtagagttcgagttggaggtcgacctggagacggctgctaacgatgtccgggataaagtttccggagcgatgcgccgtttgccgaaagatgtggatcctccgaccgtaagtaaggcggatgccgatgctcagccgatctttgcggtttcgttgcggagtgaccagcggtcattgatcgacctgagtatgtatgccgatcagtactataaggaacgcttgcagacgatctcaggagtgagtagtgtctccatctggggagaaaaaagatattccgtacggatgcggatggatccgtctttgctggctgcttatggaatcactcctatggacgtgaggaatgctgtgactcaggaaaatgtggaattgccttccggacggatcgagggagaaaataccgaactgactatccgtaccttgggacgactgatgacgatcgaggattttaataatctggtcatcaaagaggagggcgataaagtcattcgtttccgggatatcggtattgcagaagtagacgccgaagatacccgttcgattatgaagcggaatggggtgccgatggtggcttgtgccatcattcctcagccgggagccaattatatcgatattgtcgaccgggcgtatgaagtgatggccgatttgcaaaaagacttgcctgatgacgtcgaagccggaattgctttcgataatacggtctttatccgcaattcgatcaatgaagtgaaagacacgattgtggaggcttttattctggtagtgttgattatcttcctgttcttacgcaattggcggacgacattgattcccgtattggctatccccatctctttggtcggtgctttttttgtgatgtatctggccggatttaccataaatattctgaccttgctggcgattgtgctggcgatcggtctggttgtcgacgatgcgattgtggtgatggagaatatctatacgaagatcgaacagggaatgtctccgctcgaagccggtttcaaggggtcgaatgagatcttctttgcagttatcgctaccactatagccttggtggctgtgtttttcccgattgtctttttgcaggggacgaccgggcggttgttccgggaattcagtatcgtgattaccggggcggtcattatttcttcatttgtcgctctgacttttaccccgatgatttccaccaagttgcttacccgcaatgtcaccgataactggttttaccgtacgacggaacctttcttcgacggtatggtcgattactaccgccgggcattggaaggttttatgaaataccggtggatcgctcctttgatactgatcggttcgggcgtggtgatctggttattgtggcaggctattccttcggaaatggctcccctcgaagaccgttcgaatatccggatcacctctacggctccggaaggcgctacgttcgagtatatgagccgatatgccgatgagttgagtagttatatcgaacaagaggtccctgaacaggaaaagataatcgaaatgatcggagggggaaataccaatcgttccaacttgaacctttggttggtagatcccgaagaacggggacgtacccaacaggagattgccgatgaattgggagtacaggtacgtaattttaccggagcccggacgatggtttcacaacagcagacttttggcggacgtcgcggaggcttgccggtagaatacgttattcaggccaagaacctcgacgacctgaaacgggtattgccccgctttatggatgaagtgaataaaagtccggtattctcggtggccgatttgaaccttaaatttaccaaacccgaattgaccatcaatatcgaccgggataaagctgccgtattgggcgtttctatgcagaatattgcagagaccttacagctgaccatgagtgaacagcgggtcggttatttcattctgaacgggaagcaatatcagatattgagtcagatcgaccgcgaaaaccggaataaaccctctgatttacagaatatctatgtacggaataataatggtgaattgattgcgttggacaatctggtgacgacttccgagagttctatgcctccgcaattgtatcgctacgaccgttttgtggccgctacggtttcggctggattggctaaacgaaaaacgatatcagagggattggctgaaatggaccggattgctgccgatgtgttagacgataattttaagacgacactttccggtagttcgaaggattttgtggaaagttcgtccagtctgatgtttgcttttgtattggcattgatattcatttacctggttttatcggctcagttcgagagtttccgggatcccctgatcattatgtttactgtgcctttggcgttgatcggggcgatggtgtccttgtggtatttcgatcagactatgaatattttcagccagatcggtgtaatcatgttgatcgggctggtgtcgaagaacggtattctgattgtagagtttgccaaccagcggaaagcgatgggtgaaccgatgctgatagctgtgaaaaatgctgcagtcgctcgtttccggccgattctgatgacgagtttgtcgacggttttgggtattcttccgatggctatcgctaccggtgccggtgctgaaagccgggtggctatggggatcgccgttgtcggtgggatggtatgtgctactttcttgtccttgttcgtgattccggcgatttattcttatctgtcgacagaaaaggtgaacgtgatcggggaagagcataaagagtaaagaattttttgattatgattatgggaaaatatagtttactattcttcatcgtttgttttttattttttattccagggttttcttctgcccaggttaaaattacattggatagttgtatcgcccgggcgttggaatcgaattattcgatcaaaattatccgcaatcaacaacggcaggctgaaaataacctgaattacgggccttttcttccgactatcggtatcgatgctgcccagaaacaatcgattaccgatagtaaagtggtctccgacggagaagacagaagggccgataattcccgttcggatgctttgagtgccggagtttctctcaactggcgtttgttcgacggtatggaaatgtttatgactcacaatcgttatgccgaaatgctggcgatcggcgaactgaacaccaaggcagctgtcgagaacctgatcgtcgaagtaagttcttattattacgatgttgtacgtcagcacagtaagctcgaagctgcacggcattctttggagttgtcgagtgcccgttatgccgaggcccgtgataaatatgtgatcggagtattgtcgggtttggaggcccaacaggcaaagctcgatttaaatgccgacagttcgaattatatgaaagaaaaagaattgttgaaaagtgcttatatttcactgaatactatcatgaataccgatctgcaaaaacatatgtacgtagatgattctatccggctgcatatgcctttgcaatatcaggatttgttgaccgatctgttgcaatacaatacgaccctgcaaatcggacgccgggaccggaaagtctctgaattggacatgaagatcgcccgggccgctttgttccctaaattggatttcgatgccggatataactacaaccgcaccaaatctccggcctcggtcacttccctcaaccgttcgaacggtccgtattggggtttttccctgagtgtggatatttttaaccgattggaaaaccggaggaagatcagaaatgcgaaattggatatggaaaatgccgccctttcttatcaggaagcggaacagcaggtaaaagccgatttggcacagctctacaatacctacgagaataacctgcagatcgtaagctttgaggaagaaagcgaacgggttgctttcgataacctcgatgcggcactcgaaaagtataaattgggaaccttgccgggaatcgaattcagggaatttcagcgcagttatatcgatgccgtcgaccgtaaagtttctgccctctaccaggcaaaaatctccgagctgtcgttgttgctcattagcgggaaaatattggagtaatgcctgttttatttgaatgacttaaaatgaaaaatgtttttcggatcaaaaaatattgtatctttgctcaactagtaataacttaaaaaaaattgtccatgtgtcgagttttaattatcggtgccggaggcgttggtaccgttgttgcgcataaagttgcaaagaataaggtttttaccgatattatgctggccagccgcaccaaatcgaaatgcgacgagatcgctgcagccgtagggggtaatcgtattcagaccgctcaggtggatgcagatcatgttgaggaattgaccggacttatgcgttcattcaagccggatattgtgattaatgttgctcttccttatcaggacctgacgattatggaagcttgtctggaagccggagtgaactatttggatacggctaattacgagcctaaagatgaagcacatttcgaatatagctggcaatgggcataccatgaacgctttaaagaaaaaggattgaccgctattctgggatgtggattcgatccgggcgtatcggcgatctttaccgcttatgctgccaaacatcacttcgatgaaattcaatatctggatatcgtagattgtaatgccggaaatcacggaatggcttttgctaccaacttcaatccggaaatcaatattcgggagatcacccaaaacggacgtttttatgaaaacggacaatgggtcaagacaggaccgctcgaaattcataagaccttgacttatccgaatatcggggaaagagagtcttatctgttgtaccatgaggaactggaatctctggtcaagaattttccgaccatcaaacgggctcgtttctggatgaccttcggacaggaatacctgacccatttgcgggtgattcagaatatcggtatggctcgtatcgacgaggtggaattcaacggagtgaagatcgtacctttgcaattcctgaaagccgtattgcccgatccgaaatccttaggccacaactatcatggcgagacttcgatcggttgccgcattaaagggctcaaagacggcaaagaacatacttattatatttataacaattgtgaccacgaagctgctttcaaagaaaccggtacacaggctgtcagctacaccaccggtgttccggctgccctgggagccgcgatgtttgcaaaaggactttggaaaggcgcaggagtgtataatgtggaacaattcgatccggatccattcctggcagaattaggagaacaaggattgccttgggttgaaaaattcgatatcgacctggaagtatgatcgataaggatacgattctgagcaactgggatttatccactgtcccctctccttgctatgtattgcatgaaaccttgctggcagacaacctgagggtgatcgacaaggtgaggaaggctaccggagcagagattatcgtagctttgaaggccaacgctatgtggagtatttttccggaactcagcagacattcggatggagccactgccagttcgctggcggaggctcgtcttgtttttgaagaatatggcgctccggctcatacttatgctccggtgtataccgaaggagagatcggcgagatattgaattgcagcaaccacatcacttttaattcgttgggacaatacgagcgtttcggacggcgggcccatcgggcaggtgtctcttgtgggctgcgggtaaacccggaattttctactgttgaaaccgatttatacaatccggccagtcccacttcccgtctgggcatattggctaccgacctgactcatttaccggaaggaatcgatggtttacattttcattcgttgtgtgaatcccgtccggatgatttgagaggtacgctggctgctgtcgaagaacgattcggccggtttttcccgcaaatcaaatggttgaatatggggggaggacatttgatgactcataaagattacgatgaggaggaactgattcatatcttgtgtgattttcgttcgcgttatccgcatttacggatcattctcgagccgggtagtgcatttacctgggataccggttgtctggtggccactgtcgaagataaagtcagtaacggaggtgtcgatactttgatgttgaatgtttcttttgcctgtcacatgcccgattgtctcgaaatgccctataagccggctattttaggcactcatgaacctgccgaaggggaaaagcgttggcggatgggaggaaacagttgtctggccggtgattactatggagattgggcttttgacgggggacgtgagccccgggtcggagatcgtatcgtttttcgcgatatgatccattatacgatggtcaaaacgaccatgttcaacggggtcacccatccttccatcggaatttggaatcctgagaccggttttcgtctggtccgtaaattcggttacgaagattataaaaaccggatgtcttgacagaaaaatttttgccgaagaggttgcctgaacgtttaaatctcacttttgtggaacttaaattccggaaagacttattgtgaggtagggtttatttttgctagtgtcggctgatgcggtgaaatggttgtcatattgttacattatgtagagaaagagggcgggagtatggcctgacgggaaatgcctggtgattggttgcccgaacgatttgtttgagaaaaagtgggatggaagaaccgtcccggaatccctgttattcttcccgggattggatatatgcccgccatttttgtatcagttgctgcatatcgtccgggatttccgagtcgaacgacaggcgttcacctgtggtgggatgttcgaatcccagggttttcgcatgcagtgcctgtcggggacaaatttcgaagcagttgttgacaaactgtttgtacctggcaaaggtggtacctttcagaatttcatttcccccgtattctttatcgttgaaaagcgggtgtttgatatatttgaaatgagcacggatctgatgggttcggccggtttccaaaatacattcaactacgttcacatagcccaggcgttccaatacccggtaatgcgttacggcgtgtttgccatgactgccgtccggaaaacaggccatgactttgcggttggtcaggttgcgcccgatatgtccggtgatcgttccggtttcttcttccaggttaccccaacaaacggctacatacttccggtcggaagtcttgttgaaaaattgtaatcccagatgggttttggccttttcggttttggcgatgaccaataatcccgacgtgtccttatcgatccggtggactaatccgggacgcggatcgttattgtctttaaaaagcggattacctctcaggtgccaggccagagcgttcaccaaagtgcccgtataatgcccgtaggagggatgtactaccatcccggcgggtttattgactaccatcaggtcgtcgtcttcgtaaacgatgttcagggggatattttccggtatgatctcgatttcccgacggggataggccatgacgaccgatacgatatctttgggttttaccttataactcgatttgacagccttcccgtttaccagaatatttccggcatcggcagcttcctgaatttttgtgcgggaagcattcggcagacgtgacatcagaaatttatccacccggagcagattctggccattatccgcttcgatccggtggtgttcgtacatttcggatgcttgtccttcctcttcttcttccaataattcttcctcttcttcaaattcgggcataggatgctgttttagttcacgtttttattcggtaaccatcaaggagtcgagtgctgcaattttatctttttccagggtgatatgcaggttgacataagtacctccttcgactgtcgtctcgcccaaaggatcctgttcgtagatgacagccgagtaggcatcgtttttactctttatactggcatccgggagtacttcgccgagattcaggtaagatttacgaaggatatccagggcttcctgcagatttttcccggtcagttgcgggagaacgactgtattccttccatttccgcttcctaacacgatatcgataacggctcctttggtcagtaagctccctggaacgatattttctccgtcatgtttaagatccaataccagattatgaaattcggacggggcatattcgatatgaccgattttgaatccccggctggtcagggtttgcagtgtctgccggtaagcagcattctgcaggttcgggaaaaccactttttcagggttatgggcattgatgatcagatggatcagacggttttctttaacgtgtgctccggctaccggtgattgttcgagcacgactcccggtttggccgcatcgtcatacagggagtcggtcaccacaacagttaaatgagcatgccgggctaccgcgtgtgcttcctccactgtcaaatcgttaaaggcaggaaccggaataaattgtccgtgttgggtataactctccagatgggatagaacaaaataacctatcacacaaacgagaagaatggctgctaacagattcagcaggtaaaaggtgagtcttgccggaaattttttcatcggttacaatttggtttatggcctttgttgtgaaagcctgggttcatcaacttgcaaaaatagcgcagatttttaaattatctactattttttctaaatttgctgcttattaataggaatagctatgctaaaattattatttctgtttttgcttttatggtcttgcggtcaggtactcgggcaagggactgcggtaacgaagtccaacgatatcgttgtgattcggggaaagagttattatttgcataccgtgcaacccggtcagactttgtattcgatatgtaaggcatacggagcgaacatcgacgaggtaaagagtttaaatgataagaaagataatgcgttgagtttatacgaggtattgaaagtgccttataccgatccttttgtgcaacaggacgacaaattttattatcacaaagtggttaaaggagagactttctattccatcgcccggctttataagataaaaccgaaacgtttattgaaattcaatgaaggatatgcccagaatcaacccctggcggtaggagctgtggtgaagttgcctttggctgaaatcgatctttctgtattgggtgaagaagaaatcgaagcttcggtgggaaaaaagcaggagattcgccctgagcgtccggttcgaaacgagagcgtgaaaaaagtggaagaagcgtccgtgaccgatatcctgcaagatgccctgatgcaaaaaaacgaaaaaacggaacaagaaccggaaaaagagactacgactgttatcggggctaccgataaaatggagattccggattatatctccgaagtagtgatgcctgtcgatccttttgtgaaggtggctttactgctccctttttctgcaaaagattatcctgtatttgtcgatacgctggtggaaaaaatgccggtacagatttctgcccgttccgagcaatttatttctttttatgaaggggtattgctggcggtggacagcttgaaaaatcaaggatacaaagttaacctgaaggttttcgataccgaacggagtgcagagaaaatgtatactatggtcgatgaaatcgaccggtttcatcccgacctgatcatcggtccggtatatggctcggtgtataaggccttaatggatgatttaacgaataaaaatatcccggtcatttatcccttatcttcccgaagtgaagaatttggcgtgtatcctgattttatccaggtcaacccttctatgaaagcactgactgttgcgatgagtgattggttgcgcgaagaagcggaagaagcgaatctggtttgtctgaatctgacagggaacgaggtcagtcattcggacctggaagatattcgcttgtttaaggagtatatgcatcggatcggcagtatgaatttttatgattggaatacttcggcagttccgttggatggattgcgtttgcaattgttgcccgaccgggaaaatataatcattctgcctactacgaaagaagctgaagtcagtaagatattaccggtattatcggctttaacggatggttatcggattaccgtcgtcggcttcccggaatggcaggcctttacttcggtagatcatgagacttatttcaaactgaatacgaagatctttacctatagttatgtggacaataccacggagcctgccaaacggtttgccttaaaataccggaaatatttttataccgaaccgaataatctggcctataaggctttcgatatgagtctttattttattgaattggcggcaaaataccgggaccggacactggatgcacttgaattttatccgcgtaacggtgatttttcgcgtttttattttcaaaagatggaaggtcaagccggtaaagaaaatcagggtttttatatcgtcaattttggatccgactaccgattgaaaatagagtccctataagcgtaacttgtcagcatgatctgcgatataaataagcagacctaaagcataaagttatggcaaaattcgaagacatcattcagggaaatacccttgtgttcgtagattttttcgctacctggtgcggaccttgtaaaatgatgcatcccgtattggaagacctgaaaaagcagttggtaaattcctatcaggtacaggcggtaccgacattgatgttattcaaagcaggtaaaatggtttggcggcagagtggggcgatgcaagcaacacaaattcgtcaagtgattgaaaaacacctttgattatcagtgttttatatttcatctgttcgtgatcatccaaatcgcgaatgtataaaattatttgaatatccggttttcggaatgtcagaaatatctttcgtcggatgaattttttttgaggaaaaatagttacacccgatgaaatatctctgtatgtttgtggcgtttaaaattaaaacaaacaaatctgaaaaaggagagattcgaaagaatctgacaactatgaaaacaggtaaaaccgagttgccccgatcgacgagtggggcagatgagttctttattttacaggggaaaaaacagggagtgcggatcgagggagaagggtatgtcatccgggaattcagttactccgattgtgaatccttggcagaaaatgccgataacaacaaaatctggaataacttaatggataattttccgcatccctataccaagcaggatgcattcgattacatcagtatggtaaaagccatgccgggtaaaccgatgcgttttgctatcgaggttgaaggaaaagcggtgggaagtatcggattcggatccgaaggagatatagaaagagtgactgccgaggtgggatattggatcggggaaaaatattgggggcatggcattatgagtaaagtgttggaggatatcaccgaatatgcttttcaaaattttcattacgaaaaattgtacacgattgtattcagtacgaatcccgcttctatgcatgtatcgcaaaaagcggggtatcgacaggaagctgttttgcatcatgctgcagtcaagaatggtcatttggtcgatttttattatttctgtaagatgcgtgagcacgggtaagttttatatcccttttttatccctgacttgattagaagccagctgacaggcaacatattctccgatataaacagcaggaacaaacgaagtaaaagtttctccggtaagaccggtgtaaggtataccctgttctgtaatgaaaagccgataaggtaactcccggcggttaccgatctgataaaaattgtgaaaacaaaatacaggaaaatcgaaacttttcaggaagcagggaagtatattcttaaaataaaaagagtatttatggagaatttatgggctttgatcaaaggaaatttgccggtttttgtgatgttttatgcgagttggtgtccgcattgccgtaaaatgttacctatcgtccggaagctggagaataacaagcatttgaatttgcaatgcttcgatatcgatgatccggctaaccggcggttggtagattattatcaggtgcaggctgtccccttgatgatgatatacaaagccggagaacaactttggagatggaatggcgagatcgaagaggaagagctgatgcagactctgaagagattattgaaataggcttattttactcttcctccctgtttccatgtttttcggtaataatcttctttcaggttactgatgatgactcccctggaagtagaagcatggataaaatagccgtttttaaggaataggccgacatggtttattccttttctttttttccgggaagtattgaaaaatacgagatcaccgctacttaaatcgcttttcatgattttacggcagttgcgggtggctataccactactggaacgttcgagggatcgatgatagacttgtttgtaaatctgattcaccaacccggagcagtcgactcctttccgggtgctacttccatagcggtaaggggttcccagccatcgggccgcttccgaaaaaagacgcagatcgtctttacgattgactttaaaacccagttggtgggatagttggctcgtctgagtcgccgtttggccgagtcgtttcgtgctgttacaggaagacaggaacaggctgcaaaagaaacaacatccgatcagaatatatctcatcatgcccggactatcttatgaatttttttgaatcatatattcgttgatacctaaatttttataggttttcattaattcttcgtcattgtctgtgataacaagaagtttatcaccgatatctaaaccggtacctcctcttgggataaaaaagttatttccccgtttaaccataactaccagtgtattgtccggtagactcaggtccatcagacggtttccgttgaccagcaggttgtccgcaacttcgatttctgacatggccgatttgatttcttccggtagttccatgccgaaatcattaccttgtttgggttctttttccgataagttcaacaagttagccatagagctgactgtggttccctggatcaacagagatacgatcgtaatgaaaaatacgacattgaaaatcagggaagcatagggaatctgggcgatcagcggataggtggcgaaaatgatcggaacggcgccccggagaccgacccaggaaacatatactttggctttggtactcatttgcctgaaaggagccaggcataaaaagacactgatgggacgtgccagaatgatcatgaaaaaacccaccaataaacccagtcctgcaatgggcagcaagtcacgtggattgaccagtaagcctaaggtaaggaacatgacgatctggaaaagccaggtgaatccatcgaagaaggtggtgacgcttttcttgtgctgaatcttgtgattgcctacgaccaaccccgcgatgtatacggccaggtagccatttcccttcaccagctcggtgatagagaagataaagaatacacaggctaacagtagaatgggatagagagattggttgccgatattcaaccggttcatcagccatacggccatttttcccagtaagaaaccggctacggctccgacactcatctgaacgataaacatcaggaaggaataccataggtttgtttcacctgcaggagtttgtataatttggatgagcaataacgtcagcatataagccatgggatcgttacttccgctttcgagttcgagcataggacggagttgttctttcaatccttgttttttacttcgcaggatggaaaataccgacgccgagtcggtagatgacatcactgctgccattagcaaagattcagtcagcgtgagagcagaaaaatcggatacgagaccggtaatccaataaataaagaaaccggtaatggctgttgtcagtgccaccccgagggtggcgagtatgactccttggcccagtacaggtttgatttctgtgtatttggtatccataccacccgaaaacaagatgatactcagagcaatcataccgatgaactgcgctccatgaggattattgaattgtattcccaagccgtcgctaccgaataacatgcctacaccgaggaataataacagaacgggaactccgaaacgaaaaccggccttaccggcgataatactgaaaaaaaggagaacagctcctatcaataggatattgcctgtgtcgatgatcataggatagtagaaatgaaaaatttaataactcatacaaaaatac

SEQ ID NO: 5921 - DNA, 330 bp, Unknown
  gut microbiota DNA sequence
tttctattccgattccggtttttataccgtcagaccggttcgccaggaacggtccggtaaggctttcgttgatttcatcggttcttctcctgctcggaaaaacaaaatcttttgtttttctctcgcttattcgaagaactcactgaccggcggaactcctcactgtgcaaaaaaactttacgttacgtttccgtcagacaccaccgatcggacgttcggaaaacctaaccggacactcgttcccgctccaatggtcctccggcataaaaccctgcatctcacggcagagctaaccggcaaagaaaatacaaccagaaatttgcagtagca

SEQ ID NO: 5922 - DNA, 5356 bp, Unknown
  gut microbiota DNA sequence
agttctgtacaaaatatggaatatccaaattagctcatcgatgaccggtatcaggaaccggaaactttcccggttttcggtttatggggtaaaactccacatatcggcggggataggagtgtttgaattcaatcctccggtagtgatatatcccttaccgtttaaggaaaagccgacagcatacatccgctttatcataggagcagggagatcgctgactttcctccaatgatctttttgaatatcgtattcccaacaggtatgaagatacgggcccatccctgtcgtgatatatcctttggtttgtccgtccgttttgtccgaagtgaaagctacggcataagcccgcggaatctggtcgtattcttcgtcgtcctgatgggatttcagatttaccagggggtggggagcataccattcctgggttatgccgtcgaaaatatttacatcggctaaataggacgttttattcgccccgcttgtacccaggcagattaccgctttatcgtctatgacaaaaaccgaagctccgtatcgggcttcaccgggaaagtaaagttctgtccaggtcgaaccgtcgaaacaatataaatccttcaaagcatggtttttaggtgaaatgcctgtacctacgtaagctttattgtttaacgaaaaagcaatggcatctttgcgggcattactttcgccctgggcatcgggaggtaaataagtcaccggagtgtcgctccatttaccggtcgatgggtcataggcatagaaatcatgatgaaattcatctgctcgatttttggtggatggagtataacctgtacctacataggcgatattgccgagcacaaaagcaaccgctccgtaacgttctgtccccggaaagtcggcgatacgggtccaggtcgtatctttgtacatccaaaaatcttttaatgcctcggtagctgtagacaaagtacgccccaggccgacataagcgacgtctccgatagtaaaactgacccctcctgtacgtggaattcccttgaatggatgcgattcggtccattggccttgtggtaattccggttctgtatggtgatcgtcatgacaagcgataaaggctactagataaacaaggaacgaaaagtatttcatgattttgttttttttctttacaagtataattaataaacagataatttacaaacaaaatctaaaataaatgatcagtcctccacttgatcggtttgcgtatgtatatggttgagaattaaaggaattgccgaagtgatgctgatgtcgtagacattggcacaacgaccgctttcatccgaccgtaaatcttcataaggccggatgtcatagtgggcagtacgtttttccttgtatacgtttttcaattcgatatttttttcaatttctttttcttcttcgggagtcacagtccggtaacccattaacaattcctcgacattccagcggttgtgttctacttctgccaggatagcgatttcatgtggagtgagttctcgcattctatctttcataggtaaggcgattccgatcgagcggagcttagtggctatagaactggcattgtaaatattcgaccattgtttcactacccgtagcttattccatttttctgtcaattctttttcggaagggagatccgggggattgacagtatgctggtaaaaatagtcgtagacataattgatacatttcggcagatataaatcctccattgtcaggtcgtaacagcggttgaccattccaaatggccgtaaagcctgatattttatagaagaattgacgatttgtagaatcgtgtccgaggtttcctggcggatcaataccggaacctggtgggcatagacggcatccgggagataaagaccgagggcaagactggtatgcggaaaattaaaacagatggcaatggtcaatagtttatctttttcaccgctccattgccctaataaggtttggacaggttcggattcggcccttccctggataaaatcccattccaaatcgataaaatcggctgtcgaagttctggggcagggatgaaatgtcttgtcttgttcacaatccataaaccgggcttccgataagtcgaacaaatgacggtaacgtcccatgaagaaatccatttcccgtctggcttcccggtcgataaaggtgatccgcgtttttttccggtgagttttgaagttcgggaaatgggcgatatgggccgcttcgattgccagggctatacccatacgggtcataccgataatgaccagatgaacgtaattttccgagttttcgctaattcctccccggtccagagggaaataatgaatcgtgccgttactttccgcactgcattttaccaaaacccgtctagcccagatctcatagaaattgaaaggagtaaattcgatgtattgtttgatttgctgactgatatccgaaacctgaaataccgaaaaagtaccctgatattcgaataaaacatgacaacagagtggttttttacgtttggtttgttcgcagatttctgccacacgtttgacacagtcgatatttaaagaatcccggtcgtattcattcgcttctcctaagataaacaatttttccgctttatgaaccctggctttttttaattcttctttcgagtcccgccgtccgtgcaggatgaccagtctcctttcttctttccggttcagttcggcatggaatttcagtcgcacctgttcggtatcttcgacggtcaatacgacgatatcgcattttttatactcggcatttcgtcggagttgctggatcagataaggcaccatatcgtcgatacccaatataatgatgtgattggaaaaagcataatggctgtcgcctttgcggaaacgttccacccggcgttccagcatattcgaaaataccgaaattaaaatacccgtaagtaacaacatgcctgccagtacgaccaataaggcataaggacggttgacctctttttgattggcgaatcctcccggatcgataaaaagttctaccagatcccaaaaattcagtttttgggtttcttgttctgccggagaagtgaagacattttccgtctggggggagataccgacctggggacgcaggatatacatccccgcgaagaaaaatacgatcacactggtaagccagagtaattgtttccaccaggctcccgaaaaagtctggtcaaaccccaattttaaccatttccataaacgcataaaaccgtaaattggatgtaaatatgcaaatataaggaaagttgtaaccctaacaaacgacaggctgaagaaaatcgcaatcggatgaaataagggggagagtaactcatttatattactactgataaatttaagacatatgaagggaagaggcttgtttttgatcggtacacttttgttattatcggaagtactcttcggacaggacagaatttcggtgacgggataagtgacagaaaaaagaccgggaatccgttatcggagctgcggtggttgttaaggaagaaactatcggtgccattatcggaagtcatggttctggccaaaggtgctatgggagaagaacctgcgtatccacatctcgaattactagaaaaaggcactgattggtttgacgagattttcaggcttgattccgtcaggaattaccagattggcttgagtggaggtgctgaaaatgtaagttataatttgagtgtcggtttcttccagtaaaaagaagtgatcaaacagaatggatatcgtcggctcacgttgcgggcgcataatgaatatcacctctgagaaaaaataacgatcggacataatatgtcagctgcttttagataaaaaagtaatggcaaccccggtggtagtcggacaggcttaccgtttgagctttactattaaatcttacgataaagaaggagatttctcggattctcagaattcttctaccgggaatccgttggctacgatcgcttacctgaataagaatatccgggatgaccgggtgacgggaaatgcacatctcacttgggaggtaatcgaagatttgagtttccgtatcagtttcggtatcgatttactgaatcggcgggaatggatttttaggtatgaattttatgtctattctacttatcagaagttggcattaaaggccggggagacccggaacgttgagtttttgattacccccgaaacaatttctatgtataatttaaaaatggaatacggaccggaacccggtgattttaaagtctggatagccgcgaatgccgaagatgaaagcaatgaaggcttgttctcctatcgatgaccgatggggggccgacttttgactttttacgattaacagtatgctgattggcggaattgaaattttgccggtcagcgttttttctttcttattttttgttcttaaatatattttctattttcggctgtcgaaagcttgggatcatgttgccagaaacgaaagaattgattcaaggaataaaccaaaaagatgaaaaggcctggaaagtacttttcaagtcgttttatgctcccctttgtcattatagttcccggattttggcagatgaacaagttgttcccgatattgttcagaataccctggtgaatttgtggaatagttcggttcgctttgagaatgggaaagctttgacggtttatttataccgtgcagtgtggaataatgctttaaaatatttgcgtgaccgtaatgtggaagaagaaaggctaaaacactggtttgaagaagaaggggaaatgtcggaagaaaatttttatagtgtggtgcgggaagagttattccggaaattgagggaattgatcgaccgcttgcccgaagaaagaaaaaaaattatgctgatgagccttgaagggaagagtggagaagagattgcctgtgacctgaatataacgatacatacggtcaaacaacaaaaatacagggcttataaatttcttcgggagcaattgggacaatatacttctttgttgtttattttctttttccgataaaaaatacaggaaaattcaaaggaacgaagggtagagattttattgccggagggttctgcttcaggggggataaatcctatcggtttatgtggtctatcggctgattagcgccgggaagagtagaattttttagtacttgtccgtctccggtattcgtgtgtggggacccggtcacttctgccggtcagtggtcaacgtatttttcaaccgttatgagatacgaattcaaaagtttttacaaccgaaataatgaaaaagactaaaatcaatttctgataaaattacaattacaacatatattttttatatgaaataatatattaaaacatagtaat

SEQ ID NO: 5923 - DNA, 137 bp, Unknown
  gut microbiota DNA sequence
taaggcataaggacggttgacctctttttgattggcgaatcctcccggatcgataaaaagttctaccaaatcccaaaaattcagtttttgggtttcttgttctgccggagaagtgaagacattttccgtctgggggg

SEQ ID NO: 5924 - DNA, 7442 bp, Unknown
  gut microbiota DNA sequence
tacaaagaacctctacaaagactattctctgtaaaaaggggaaactcaaatcctcgattatcatcgacgagctgccgaccatctatttcaagggcttggacaacctgattgcgacggcgcgaagcaacaaggtggccgtgcttctgggatttcaggatttctcccagttggtacgcgactacggcgacaaggaggccaaagtcgtgatgaataccgtcggaaatatcttctccgggcaggtcgtcggggaaacggcgaagacgctctccgagcgtttcggcaaagtcttgcagaagcggcagagcataactatcaaccgcaacgacaagtccacatccatcaacacgcagatggattcgctcatcccgccatcgaagatttcctctctggctacaatgttttttcgcatcttgcaatgtcctgttgcaatagccacagtaaatgattcggcagatgccgttactgtaacgttttatctgtccgggtttccactccgcagtagagaaaattcttcgatgatgaagataccaatgcacaaggttgtgggcagcagatgaaagacaatttcatcggttacgcgatagaggaaatcaacgaaaaatttatcgtccgacgaacggcagtcacacgattcgtaccagtggcgaaagcccctgcggtctacctttaaccactccaaacgtacattctcctttgcaggaaaacaactgtctaatgttaccgcggcaagtatctgtacctttgctatggctcatttgccgtcaaagttcccgaaccatatgaaatagtcgttgccgcttgcacctcctcgcattgtatcgaaacgaaagttcgccacagcgtagttgtctttctcagtctaacggagattcgttgcccagggttacttacttctcggaaatcgtaaaaacgggtttcgagatcatgctcgtatttcccgagttattcggggatcatcattttgattttcctcacagcccgtaatcaatcagcagcttcagctacaactgattacgggcacatagtgcttttgaatttttatagactggtattttgttttttagtttcaaatttgaatcagcaaaatcgttcgtcatattatctatcgtattgctcgtccattcctgtcaggtggtgtgtacgtgccacgggatttcgctcccgtgaataagcacatttcgaacggtgtgttccgacaacgtgctgctctgctcccagtatcgccctcgatcaggggatgtcggacagagcgacggaaggagtagctccaacgaggcaggcgaaacagcaaagattctctttacaagtactgtcttcaatttttcaggggcaaaaataggaagtcggagctattttctgttaacgattttattgcaaaaagtgttggatttacaacaaagtgatttgaacagacaaaccgtgataaacattgccgggcattttagccgaagcgatagtctttcagatacgagacactccgtgtagttacgtgagcccaaagggcaagaagtgcccatgagcaagtttatataaaggaagtacgattggttattagaatccgatcgtacttcctttaattatccctttcctcctccaagtacgaatccaacagtaaggctgcagtgccgattcgcttttttttcgatccggtaatcgacggtgatgcatacccggtggaagaattcggctccgacacgaggcatgaagcacaccataccggtcgcttgacgatgagaacccgccccaattaggctgcgtatcgtcgaacaagaccgatgcgctctccttatgaaagacatatccaaatctggcgaacagcgaaatccagtctgtacggaaaaagctgtaatcggaaacagccgtctcagatgaatataggggtagaaatactgaaataagcattggtcgtattgaagcagaacgacgcaccacccagaaacagatgtaccttaaacatataaccatcaacaggagtcagagaaaatcttgtgaacggtatcttgacatccatacttgtaaacgctccgaattccagcatgaaatctccacccttataagccttgttgggaatatgttgggcttgagttatcttcgccgatacccaaaggtatattattaaatggcatattttaaataattgattgatccagtttaaggactgtccaacaagtctattcggaacgggatgtgctgcagccccaaagtaaactgcaaagtattacgatgctaccaagacgcaaagagttcatccacatactgctttgtattattgttatatttttgttttatctgcatgctttctggcatattcgtagtcttcgtccgtaaattcgaagatatattccacactcctttttccctgcatttttttttcgaaagctgttgcggaacagaaattatggtaggtatcgccatcctccgagtggtgagttattgtggttccatcgtcgaatttaatctgtgcatcaactggattcggtaaaccatatccaccatcgatactatgctttgttgtgaaagttgtgccgctttttagcgcaaccgagccggttaaaaattcgctactcggtttctctacaattatttcgacatcgtgctggctggcattctcaatgcggatctccgtattatatagataatctgtgtcacaactgaaaagcatagagaagaagccaagcagtagcaaggtaaaaatcgttctgttagttttcatagacagcgaataatcggttgattgtttccggggttaagttatacaattgcgcagcatacttatttttcgctgcataatccagcagcagtcgcttgacatcagcaaatgtcttcgatcggaaaacgatatcctctccatttggcactttccataagtactctgttattggtataataagcagcatttaaggctgccgccttttatccggcagcagcctcgcaatgataaatcactttatcaggtcggcaagattgtcgtcggtgaaaacgtaagtaaaccggaaatagtttgtagccaatttctctacctgataattgctcctattccgaatcgccttattcggttctaatagaatcgttttggaatcatctattgtcatacgacactcgatctgcggaagatattcgaaaggaaacccgatcgcatccggtgtaatgtctttcactccgtccgaccaaaaatcaatgcaataagtttgggtcggagccattataaacgtagtagtttcaagtatcgtccaggatataatagctccttttatttcgatcttgtgagaagattcatttcgatagacccattctccatgatgcacatattcggtgtgagaagtatcgcaacccgataacagccagcaaaacattacaatgctaccaagacgcaaagagttcatccacatattgctttgtattattgttatatttttgttttatctgcatgctttttggcatattcgtagtcttcatccgtaaattcgaatgtatattctacactccttttcccggatgcatttttttcaaaggctatatgggaacagaagttatggtaggcatcgccatccatctctcgatgtgttattgccgttccatcatcgaatttaatctgtgcctcaagcggattaggcacataatatccgccctctgaagctttctctattttgaaagttgtaccgttttttaccgtaaaagtaccagtcattaatacagtactcggcttctctacaacaatctcgatatcatacatgctattattcttaatcaatacggttgtgagatgtacatacgcacccttaccctcggtaccgcaaccgcataacacagcaagcagtcccatgagaattgtactgataaataatggtttagttttcatagacagcgaataatcggttgattgtttccggggttaagttatacaattgtgcagcatacttatttttcgctgcataatccagcagtagtcgcttgacatcagcaaatgtcttcgatcggaaaacgatatcttgaacgactgatacgggcatgtcatgaatttcgtcatccggatagatggtattcccttgatgatatgctctttgattgaaatcatcgatcaaatcgataaacagcggagtgtaattacgatcatacacttgcggattccatgcttgaaaattgtaactgccattttccggataagctggtaatttgtggaatactcctaattctttatattcttgattggtcaaaacatattgtacgcaccgtgcccaactttccagcaagctcgttttgcatttcccataagtattcctgttattggtataatgagcagcatggcccaactcatggcatgctgtgctgaatacttcggacatttctcgccagccgttgttaccttggccatatatgcggatatccgaccatatccccatgccccattgtctattatagtctccgtttatgccgtttcctttcttatgaagatatgcaattttttcctttcgggagttcgtcggtcttttcaatccattcgtattgccatagtaaaaacgatataaagcccgatgtatagttgcataacgaattgatttattggcagaaatatacaaatcccaatttccggtctttttcgggccgttataataggcttgcacgatatttccatctcttatatcccagcgagatgtttcccatgcgatactgtaatttgcaggacgtttaaagcgaccgttgcaggaataatatccattggcatttgtatagccgatgtacgtcgtgaaccagcgacgggcacgaactctgacataattaagcggaattgcaccgcctacaatattatcataggctgtaattcggcccgccggtctccatttactgcgtccacgtgtttgcggctctgactctccgtcttcttcattgccggtcatgcgcagggactcttcgaccagcgcatcggtcaatacttcgctccattttgtactggagcgggtcataattccctcatcatcttcttcatccttgtcttcatcgggaataaacaggtcggaaagaatctcataatctacgcctatggtactcaccgcaggccacttcgcaacctcgatagaggcatattgaaaagtgggcaagctgtccggaattgtaggatcatgataatagctgccatattcctcaatttcataatccagcggaatatcataccagataatcgtagaatcctgcaggattaaatccagttcctcggatgagcggggatgaaacttcacgtaataatgcgtaggctgaatatccatgtctgtaattccggctctggttttcggtgagaggttttccagagctttacgcatattctccactgaatagggatttttaagccgacgtcccagcacagtcattccgtccgtaacaatggcatgggaagaggtttgaaccagagtcttcggctgtaaatcggcatccttttcctgacagccggccagaactccgaaacaggatgtggaaaataatacttttagtactttcataagctattcgattttgtgctttgagtttgttgcaaaaataaaaactccgtaccgaaatccatttgcgatatagtgtttaaaatctaacacatttcaaatacacccattgataaacagtgtattgcggcgatatttttctttaatttctaacaaggggctgacacttattcgaacagtgctatgaacagctccttattctcggcatcggatgcctttatgcgggatttcaacctcgatttgcgggcatagatattggcgacgctatcgtgcatgaagagactgacgacttgcggggagaatcccccgaaaatgtaacatagcagccgtaagtccgcctctttcattttcggaaagtcgcgtcgcagtttcttcatgacattgtcatgtgccaggttcacgatttgttccaattcttgcagcatctctccgttttcggagaacccgtcgataagctcacgcacctgccgaaccatcgcggcctgtccggaagcggtgttttcccgttcgtagagtgtcttcccgatgcgatccacgatttcgaaccgggaagctatcacacctttcagccgggcctctgtacgctgtttctgctccatgcgtccggaaaggtcgagatattcggcccgcatctcccgcacgagaagcaaatgccgctcgccgcgctccttgtgcaggcgtatctgttgccggaaaacgcagcccgcaatgccgagcaacagaatcccggctccgatcaccgccagctctcttttcctccggtgctccagcctgtaatcgtaaaaagccgcacgttctcggaaatactctttttcgatcatgtcggccgaactctgcaaggcggtgcgggtcagcgaatcgttcaggcagatgaagcggtcgatctgccgtgccgcttcccgataatttcccgcctgcatgttcgcccggtaagccgtgtaaagcagcatgggacggtcttcggcacgcaggattcgccgtgccgccatttcgatggaacggagagcttcggccggacggttgcggagcagctgcgttcgggcccgcgtacacattccggagactgttgtgtcgcagagtacggactgctcgatacggcgcaacagatcttcgggaatgcgaaccgtatcggctacgacgtacagcgtggcgaaataaccgaggcttttttgtgccagcgattcgtcatgcgcatcgtcggccagttcgagcgccatcgaacagtcgcggcgcgcccgggccaggtcattcatccgcagtgccgaggctgtcatgcccaataatgcctcggccgtatgcttaccgtcttccgtacgcatgaacaggccgcgggcttcccggtagtaacggtaggcccgtacgaaatttaattcggaacagtaaatatccccgatacgcaagtaaagcagtccgagatagcggggttcgtcaatgctgtggagatactcctctacttccagaaactgtcgcagggcgccgggtttgtcgcctttctgtaatttactttgggcttgataatagagagttcgaaaccgatttcgagtctcttttgggtgattcctataatattcccaggcgatttgaagcatggaatccgtattttcgtcagttttcgtacggtttgccgcaatagtgtacagcagggagtatttagctcgtattgctcgattgccgagaaatttgcgcggaatattttttaaggtatgcaatgcactgtcgggagctgtttcaagctgtttttccgtgcgtacgaaagtatccgccatctgttcatgctttgtacaaccgaaaattgatacggctgaagcaaataaaaaatatatgtattgtttcatctttattaagattatctgccctcgaaaataatggagagaattaatatctgcaaatccccccctccttttaaactattcatatattttttttcagtatgcttcatgtaatggctgaaat

SEQ ID NO: 5925 - DNA, 12229 bp, Unknown
  gut microbiota DNA sequence
actttcatcctcctgtatagcggataaattagtttcgcaggatagcgatcgtacgaaccgtcttattctgtcgctgtatctatgagttacttctgtcgacagtttcagattgtttttcaaataggattcgagttcgtctattttatttcgaacccattttgatacgataagtttacgcatgcatatcgggctatttgtcgaatttttggttgccgtcccctcactcggaatgatggtaacacaggaatagaagcggagctactcttgaagttttttaatcttcggggtaatcttttttatgacgatagtataagcggacatataatcagtttaatgctgacgtttggcaaaagcaatgtattttcgccgttgataagcagtttttacaaaacgaggatatttgaaaagaaacaggctggttatgaataacagcatatccagcctgttctttcactgtttccagcatccttttacaacttgaggcctttgctctgcatattctcccctgcgggctttggccttactatatgttcacgcgggaactgcgaagtgccggaattactggaggatagagggactgttaccgttgattgtccttcgcctgtccgttccagctcgttaccgtttgtcatatccggcgtgttctgtatagtctcgccgtccctttgtgcctgctcttgtccggcttcgggcttgggaggcgtaagcgtaagctgtatcttgcgttccaacgccgcgacctccgctttcaaggctttcaactcgtcctcctttttccataccccaccgaccgtttcctgcaaaatcgggatgtctcgctcgtaggttacgttctgcgccttgtattgctccacgagcttgggtatgcgttccagcgcgttcaggaagttcatcgacgccgctttggtgtcggccatcgctatctgcccgttgttgtaggtgtacttgaacgccccctccacgaagaaacggttctgcttgacctccttgccgtctttcaacagcggttcggtctttacgagcaacggaaagccgtacagctcgccgatgcgcacgtactcgcctcccgtcgtggcgtttttggcaatctcctgcaaacgtgtcccgacgctcttgtggtcggtggcgtccagcccgtcaagccggataatattaatcttgttgccctccttgtcggtctgtacccgcgagagaaacgcctcgtagtcggcggtcatcttgacgatacagtcgttgttatgcgcgagcttcttggtgtaatcctccaatttccacgaggaggcactcttggccttgtagaacgcttgagcggtctgatccgggaaaaaatgaacggggatgtccggaatggagatgtgtacatctttatcaacaggctgaaaaaccgtataaagcttctgcacgcagaaacgggaggtctggtgatgtacgagaaactgcttgaggaaggaacttttaaaatccccgcttatgatcctgaaacccactcgtaccccatgacctggagtgatcttgtcatcatggtggaaggcatcaacgaggacaaacgaaagggaaggcaaagaccatagaggagctccgtgccacgatagttgaactgaacgcttcccttgcatggttgaaaaggaaagtgttcgggaagatgagtgagaaatgcaatcctataaacaacggggaccccatgctcccttttgattacggcgacttgggacagatagaggcggaaatcgaagcggccagaaacaaggcggcacagattatcacccccaaacctcaagtcgccggtaaaactccacgccgcaatcggattatcatggacgaccttccggtcgtgacggttgtcatcgagccggaagacctcgaccttggcaaatacgtcaagataggcgaggaacacaccagaacccttgagatgaaacccggatacctctatgtagtcgtcccttaaaaacaatatttcagcgtgaagtttgtaaaagcgaagttcacgctgatttttcttataagccacaaaagaactctcatagctcttttgaagttatatgcggccgcagctaataagagattgatagcatctcctttcacacctttataaaagttgcgagataatctgtagtcttctttgagatgtcctatcgttggttctatgcctgctcgtttacaaaatagtttgtgtttctttctcttttggtagtaggtgtcttttgctttaggaacgcccgggatgagtatctttgtatccccaatctgtttcacacctctataccctctatctgctgccaggttattaatatgtttcccggtcatcctttgggtttgttccaacgtcttttgtatggtatgcccatcgtattcattcctaaaagagcatgcaccaagaataagtcctgaccaggagcgaagaatggataccttattaccaaactcgtatttcttatgttccttgcctttactgatacaaaccacgtccggttcgtgcagagaatatattttattttttgacttacggttctgagaaagaaccttgtagtataactcaaacatcttctcatagccattccttccctctagattacgctcgagttctctaaccaatcgacctgctatggttttcagttgcctgtctgccttaagggctttcttacgattcttgggatggttacgaaagcgctgggcacggtaaattcctttcaaagtgcgtgtataactctgccgtagaggaagagacttatcatgaactatcttcaaaacgtttttgattatctttttatgcaacttcgcatctgtaggataagttatattcttctgctgtacagtagaatctatgaaagccgtatcaaaatggtcttcatcatccttatccgtattgacacggatgctctctgccaatattatttccatgcctttctcaccgatacgttttctgaagtgaaccaagtcagacgcatcacagggctctttgggagtaaattcaagttgtccgcaaaaatattggtagtaagcattctcaccccattgtaaaaccacagtttcatcagacacattacgcaaatgttttaagattaaaagaccgcacatcaagcgaataggatgggcggggcgaccgttcgtactacaatacaaaggcgaaaaagcatcatcaaaactctgccaatttatcttatggctaagttggaaaagggggtgttaatgattaagcatatcctccaaagaagagaagaaagagagctgtttagatgtacgttttaacataaatatctgcaagatttatattgtaaaggtacgaaatcttgcagatataagcaaataatttgagttataataaactgtaaaacaggagtgtatgaggtatttaagggacgactatttaggatatctacttggttttgttttgttcgtatcgtgttcgcatgagcaggataagaagcaaaggactagttcgatcaatttacgccaacaatacgtcaaaacaaacaagtttttagacgtcgatatgtcgaaatttcttccggggactcaaactcaagcttcggtaattgccgaagattcggctcagatgtttgtggctttgtatcgtttttatagtcatgtgaaagtggtggacgatgcctacgtgtgtgatttgacaaatgcgcaggagattcaggtttctgaaagggttttcagatctttatcggagaatttgcagaagacgaatctgcaaattcaacggttgaaagaacaaggcaaaaaagtaactatttctgaaataactcccgaatacctgaattcccttttagaaaataagtgaaatcagatagactggtttcacttatttattttgtcggatatctatattgctgttagcaagtttgtacttgattttagagtggaaggtcctattctgatttacttttcagtccgcttcgttccagcaatgcgtcgatggtcggttcctggccccggaagcgtttataaagtatcatcgggtgttcggaaccgcctttttccaggatatttttccggaaagattcggcggtagcctggtcgtaaataccttgttgtttgaaaacagagaaagcatctgcatccaacacttccgcccatttatagctgtagtagccggcagcataacctcctccgaagatatggccgaaaccggtagaaaaacagctgctgtctacgggcggaaaggattcggtcggagccattgcctgattttcgaatgcctggatagaaccgctgacaggagaggtgaccgaatgccaggccatgtcgaccaggccgaaactcaattggcggtcgttttggtaaccactctggaagttggctgcttcgtggatcttagtgatatattcctggggaattttctctccggtctggtaatgtacggcccaggtatccagccactctttttcaagtgcccaattttccataatctgagaaggtaactcgacaaaatcccggtagacattggtccctccggtagaattataagtacattgggataacatcccgtgaagggagtgtccgaactcgtgcaggaaagtggtcacttcgtcgaaggtcagtagggaaggtttgctggctgtcggtttggtaaagttcatcaccagagaaaccagcggccgtacgtcctgcccgtcttttttatgctggcctctgaattcggtcatccaggcaccaccgcctttgctttcgcgtgggaaaaagtccgtatagagaacggcaagaaaacggccgtcccggtcgtatacttcgaaggtttttacatcttcatggtatttggcgatattgtccacttctttaaaagtaaggccatacaattggttggctaatccgaataccccctgctgtacattttccagtttaaaatagggttttagcatttcgtcgtcgagcgcgtatttttcctgttttaatttattggaataataggcccaatcccagcgttgtaattcgcctttaaatccctgacgccgggcaaattcttctacttcctgtttttcggccagggcatgaggatgagaagcggccagcagctgaccgaggaaggtattcaccatctccgtgttttgggccatacggtcggtgagtacgtattcggcataggtcggatagcccaatagttgtgctttttccaggcggagagtaaccatcttccggatcacctctttgttgtcgtattggttatcccggtttcccctcgaagcataagcccggtacattttttcccgcaattcccggttgtcggcatatttcataaaaggaatgtaactgggggcatgcaaagtgaacagccagccttccaattctttttcttttgccgtcatcgcagccatttcgaccgctccttcaggaagacctgccagatctttttcgtcggtaatgtggagggtgaatccgttggtttcggccagggtattttcgtcgaattttaatcccagttgggataactccatggctatttcctgaaatcttttctgggctgcactttccaggttggctcctcctttaataaaggatttccacgtatcttccagaagagtagattgttccggtgtcagactttgccggtcccgggattcgtatacttttttcacccgtgcaaaaagttccggattcatgtatacactgtttccgtattcagtgagtttcggcgaaacccgttgggcgatctgttgcatctcttcgttggtgcaggcggagtttagattgaaaaaaatcgaagaaatcgtgctcagtttttctccggcctgatcgagcgccacgatggtattttcaaagtccggagcttctgccgaagttgaaatcgttttaatttcttgcttggcttcctcgatggcctggtcgaaagccggttcgtaatgccgggtttcgatgcggtcgaaaggaggggtttgatgaggggtagtgaaatgctccagcaaaggattgccggcctgcttttcgctacacgaagttatcgataagataagtgtcgtcatacaaattatcgttttcatttatatttctgttttgtttacggcaaaagtaaaaattaatcttcaaaatctgtactaagtttatattattgggaaaataaagcggaaacaatggctttgctataaattataccaggatcggactttacactagttttaaaattataaattgtagttaaaattatatatatttgtccatcatttatgtccggcatgttgtcagattcaaagatattgcaaacacttcgggaaaaagaaccgctcggtatggatgccttgttcgaaaggtattacagacccttagtggtatttgccgaatcgtatttgcatgatttgcagagtacagaagatttggtacaggaacaaatggtaaagttatggtcgaagcagacctttgccggtatcgttcccgaggcattgggtacttttttgtttaccgtagtgaaaaatgcttgtatcaactggctcgagaagaagagattgcctgtaaaaagcctggatcttcttcattatcagatcgctttggaagaggccgaacgtttggacgattccgcggtggaactgatccggggagccttggaaaaattacccgataaaacccgtctcgtggttacggtggttatgttgcaggagaagatgtataaagaggcggccgaggaattgggggtgtcggtaaatacagtaaagactttattgaagcaaggcatgcgggaattgagagaactgttgaaagataagcaagaattaatattttatttttatcttctgcatgctgaatgtagagaacagaatccaatatatgatcacctttaattcgaatgttatgataagaaatctttttctgttagtcgtgtttttaggttgtgttagtttgcggcatgtagaggctgccatcgatatcgtacctaagccggtgaaattagtagaaaccgatggccggttcgatatcacttccgcctgttccattgtggtgaatgacgatttgaaaacttgtggggagttgttggcagattatcttcaaccggctatggggtatcgtttagcagtgagtagtaaagcggagaaaagcaagccggctatccgtttaagcctcgataagagcttgaagaaattatctgaagaagcctatcggttggaagttaccgggcagggggtacgtatacagggggcttcggagaaaggaatattctatggtatccagacgttgttgcaattgcttcctgtcgaaatctttcagactgaagtacaaccggtaagctggaccgttcccggagtgcaaatcgaagattatccccggttcggatggcgtggattttcactggatgtatgccgtcaggtttattcggtagattttattaaaaactgtatcgattggctggctatgcacaagatgaacgtctttcactggcatttgacggataatgagggatggcggatagagattaaaaaatatccggagctgacccgtaccggtgcatggaggggaccgaacgaaaagttacagcctactttttgttcgggatactaccgttatggcggtttctatacgcaggaacagatccgggaagtggtcggttatgctgctaaacggcaggtgatgattatgccggaaatcgaagtgccgggacacagccgggcggtagctgctgcttatcctgaaattctttgtgattatatagatcccgggaagcacgaattgtcgcagaattcctggtgtgctgccaatgaacggggatacgaaatcctgggggatatcctgaaagaagtagcaggcttgtttccttgtccatatatccatatcggaggggatgaagtggagatggagtattgggaaaactgtcgccggtgtaccggattgatgaaagagaagcattttgagaaacctgccgaggtacagaattattttatccaccgggtagcggaattagtcgaagctgcagggaagaaaatgggaggctggagtgagattatggacggaggagaactgccgtcgggtacggtagtcttctcgtggatcggactggaccatggtatcgctgctgcccggaaaggattaccggtggtgatgatgcctggggaatactgttatttcgatatgggacagactccgctggagcgtggacattattgggcagggatggtgcctacagagaaagcatatgcttttaatcccttgattcccgatagcctgaaaccggctgaaagaaaaaatgtgctgggagtggaaggggcgatctggtcggaaatgatggatcgtccggcctggcattgtgaatatcagatgttcccgcgtttgtgcgttacggcagaaatcggatggacaccccaggagcaaagagaatggaccgatttcaagggacgtctggataggagtcattatatgcgcttgtatcagaaaggcattcgttttcgggtacctttcccggaagttacttatcagaacggggtattgaccgcagcggctccttactctggggcagtgattcgttacacggccgatggtaacgaaccgacctgtttctctccgttgtataccggtgagataaagacagaacaacctgaaaactatcggtttaagacattttttacgccgcattggggaagtattgctgtcggtatcgaaaagtacttgcatccggagatgaaggtgacaacgactatcgacgctcatccgaaatgtccggcccagttgctggcggatggaaacgaaaaaacttttttcaggagtaaccgacgggtaaaagacggggataccgttttgttcgaattcgaaaaacctttggattgccgtaaaataacgatcaagagtggagcttaccagaccagccattatatcattacccatgctattgtcgaaatatctacggatggagagcgttttatacgttccggctggttcgatgccgaaggggacagtgaagtgatctgtacggttcccatcaaggctttgcgtatcgtgtttaccgaacctcaatacgaagaacgattggttttacaggatttgaagatcgagtaggcaaaaggaaatttgaaaaacagagcgtgtttgttgaaaatattgttctatcttcgtaggccgtaagatgttttattttatggtagaggagaaagaagatcggttcacattatttaaacagggagatgaacgtatttttcggcaatactacgagaaatattatcatgcattatgtctttgggtggtgcggattataaaagaagagacaagaatgcatgatatcgttcaggaggcttttattgttttgtggaacagccggatgattatagaatctgaactacacctgaaaatgtttctttatcaagtggttcgtaaccgctgtttcaactacttgaaaagtaaacgggtcgaggaaaaatatattcaggagtatctgcaaatggaagaagaagggggtttcgaagatacagtgcttgaagaagaagtacatcgtattgttgcacaagaaattgaaaaattacccgaggaacaaaggaaagtggtatatttccatatggagggaaaaaataatctcgaaattgctgaaatcatgcagatttctgtgaatacggtgaaaacccataaagccagggcccgaaaaacattaaaaaataaattagataatcttttcattatcacagtcttgttgggactgtgataatttttttttctttttttactttccttgtcattctcttggcctttttaattgtattatagttaaaagagctaaaagtctgtgacgttatgaataattacgatgaaatagagcgtaaaattttcctgatcaaaaattatttggaagacaaccttagtgttgccgaagaggaagaattgcgggtatggttggatgaatcgccgaaacatcgggaaacttttcagcgaatcagggataaaaaaatattgtttgcaaagttggaatatcggcaacggcaagaaaaggaaaccgattggaaagtgatttgccggaagacgggtatcggctcttcccgtcgtttgtggtatattcgggtggcgcgttatgcagctgttttcttcggattatgcctgggggtatggttgtatttcagggctcaggtgtcacagcctcaggaatcgacattggccgctatttctatggataccatttgtccgggatataaacaagcttatatcgagttgaaaagcggtgaacggattgccttgggaaataccgggaacaagcaggagaaacgaatcaaggggatggttttaaaagaggaaaaagatggagttatgatattgcccggtgattcgttggccgataaagcagtagcggtggaaaaaagttggatcgtggtgccgaggggaggagaatatcaactgattttaccggatggtacgaaagtgtggttgaattccgattcgaaactcgaattcccgaacacttttgtaggcgatgaaagaagggtgaagttggccggtgaagcgtatttcgaagtggctaaaaataaagctaaacctttccgggtagaggtagatcgggtggaggtcgtggttttaggtacttcatttaatatacatgcttatgatgaggcggttaagactactttagtcgagggcgcggtaaaattgaatgtcgccggtaaggcttattcgctttctcccggttttgaagctaatgtcgatcagggaggggtgaaaatagtgaaatcggatgtctatgagcagattgcctggaaggatggaaaatttgtatttcgtgaaaaacgattggaagaggtcatgtcgatcttgtcccgttggtatgattttgaaattttctaccagaatgcggcagtaaaagatttgcattttacgggcaatattccccggcatactacgattaatgaagtgttgaaatttttggaacgtactcatctggtacattttagtgtggttgggcgaacggtaatcgtatctgaataaacgtccctatatttcgtgaggaaagcaaatattataattttaataaaagactagccaccggaaactggtcctttccgatggctaaattaaacaacaaggtgtttaatctgttaaaaacaaatttatgaaaaaaaatcgaaaaaggtgctacccggaagagggtattcccggaaaatttttgagaaaaatgaagttgattttatttctttgttgggccggtatgatgcaggtatcggctatgtcttacgcacaaaccggcacggtaagtatccgggtgaaagagacggctttgcatgagatctttcaacttatagaagctcagtgcggttatactttcgtttataataacgaacagttgaatggcttgaaaccggtgtccatcgagatgaccgatgcaaaaatctccaaggtcttggatgaatgcttgaaggggacggatttgcgctatgaactgctggaccagatcatcgtcatcaaccgccgtagcgctctccctcagactgcccttgatttgcagggaaccgttaaagacaaggaaggcaatccgctgccgggtgtttccgtttttattaaaggtactaccatcggggtggcgactgatgtagacggtaagtttaaaatgcagttgcctgagatggaaaatatggttctggtgttctcatttaccggaatgaaaaaacaggaggtaaaatatacgaaacagcctgtactgaatattgtgatggaggaagatgtggctgaaatggaagaagtggtggtaaatggatattttactaaaaataaggacagttttaccggaaatgccgtagtggtgagtaaggatgaattggcaaaagtctcttccaataacctgctcagtgctttacaggtgtttgatccctctttccgtttgaaagacaatgtggatatggggtctaatccgaactccatgccgaatttccggattcggggaaattccggatttggtgctgaaggactgtcggaagccaatctgaaaaatgatccgaacctgccaacctttattctggacggatatgaggtggatgtggagaaaatcttcgacttgaatatggaccgtatcgagagtgtaacgattttgaaagacgcttctgctacggcgatctacggatccagggctgccaacggagtggtggtcgtgacaaccaaggctccgcaggaaggccaattgagggtttcttataatctgaacgtggctatcagtgcacctgatttgtcggattatcatctgttgaatgccagggaaaagctggaagcggaggtggccggtggactttatgaatctgaagatccgtatacacagcaacgattgagaatggattacgcc

SEQ ID NO: 5926 - DNA, 1993 bp, Unknown
  gut microbiota DNA sequence
aaaacagtatgtttgcacatattataatatgtatatacatatataatttaaactatcggctgaaaataacaaaatatgaaaaaaataatcggattatttctcgtcgcccttattccgctatatgtatccgccggccccgacaatatcgctcctgcagcaaaagtaaaagcatcttcttcggtacccggttatgaatgccagcacgttacagacggtattatctgcattcaggatcagggagaatgggcttccaacagcagcgtttcattttacggctcgatcgactatccctggctagaactcgaatgggataccccacggagtatcgatcgcatccatttgtatgacagaccttcacaacaaattcatacagcaggtattaccattcatttcgatgacggtagccgactgcctgtcaacactattcccaacgacgggacagctaaagtcgtcgaattcgcccccaaaaccaccaaacgcctgagattcgaagtcaccgacggtgacggacctaccctgggactttcggaaatagaagtcttcccctctcctcaggattacccggattatgtttcttatgtcgatccctatatcgaatcggcccgtggacgctatttcttttttgtaaccggcagcaggcctttcggcatgtttagtgcggcaccgatgacccggaataaaaatcaatacggaggaggttataattacaattcgacagaaatcttaggattccctcaggtgcattgctggatgctttccggtatcactctcatgcctgccaccggtgatatcgatcccaccaagggcgaacaaggttggaaatcccgattctctcataacgaagaacttgtacaaccgggttaccaccgtgtattcctgaacgattacaaactttgggtagaacaaacctgtaccgaccgggtcggtttctaccggatgaaatataccgaagactgcctttcgaatacactcctcaatctgggcggatttacaggtacttcgacgatgaccgatgccgaagtccggcagacgggcccggcagaactggaaggttctgtcagtacagtcggaagattatgaggtggtcctgaagaagtgaagatctactttgtcatgcatttcgataaacctttcgaccggctcgacagttgggacgattctctgacgaccaaagctgtcaccggattaaaggtcaattcccaagccacaccacgaaatgccgggatgacctattatgacgcacctacagcagggattcaagccctccatcggctcaagaaaggagaagaacttcaagtaaagatcgcaatctcatataccaatatcgaaaatgcccgtcacaatttagcacatgaatgtgcccattgggatttcgatgccatacgccgggatgcccgccgtgaatgggaagaaaccttatccaggatccaggttcagggaggcgatgcccatcagcgtataaaattctataccgatctgtggcatgtcctgttgggacgccataaattagacgatgtttcaggagattatccggatcgtacaggccaggaatttattatccgtaccctcctaaaaacacaacgggagaatcaaaatttcatatgtacaactcggatgctttctggctgacccaatggaacctgaatatactttggggacttgcctggccttcggtattggatgatttcgccgcctgtctgatacaatatgccgataatggcggattattaccccggggaccatgcggaggaggttattcccggattatgacggggtgtccggcaaccaacctgatcgtatcggcttacatgaaaggacttttgaagaagaccgaagcccggcacgctttcactgtgatgaaacgtaaccatatgccgggaggaatgctcggaatcgatgatttctatctcgaaaacggttattatgccgacaatgcaggtatcactatcgaagcaaattttcaggattgggctctctcgcaaatggcacagca

SEQ ID NO: 5927 - DNA, 20609 bp, Unknown
  gut microbiota DNA sequence
cgaccctttaaattgtcgtatcaaattataataacagtctatttcaattatcacctctaaaacggactcacctatactttgtatgacaagaatttgacatttttataaaaaatcatttaaaaattaaactgtaaccctacatacaccaatctcctctgatattcttcccacccaaggacagatttatagtcagtactatacacaggataatttctatttgatttatccaacatatttgtaattgtgaaaaatgcaagtaagtgacctttgtttaacggaaatatcttattgacggtcaaatccaatgaatgataagccgttacttgttccgaattatagtctccataaagaggaaaccatacattatcactaatatttaaagcatactcaacaggggtgtaatataaacccgggcgtgcagaaaaatttatccctatattccattgatttgctgtacgccagacaatggaggtccggatgatataatccatatcattggcagaacgataactctttttccccaaccggacacgggaatcgataaaagtataggaacctgcaaatgaaaatcgccctatcgtacgggcaatagaaaattccaaaccttttagccttcgctccaccattgcctctttcccgttctcagaaaaataatcccgggtattttcattttttagataagaagagagttttagatcaaaatcataaatatgacttgtcaggtcaacagaatattgacgggaggaatgtaaagcaaaattttggctgttgtatgccggaacattataagtatgatattttccggctgacaataacaatgaaaatttttcattcatattccatcgtcccgcaacttgccaggatatataatcaggttgactggcttcaggaatattttttctgaccgcaccgctgaaaagtaaatgacgcataggagtatacttacaataaaaataaccttcccagacacggttatagagtttatcatcggccgttacaccctctgcttcatccgaataattataaaaatatttgggaaaaatgccataaaaattaactcgtgtatactgatgtgtgagtccagcctgaaaacccaaatttccgataaaatacttcgcagacaaagaggtgtacaaacggttctcccgtgtcgaaccgtccatgacaccaaatcgataaccgcttttacagagatctatgccattattcaactcaaccactacaccactttgcagtgctgcaaaagtaaaacctgaaacctgaaaccaacgccggctcgttgccttgctttcgtccttataattatattgctctgtatctgcccggtagtactcgtcgatagcatattcataaagattgaatttcaaccgaggggttaactgtaaatggaggttcacccctccatccgtcgtattgaaacgcttcagaaaatccgtattagcattattcagccataggtatggagccgaaaattggtgattagcatataattgcaggaaatttttatccgatatctttttactgatcaggataccggcattcgcaagcgataaagacaatttcaaatcattacgagtgatgtgttcaggcgtttcaatctctatcgcacctgcaatcgaattccctattgtcaacggaggattacctgcataaactttcatctggccgataagttcagtattgaaaacagaaaaattcccgataccgttcaattgggtattgcgtaccggcttccagacaggcaccccattcagcaccacaacggaatggttgcccgaagatccccgtaattctgtattcgcactttccgatacgttggtagacgccgccatcacagatactgctttcaaaggatcggcccctgaagcaggagaaagataaatatcgatactctccaaacgttctacagcaaagtcttcggatatactgggactcataaccgtaacatcgtcaagttgtatgactgtttcccgcaagataattcgaatattattccaatcggtaaatgcagaaacgggaatttgccgattacggaatccgacaaacgacacctgtaaaacatcggtttgcagaatgtgagctgagattttaaaagtaccgtttatcttacaagtagttgccgcaacccgtgtaccgtcacgcataagcatcacaacagccccggccaaaggtgttccgtcaatatcttgaacaactccctgtatataagcattttgtgcagacaaaccaacagggataatgaatacgaacaccaatatcaaataaaatttatccctaacagaagtgtaaacccggaatgtcatcctttctcttataaacctgagcacctcagaatagctattttcatatttttgatcacaccctataaaatcggatataccggcaaattctataactgtcatgaacggctccattatacaggataatattcttataattaataaccgatacgcttgaatcttttatcatccggaaatttattccgggcatcctgtttcaatttttcaaaaagttcctgatccccatcatccttccggttcttgtaataggataacaagaaataaaaagcatctccttttccccaggtagggtcgaattcattttctgaagtacggtcaggaagagctattgcttttttgaaatatgcttcacatttactttttccaccataaagctccggtgtataataattatttatacccaaaaccagataggcccgtaaattatcaccatccaattcaatagccttctgcgccatcgttttagcttgattactcaatttaatagtcgccaaccatcctgaaaaatttatttgataattttttaacatacctagcagggcataatcttcagttgtcttcccttttgtagattccagtatctcaatcgccttttccgtaaatttttcagcgtcttcctcttttttcaataccctggaaagtatagcacatttataataagcataagcttcccaataggataaataacgattattacccttagtattgtaatttctcaattcccgtataatctttcctatggagtcgatttttactgtatttacatttgagtcgatacgatactggaaatcttgagccgaaaccagatttacaaagaaacacagaaataaaataaaaataactttcatgacttattgtttataataaacatcggattttcatccgacagtttgtttcaattacagataagacgagcttatttttattttgagtgacaaaaatttgatatttcttctgatttgcaacaaaaatcaggattttcttttctgacgatatggaaataaaataacaccaaggcattcaaatcatcggtaagtagttcacgcaattttttatatccacggaaaatctgtgtttttatggtatttatagatattcccaattcagcggagatttcggtatatttctttccatcgatgatatgcatacgtacgatctggcagcactgcaaaggtaaagaatcgatagcttcatggatcttgcgggtcagttcttcactgatcacctcatccacatcggcagcatacatcatcgcttctgccatcagtagcttattgttatcccgaactttcaaatgccgcagataatccaatgcagcatttcgtgaagaggtatataaccaggatttaatatttacctctgaggaaaaataaggataactcttatataatttcaaaaagacatcctgcaccaaatctttagccagttcccgttctccgacatgccgttccacaaaaggcagcaataccggataatattcccggaagatcttttcaaaagaggctgtatgaggtgaaatttgccggtttgtcatattttacaatggtcaacgaaacgatttagtgcgaacaaatataccacatttatctaaatttttgacaaaataatcataacttggcaaacaaattataattgtatccttgttatgcagaatatccttttctttttgctttgtgcacttctgaccggttgtcatgccgggacttcccgacccgaattacctgaaatggtagaatatagcgggcccaatgcttcttcgctaaggacttttatcgaatcgatagaagtgatcaaactggaccaccgggaatcgatcacggtgggggcatataatgcgattcgttcggacagtaatagtttttatgtcggtgacatgctgaacgggagtaatcttgtttaccggttcgacaggaagggagaatttttagattctatcggaaaaatcggaagagcaccgggcgaatacctgggattgagcgacttttacagtgatcccgaaacagacgagctctatattttgtcgggacaagatgtgcaactctaccgctatcataaaaacggtcggttcatagaccaaagagaggtcccggacagaacacagagttttatcaaactaggtccgcaattctggttttacgaggggtataacaatggaaaatatcctgaacgactgacacagaccgattcggctttgcaagtgatggggaaataccttccgatggaaaccaggacactggaagccagtatcggccctttgctcacccagcatcgaaacgaagcttatcttttcaccgccctcgaaccggtgatttaccggattatccccggcagtgccgttcctttcctgaaattcgattttgggaaatataacgtcccggaaagttattgggaaacggaaaatgccatgcaggcatttacagatttaagtcagaaaggatttataagtatcgccggttttatgatgaacgacgattatatcgtcacggaactcaatcagcaaaccgggatggaggattcggagtgttattacctattgggcatcaaggaacggcataacggtaaatggaactggatccgccaacgtgcagaagaaaataaactgatcgccgacaatcaacccgcccccaaggtaagcaatcgtccggaatggtatgccaaaaaactcaaaggcttcacacaagacggtaagttgatgatctttttatcgggttacgagctggaacgtttgacagcaaaagacaggcagttgatacaaaatccggaaatattggaaaatgccgacccggaaatggatatgtttttatttctttgtagtttaaaataatgaaaaatcaaaccgatatggaacatgatgtatttatcagttattcgagaaaagacgaagaattggtgaaaaagatcagagctgcattgacgcaagcgaatatatcttattggatagataaagaggagataaaaagagggacttcttatgccaaagcgatctcacaggctgtgtataatagtaagattttactttttatatggtcggagcattcgaataattccgagaatacggcgaacgagattagcctggcactggaattcgagaaaaatatcgtcccgtttaagatctccaagaagttgggacccagcgatatgacctatcacttattgaaattggaccggatagatgcttgtccattcgaaagccatcatattcaagagcttgtcgcctcgatcgcccaatgcctcggacgtgggttaactccgtcttcgacaacatccggcacttcgggaagcactcctatttcgaatacttttacctcctcctctacggcttccaatacttcaaagatggaaacccataagttcgacaatgggagctataccggagaaatggcagatggaaaattcaacggacaggggacttattgctggaccgacgggggtagatatgaaggacaatggaaaaacgggaatatgcacggacggggtattttttattatgccaacggaagcaaatataaaggagattgggtaaacgataagaaacaaggctggggaacttacgactggcaagacggaagcaggtacgaagggcaatggaatggtgactatatgcatggtcaaggcgttttttattatgccaacggggataaatacgacggacaatgggagaatgatcacaaacaaggaccaggcatttattattttgccgatggcagtaaatacgacggacaatgggagaacggcaaaaaacaaggacagggaacttaccagtggaaaagtggaagcaggtatgaagggcaatggaaaaatgattgtatgcacggtcagggaacactttatcatcccgatggtagcaaatataagggacaatgggtgaatgacaaacaacaaggagaggggatttattattatgccaatggttgtcggtatgaaggacaatggttcgacgataagaaacagggacaagggacgttcacgtgggtcaatggggataaatacgtaggacaatggatgaatgatcgtatgcacggtcagggtatttattatcatgccgacggaaataaatatgaagggcaatgggtaaacgatatgaaacaaggacaagggacgttcacctggaataacggagataaatatacaggccaatggatgaatgacagacgacacggacaggggacctatacctgggccgacggtacccggaattcgggcatctggaaggaaggtaaatttatcggataatccggggaagataactatatttactttatttatccttattccggcatttttattcgacttctttctatctttgcggcaggataaaaagaacagaggggcaggaaaaagaagggggaaagatggatttaaaaattttcgacagataaaaaatgatttcagttgacggacttacggtagaattcggtgacagagccctctttaaagatatttcctttcagatcaatgagaaagaccggatagccctgatgggaaaaaacggtgcagggaaatccacccttctgaaaatcctggcaggccagcgcaaaccgagccggggcagtgtatcggcgccgaaagataccgtgatcgcctatctcccgcagcatctgatgaccgaagacggacgcaccgtatacgaagaagcttcgcaggcttttgcccctcttttcgcaatggagaaaaggatcgacgacctgaaccgtcagctgaccgagcgtaccgattacgactcacccgaatattataaattgatcgaagaggtttctgctctgagcgagaaatattatagtatcgatctcacccatttcgaagcagatgtcgaaaaaacactgctaggactggggttcaaacgggaagacctgcaacgtcagaccagcgatttcagcggaggctggcggatgcggatcgaactggccaaaatgttactcaaaaatccggatgtcctgcttttagacgaacccaccaatcatctggatatcgactcgatccaatggctggaagaatttctgatcagcaacggaaaagctgtcgtcgttatttctcacgaccgtacattcgtcgataacatcaccacccggaccatcgaagtcacgatgggacggatctacgattataaggtgaattactccaagtacctggagctacgtaaagaccgccgggcccaacaacaaaaagcctatgacgaacaacaaaaaatgatcgccgaaaccaaagattttatcgagcggtttaaaggcacttactctaaaaccctgcaagtgcaatcgcgggtaaagatgctcgaaaagctagagctgatcgaagtggacgaagaagatacctctgccctgcgcctgaaatttcctccttctccccgttcgggcagctatccggtaatcgcccaggaattgtcgaaatattacggggatcatctggtgttcaaagaggcggggttcaccattcaaagagaagaaaaggtggctttcgtaggacgcaacggggaaggaaaatctacgctcgtaaaatgtattatgggggagattacggattataccggtaaactcacactcggccacaatgtacaaatcggttatttcgcccaaaaccaggcctctcttctggacgaagaactgactgttttccagacggtggatgacgttaccccttcggagctgaaaagtaataccaaaaacctgctgggcgcttttatgttcagcggagacgatatcgacaaaaaagtgaaggtactttcgggcggagagcgcacccgtctggctatgatcaaactgcttcttcaaccggtcaacctgttgatcctcgacgaaccgaccaaccacctggacctgaaaacgaaagatatactgaaaaatgctttgatcgatttcgacggcacactgatcgtcgtatcccatgaccgggatttcctcaacggactggcccaaaaggtctacgaattcggaaacggtaaagtcaccgaacacctggaagatatcaacggattcctgcgaaagaaaaaaatggagaatctccgggagatcgaatcccggaaatcctgatcaggggacactcccgatgtacattttttgacatccctatgaacaaccgcctcccaatacctgatacaattgtaccgtagccagtaattcgtcgcggatagccgtattgagcccgatctgggcatcgaaatatccacgctgggcatccaatacatcgagataactgatcactccgttgatgtattgcaaagtagccagatcgagattagaacgggccgactgttcgagatgttcgcgggattcacggatttcacgacttttacgggagttgaccaaggcattgctcacttcggtgaaagcctggagcaccactttctgataattgtaggtttcctgttcctgcacagctctggaagcttttaaacgcgctctgttttttcccagattaaacaccggtgccaataattcaccaccgacaaaaaagtaaggtgctttcagaaaatcggtcagatcgctgctctcgaggtcataatgtccggttaaagtaaatttcgggaacatgctggtataagccacaccgactttggcatgagccgctttcaaccgatattcggcctggcggatgtcgggccgtctttccaggattcgggaagataatcccaccggcagagcggtcatcaactgctgctgaccgatacttttccctctcgccacttctccgggatattctccggccagtaaagtaatctgattctctttgaggcgaatctccctctctaatcccggtaccagggtttgggttctggccaattcgacctgtgcctgacgcaagggattttcggaagtcaatcctccctcgaacctgagctttgccagacgtactccttcctgccgggccgccagtgtctgccgtacgatggccagttcctgatctaaagcgatcaactcgaaataagcctgcgccacttgggcaaccagagccgactgcaaagcctgcctgccttcgacgctctgcaaatattcggccagagcggcctgaccggcccaacgtagttttccccacaaatcgacttcccaggatgccaacacttttccttcaaaagtattcccaggcgtttcatcgtattcccgctcggcagacacggtagcctctgccttggggaaaaggtcggctttagcgatacgacggagttccatcgattctttcactttggccgcagcgatcatcaggtctttgtttccttccaatgttttccggatcaactgccggagtaccggatcggtatataaatcggtccatcggatatcaccggccgaaaccgaatcgggcaccgttccttcgatctgttccggcaagcggagttcgggccgggagtaatgctttcccagtttacatgaactcactcccaataccagcaatacaatagcgagggtataaattttcttcatcattttacgcttttcgtttttactctaatcttttctttgaatttatagaccattacaaagaagaaaggtaccaatactattccgatggtaatggctgcaatcataccgaagaacacaccggtcccgatcgaatggcggctggccgatcccggtccggatgccatgaccagaggcaacatacccaacacaaaggccagcgaagtcatcaggatcggacggaaacgcaacatggccgcatttttggcagcgacaaccacatcgacccctttgtcgacttccatcttggcaaactccacaatcaaaatcgcatttttagcagccagaccgatcaaagtcaccaaaccgatctggaaatagatatcgttctcgagcccaaatcccagaatgcccagataagcccccaaagcagcaacgggcaacgacagcaagacagccaccggcaccagccaactttcgtataaagcagccagaaagaggaagacgaacaggaataccagagtcaataccagccccagctgtccctcggcttttttctcctgataagacaaaccgctccattcgacaccgatattctcgggtaaatgagtcctggcaatgttttccatcttacgcatcacctcacccgaactatatcccggagctgccaccccccggacaactgccgtcgtgaacatattgaagcgccggatatttcccggacctgtcgtatattcggcatcacccaaagcagtcagaggcaccatatcccctcccgccgtctttacaaagaacatattgatattgtctttatgtgcccggtaaggagcttcggcctgaatatataccttataaacccggttaaacatattgaaatcgttcacataaaccgatccggtgtaggctttcatcgtcgaaaaaatatcggacatcgggatacccaggaatttggctttgtcccggtcgacatcaaaatacagctgaggaatttcggcctgtaacgaagacgacagaccggtgaaagctttactctcggcagcatacttcatcagggtatcgaccgcttcgaccagattttcgaaagtagctccattccgggcttcgacctgcatctcgaatccaccggcagtacctaagcctggaataacaggcggtttcgacaaataaacccgggcctcgggatattgcttcaactctttgcgggtatcttccatcacctgatcgatctccataccgtttcctttacgcttttcccacgatttcagaatcaccgtcagttcggagcgggcctggttggttcctacccggggactggaaccggtcacattctgtacataaccgactgcaggatgagctttcagaaattctaccgcccgatccgtcaccaggcgtgtacgctcgagtgtagccccttcgggtaattccagttcaaccttgaaatagccctgatcttcttcaggcataaaactacccggaaccacccggttcaatacaaagatgaaaacaagtaccatcccgaaaccggccaggatacggcggggattggtgatcgctttaccgattatccctacatatttccggtttccggtagccagccaacggttgatcattccgaaaatacggtttttagagggtgcggaaggacgcagcaagagcgcacacatcgccgggctcagcgtcaaagcgaccacagtcgatatcaacaccgaaacgacaatggtaatggcaaactgccggtaaagcaaaccggtaatcccccccagaaaactaaccggaataaataccgcagccagcacgagagaggtggcgatcaacgccccggtcaatccccgcatagctttcttcgtagcctcgtaggggctcaaaccttctttttccatataactcccgaccgcttcgacaactacaatggcatcgtcgaccacgatacctatcgacaaaatcaatcccaacagagtaagtaaattgagcgaaaagcccaaaaccaacatcaccccgaaagttccgatcaacgatatcggcacagcaatcaggggcaccagagaagcgcgccagttctggagcgaaagaaacaccaccaacaccaccagcaacagcgcttcgaacaaggttttatacacttcgtggatagactcggaaatgtagctggtgatatcgaaagggatttcgtaatcgagcccttcgggaaaattcttactgatctctttcatcgtttcgcgcacctgcccggccacttcgacggcattcgcaccgggaagggtataaatcccgagtactgcggcatttttaccgttcataccactctcggtggaataggaagaagcctcgagagagacccgggcaacgtccctcaaacgtacgatagaaccgtctggattcgctctgaccacaatctcttcgaattcattgactgtagacaaacgcccctgggtagtgatcggaatggttatatcctgcccggaaataggctgcttgcccaattcgccggccgccgactcacggttctggtctttgagggcatcctgcaaatcttttaccgtcagtccgaaattagccatccggtcgggcatcacccagatacacataccataataacggcttccgatattggaaacccgtcctaccccggggatacgcctcaggatatccaggacattgatcgtcgcaaaattactgaggtagatttcgtcgaaacggggatcgtcggaagtcagggtcagggtcatgagctgattcgaagattgcttttcgacggaaataccgttctgcaccacctcggcgggcaagcgcgactcggccagtttcacccggttctggatttctacggcagataattcgggattggccgaaatgtcgaaggtgacattgatcgacaaaccgccggaattggaactgctggattccatgtagagcattcccggcgtcccgttgagttcctgctcgatgggggtcgccacagcctgcgagacagtctgtgcactagctccgggataggaggccgaaattttcaccataggaggtgtaatctgcgggtattgatccaccggcaacaaatagaggccgatacatcctaccacgacaatcaatatggataataccgccgaaaagatagggcggtctataaagaattcaactttcatcttacttcgtttatttcgtctgtattttcttcttttttagccaccgtgcggggagccaaaagatcaccgggagaaagtttgtgttgtccctcggtcacgaccatttcatcaggtcccaatcccctctctaccaccacaaaattaccgacttcgggtccggtttcgataaaccgtttctcggcagtactatccctgcgcataacataaacatgagcacctcccttctcgataataattgcgcgggcaggtaccactacggcgttttcgcgcacatcgagcagcaatttgactttggtaaactgtccgggcagcagtttccgcccgggattggccagttcggctctcaccccgaaagtacctgtcttgggatcgacctgaggctcggcaaagtcgaccaggcccttctccggataaacagaattatcggccagggtgaccgtaatcgagggctgccaggaacgggtagcgtcctgctcgcctaatctgacattacgctgctggctgcggagataatcgagggcggtgaggctaaaatcgaccaacacggtatcgctggccacgacggtcgccaatagcgacttggagccggggcccaccaaggtaccgatatcggcatgccgttcgctgatgtatcccgaaatgggcgaacgtaccgtcgtatatcccagctccatctctgcctgtgccagatcggctttactcatggctacgttcgctttagcactttcgtaagcggcaatggcattatccaggtccaactggctggctgcattctgttcgtataaaggacgcaaacgctctacatcgcgtccggttttcaactcctgggcttcgtcttttttcagttgagccgcagctttatcggcccgcgctttatataaatcgggattgataataaacaagggctgattacgctctacccgtttcccttcctcaaaaagcatcttttccagatagccttctacccgggcatgtacttccacaaattgccgggccctgatccgccctacataatcaccgaatatctctacatcatcgacccccactttctcaactactacgggaattccttcacgtatcttatcttttttacaacccaccactcccaacaggagcacacaggcaaaaccactcagccaattattaaccctcatatttatctgtttaatttatttatacttgctatttcctcgcttatgaaaaatatataccatttttcaagtataaaagttatgcattggctgtcagcatactatatattcaaatcttttccccggggaacttgtttttgtggaattattccacaaacgagctgaattattccacaacattcgctatttcgttttcgtatagggatttgtaatttaaacgatattttaaccgatccgatatgagacgaatcttatttctgttatttttaagcctgatcttagggggccggtcaaaagcccagcaagacccggtactcgatctgcaacaaacgatgccttcagaagacagttggtggcaatttttcggagattcgacacttatccgtctgatcgacaaatctgtagccaataattataatctgcagaatgcagtaaaaaatatccaattggcgaaatcgcgctggcggtcacaacagggccattttttcccgagtttcagcgcttcggcccaatatacaccggaaaaaagcagtctgggcatcgaccatgccgataattactaccacatcgggcaggccggtatagaaatgaattgggaaatcgatgtgttcggcaatatccggaaaggagccaaagcccaaaaagaatattacctggcttcacaggaggattaccggggtacaatggtctcgctcgcctcagaagtggcgatggcttatatccgtctgcgcacttaccagcaacaactggaagttgcccgtaataacctggaatcccaggaggagattctccggatcaatgaagccaaactggcggccggactgacttccaacctaacggtggcgcaatcgaaaggcctgtggctacaaacgaaggcaacccttcccggactggaagcctcggtctactcggaagtgaatacactggctgtcctgaccggagagtattcggattctttacggcaagctttactgcaagtgcaccctctcccccaaggcaacccgatccttatgcaaggaatcccggccgaactgatccggcggcgcccggatgtccgctcggccgaacggacgatggatgcactggcagccgcagcaggagcaacacgggcagactggtggccgaaattctacctaacgggcgctttcgggtatggcaacgaatattacaaacagtttttcaagaaggagaacatgacgtggcaaatcagcccgagcatcaaatggacgattttcagcgggcgccagatcgcccaggctaaccggcaggcccaaatccaactggacgaagggatcaatacgtataaccaaactctgctcacagctttgcaagaggtagacgatgccttatcgtcatataataaatcactccaacaactggatgcagaccggcttgctctgcaggaaattaaactgacactggaatatgcaatggacctgtataagaaaggactgaccaattaccagaatgtactggactcacaacgcaatgtattgaactacgaaaatgtgtatgtgaattcgcagagtgcaaccctgctctatatgatacaggtgtataaggcactggggggaggagtggaaaaataaagttaaaggctaaaagcgaattaaaaaaatcattgttatgaaaaagatgatcgttctgatgattggtttgggagtgatattgggaggttgcaggaagaaagagaaacaggaagccgcaagcggacaagcggccccggagattttagtgaacagacctgcccaacacgatgtcgtgtatacgtatcagtatccggcttatctggaagccgtgcaaacggtgaatctggtggcccgggtatcgggattcctggaaaagatgaattatatcccgggagtgccggtaaaagcaggccagttgttgtttgtcatcgaacctcaaccctatcaggatcagttgaaagcggcacaggccgaaatgaagagtacagaggcacgtctggcttacgccagggcacaatacgagaagatgaaagaagcgatgcctagccgggctatcagtgagatcgacttcatccaggccgaatcggattaccattcggcgatagcgaatcttcagaatgcccgggcacaattgaatactgctcagaccaatctgaattattgttacatcaaagctcctttcgacggacgggtatcccggaacctggtggaccttcagaactttgtcggaggagcggtacaaccggtcaccctggctacgatgtataaagataagtatatgtatgcttatttcaatatggcttatgccgagttcgaacaaattcctccggtgaccaatccgctggtatcgaaagattcggccctggcgctgacggtcatcaatgctgcggacaccagccgttattggaaaggcgagctcgactatacttcgccgaacgtcgatctgcaaaccgggacggtgaccgtacgggccattctcgaaaatccgaaagaagaattattaagcgggatgtatgttaaaatccggcttccctataaagtggtaaaagatgctttactgataccggaggcttcgatcggcacgggacaggcaggccgctatgtctatctggtggatgagaacaaccgggtggtgcagcaaaccgtcaaagtcggggtattgagtaacgacggcatgcgggagatcgtcagcggtgtcactccggacgaccgttatgtcgtggaagccctgatgaatgtgcgtccgggcatgaccgtgaaaccagtgagagaaaaaacaaaacgttaatctattcctatgttcagtacatttttcattaaccgccctatattcgctacggtcctgtctatccttatcgtgatcgcaggactggtatctttacgtggtctgccggtagaacaatatccgacgatcactcctccgacagtcgttgtccgggcctcctaccccggagccaatgccagtacaatcgccgacatggtaggtaccccgatcgagcaacaagtgaacggcgtagagggtatgctttatatgtcgtcgacttcgtcgagcacaggcagctaccagctgaccatcactttcgaagtgggaaccgacctggatatggccaccgtgctcgtagaaaaccgggtgaacatggccctgagcactttaccgcaggaggtgacccagatcggggtcactacgaccaaggaatcgaccaacgtcgtgatgtttctgtcactgacctcggatagtccgcaatacgacgctctttttctctctaattatgcggccctgaatatcaccaacgaattgggccgggtaaaaggagtaggtaatgtgggcttgttcggcatgggcaaatacagtatgcgtatctggctggatccggatcagctgactatccggggcatcactccggcggatatcgtatcggccattcagggccagaatatccaggttacagcgggcagcgtgggatcggaacccttagtccgcaaagaagcctaccaatacaccctcgaaaccaaaggattactgatcgatgaagaagaattcggcaatatcatcgtcaaggcccttcccgacggcaaataccttcgcatccgtgacctggccactatagagctcggacgtgaaagctacagctccaccgccaccctgaaaggcggagccgtcgcagctatcgccgtctatcagcttccgggagccaacgccctggacgtggcacaacgggtgaaaaaagagatggacaaactggcctcctatttccccgaaggggtgcaatacagcgtgaccctcgatacgacggaatttatcaatgcctcgatttcaggaatatacgaaaccctgatcaccgcctttatcctggttttactggttattctgatcttcctccaaaactggcgggcgatgctgattccgctgatcacgattcccgtctcgctggtcgggactttcaccttcatggcgatgctgggattttccatcaatacgctgactctcttcggactggtactggctatcgggctggtagtagacgacgccattatcatcgtagaaaacagttaccggctgatcgaaaccggccggtatcccaccgtaaaagaggcggtgatccaggccatgaaggaagtgtcgggagctgttgtgggtattgtgctcgtactgttggccgtatttattcccacggcctttatcggcggcatcaccggccagttgtacaaacaattcgccctgacgatcgccatctcgacggtaatcagcgggttcaacgccctcaccctgagccccgcactttgtgccctgtttctgaaacccaaacagccggccaaattctttctcttcaaagctttcaaccggttttttgaaaagacaaaccatggttatacctgggtgatcactcacttcatgcgtaaatcgctgatgacttttatcgtctttttgatcctttcggtgctggctttctggggatttatcaaatggccgcgtacttttatcccggaagaagaccaggggtatttcatcgctttcatgcaactgaccgacggtgcttcgtcgagccagacggctacagccctgcaaaaagcgtcggccgtactgaaccaaatggaaggcatcgaaacctatatcacgatcaacggcttttcaatgatgagtaatgcaaacgcttcgaatgccgccacgctgttcgtgatgctcaaaaactgggaccaacggaaatctccgcagttaagcgcccaaagcctggtgaaccaattcaacggtatggcctatgaagcgataccggaagccagaaccttcgccgtcttaccgccggccatcccgggattgggcgaaagcagcgggtttgaagtcatgctggaggatatcaacagctacggcccgcaagaactgcaacgcatgacagacgaactgatgctcgccggcaacgagaccccgggtctctctaccgtccagtcgatgttcagcgccagtgtaccccagtattacctgaatatcgaccggaacaaagtagagctgatgcagattccgctaagcgaggtgttcaatacgatcggcacatacctcggttccacctatgtcaacaattttgtgaaattcggccgcacttaccaggtgaaggtcgaaggtgcccccgacagccgggctctggtaaccgacctacgcctattgaatgtccgcaactccaagggcgacatgattcccctttcggcctttactactatcgagacgcggatcggcgcagagagcctgacgaaatacaacacttacgtatccgccctgatctcgggtgccgcagcagacggttatagctcgggagaggcgctgaatattatggccaaactgatccgggagaaagtgggacgctccttcggttatgaatggacttctatggcatatcaggaagaaaatgcgagttcgtccacctccatcatctttatactggccatcgtggtggctttcctgatcctggcagcccaatacgagagctggacggatccttttgcagtgatcatgggtttgcctatcgccctgctgggagtagtgatcggagtgatggtcatgaatcttccgatcagcgtttacacccaaatcggagtagtgcttctgattgccctggcggcgaaaaatgccatcctgatcgtagaattcgcccgggattaccgggctgcaggcaagtcgaccgaagaatcggcgatcgaaggcggacgcgtacgtctccgcccgatcctgatgacctcttttgctttcatcctcggcactttcccgctggtgatttcgaccggagccggagcttcgagccggatctcgctcggtatcgccgtttttgccggtatgttgatgacctccctcgtaggcaccttgtttattcccaatttctacctgatgatggagagcctgcacgaacggtttacccgcaaaaagaaaaaagacaaagacacggaagagaaccttcccgccgtatacgaggaacaactcccgatgaagcgggagtgagacagggagagggattagcgtcgcttcgttcctgatcaggggcgtcattcaggctccggaccggcaaaacctctccggtttctggccagcgaacctctggttctgactgtaaagccgaccggaaagattgtgccgccggtcagccaggcattcatcagcaagcgggaattgcaccgatcagcatcgaagagatgccgaccgataaagcgctaatcggtaacctccggttacactggtcaagaccgaagatgtgccaccaactgcctgtcggagaaaccggtataagccttcagcaccataagaccgatctttgcacaaagactgaaaatgttcttgcgtccaagacgttgctccgacagacctgattctttggctatacgctcaaacgggaacactgaatgaagcctgccaagctcactctcatgaaaactcttgcgatatttttccagaatatcaaattctgtaaagcctaatgtaggctgaatctcggaaatatttcgtatttttgccatatcttagttggggtatttcccccgttttggccgtcaaaccttgttttcgggggaatacctaaagatacaaaaaagccaactaattcgcaatagtttgtgtatgaattagttggctgattttatagggatattcagtaaatgtccctaaaaagtaagatggcat

SEQ ID NO: 5928 - DNA, 2906 bp, Unknown
  gut microbiota DNA sequence
ctgaacacgaataccggaaactgctttgcttatcctcccttagcgtctcggaatatcgaccgaagtttctttttgacctttaagatgctcagaaaagaaatccaccagccgccaatagaaatattcgtccatatctccgaaactatgacgttgccccggaagaatcagcatctcgaaacgcttattagcccggatcaaagcattcacaacacggatcgtattcgcatcatggacattattatcgatatcaccatgtacaagcatcaaatgacctttcaattgcttaacaatttcgggattcgtagctattttataaacaaaagtagtatctcctttttccgaaacgacctctttcacgccatgatgtgtctcgctccaccaacggttataaatccggttgtcgtggttcccggcacaggataccgcagctttataaaaatcgggatattgacaaattgcagctgtagacataaagccacctcccgaatgaccgtgtatgccgactctgtcgatatctataaacttatggcgggcagccaattgttcgacagccaccttatgatcggccaaaggataatcacgcatattcccataaccataattatgataccatttggagcgggaaggatgtccaccccgctgtcctaccgaaatcacaatgaatccggcctgagccaaacgatccgtccgtacactcatccgggtaaaaggataacatacagcttcaacctggggacccggataaacataatcgataatgggatataccttggtcgaatcgaaatcgtaaggtttatacatcaccccgtataaatccgtcaccccatcggcagccttgacgacaaaaggttccggaaaccggtaaccggccgctttcaattgcgaaaaatcactttcctgaatagtcatcactttattcccctcccggtctaacagatcggcacaaggaatcgtattcaccctcgaataattatccacaacaaaacgggcatcgtcatctatttttactttatgaaaatactccccttttgtaatccgtttcagtccactaccatttacattcactttatacagctgttcataatacggattttctccctcttccttgccattccccacaaaatagatcgtccgtgtagcttcatccactttcagcacctgctccacatgccaggggcctttcgtgatccggtttttaagatttccctgatcatcgtataaatataaatgagcccatccgtcacgttcactccaatgaatcaactccttacccttattcaagacagccaaaggccgcgtttcctgataagtattcatccgctcctgaataatcggcacaatcgaatcctgcccgatcgtataagagcagatatcgatacgatgaaggtcccggctactacgaaccagaaaaaaacggtcgttatctcccagccaaaccggtgatacatactccatgtcccgctgtttctgttctgcaggtttataggataaactcagattttgatttttaaacgccgctacttttatttccttacgaacattattctgcatatcgaatacataaagatgctcctcaggggcttccatctctccaggcatctgatatttataagtttccaacgtaggacgtggctgagcgatagaattgatcacccacaattcctttactgcccggtcgtcggataccgttaccgcaaagtgtctggaatcgggagaccaacatcccgatacccgccggcgtttaccgttgcaaagcgtatcggtattcaacatactgtaaggaatgccataaccgaaatccttcactccatcctgtgtcaattgaatctcgagaatcgtactgtccttctcgtttttccgggctttctcataatcttcccgactcatccggaaaaggttacaatccttagcatatatcaccgtctggccatcgggagaaaaatttccccatcccaattttttcggttccttttcctgccctttcagatgagtaagtttacgggaaggataatcataagagaaataaaagacttctttttctcctttcttcttgtctttctcctcttttctcggtttcacttcttgcgaagattccacctcaaaagtaaacgtccggccgtcttcctttgccttgagattacgtatcggcagatggcgggcctcgaaaggatcacgaacgatctccgtcagctgagcagccagttcatcccggtcgaacagcagattctttgtacgcgcaaccggatcgaccacataccaaaaagttccttcactcgttttatactcgaaccagaaacgatttcctttctgaaaccaatgcggatcgaccaaagtagaaaacaacatgttcttcagcttatctccggtaaacttttctgcctgcaaatattcaggcaacctctcttgcgaaaataccttaccggcacaacaaaggccgataaataaaaaaataataatccgattttttttcatataataaccatttcaacgttgtgtacaaaaatacacattttcgtaaaaagtaatccgcaaaagacaaggagtaataaataatccgttatcaaatcgtatttattaaaaataaataccagacatacaaattttatgtaataaattttacatgtttttgcaataaaaattatctttgtaatcagtcacaagaagaatactgttaaatagtaaaatatttaatgtacaccaacaggaatgccatagtatgcggcttgtcagcgggttccggtttaccgggacatattcgcttcagtagaagtgaatacaggtatagtatgctgtggttttctttagttatcggttttttgcaaaaaaaatgcactgagaatttggaggttatgaaattttttatactctctctctctctctctctctctctctctctctctctctct

SEQ ID NO: 5929 - DNA, 17398 bp, Unknown
  gut microbiota DNA sequence
gcgcgttaagatatagattattctttaattttcaaagagttaagagagcgttttttcgctggatttcatactttttccggtctttttcggttttcgttatttgttatcattgccaccgccttttcctgcggagagtgcggtatactataccttccggcggtatgtggcctatggataggccatgcccgtatgcagccggaaccgtttgtatatacaccgatcatagaaaaccaaaaacaataataccggaataaacatcgcatgaagaagattctattcatagggctgctgtttgttttggcgggcacgggggtttggtcccaggaggtgtccgactcagtccgcatccattaccgccggggataccggggagtggatcccgattaccacaacaaccgttccgaattggaacggtttatccgtaccctgcgcagggaacaggagtcggaccgtctggaacgtgtcgtaatctgctcgtggacatcacccgacggggtgacccgctacaacgagctgcttgccggccgccgtgccgactcgctgaaatcctggcttgtgcgccacgcacagattcccggggagctggtgagcgttcgcggcgaaggcatcggctggggcgtactacggcagttggtggcagtatccgatatgctttataaggacgaagtgctacacatcctcgacaatactcccgtgtggattcgcgactcccatggcaaaatcgtggacggacgcaagaaacagctgatggacctgcgtggcggacagccctataattatatgatggaaaacattttcccggaagtgcgttccagtctttcgaccatctgctaccgaaaatccgccccttctatagacaaggttactaccggtactgctcccacggattccgctcttgcggaaaaggaagagacagagacagccgggtttcgcaacacagcggcgctgatatctgccggaccgggagcggacactccggcggagacctccccggtaacctcgccgaaggcttccgggaaattgcgggaagcactcgcccaaaacctggtgatcaagaccaatctgctctacgatgccctgctcatgccatcgctggaggcggaataccgcttcaatgactgctggacggtcaatctcgaaggggaaatagcatggtggaagaacgacggcaaacacaagtattatcagctggccaccatcagcccggaagtgcgctggtggttcggacagcagaaaaacaacccctggcacgggcattacctgggcctgttcggcggcttctcgtggttcgaccttgagaacaaggagaacggttaccagggtgaggccgaaatagcagggctcagctacggctacatgttccccattgcccgtcggctctcgctggaagcgggcctcggactaggctacctgcacagtaagtatgaggaatacgaacccgtgccccacatgggcggcacgcactatgtttacctacagaccaaacgtgtggactatttcggtccgctgaaactgaaactggcgctcgtatggcatttgcaggatattaacaggaagaaaggaggcgcacaatgagaagaacgatattatggcatgcagtaacgggccttgtgctctcaggcctggtgacactgtcctcaggctgccgtaaagagctttgctacaaccacgacgaacatgcctactccgttaaggtggatgtgactgccacctgggagcgggaatgggaacgcgaccacggcaggggatggaaaaatacctgggaaggcaggggatggaacagctggatgacgtatgacgacctgcgtcccgaagtacccgggggtatacgcgccgtagtatatgatccggacggtaacaggcatgacgagcgcaacctggctgcggagggcggacggctggccatgaccgaaggcagacactccatcctgttttacaacaacaatacggaatacatcgtgttcaacgacctgacttcttcggccacggcaaccgccaccacgcgcacccgtacccgagccggattcagcgaactgcacaaggacgaacgcactgtagggcagcccgatatgctctacggcagttacctcggggaatacgaggcgaagcccggctacgaggcggtgagcctgcccgtggaactgcgcccgctggtctacacctacgtggtacgttgtgagttcagccacggagcccaatacgtggcgctggcccgcggagcactggcgggtatggccgagagcgtctacctgcaggacgggcacacgggcagcggggcagccacggtgttcttcgatgccaccgtctgcgactggggctcgtgggcgcaggtacgttcgttcggcatccccgactggccgggcgacggatatacccgggctactgaccgcaactacaccctgcagctcgaagtgcgcctgaaaaacgggaaatacctcccgccgttcatggtggacatcaccgaacaggtgaaagcgcagccacgcggcggagtgatcgtcatcacggggctggaagtgtccgacgaagacggtgagtccggaggttcgggttttgatgtggaggtcggcgactggggcgacagacacgaatacgaactgccggtctagtccgcttacaaaggcatattcagaaaaacaatgctgtttttaaaaccataatattccatttttaatactcaattttatgaaaagaagtcttattttgcttggagcagtcacagcgactcttgcaagctgtagtaaaagtgaagtagtggacgtcaatgacagccaggctatcggtttcgagacgttcgtgaacaaatccacacgtgccgtaacgaatgatgaaggtacggtaaccaataagttgcttgatttttatgtctacggaggttcaaatgaaagccagaatctgtttgccggtgataaggtttacagaagctcagcatctgacccctggaagtatgacaacaccaagtattggtttaaaaaccgtacctataagttcgcagccatcagtccgggagcgggagccaatctttccgccaattttggttatagcgacggccacatggagttgaccgctaccgtagataacgctaccgctaaccagtacgatcttgtttatggtgaggcgactaagaccacttcggaggatttaagcagtgtgagtaccgttgcattcaaccttggtcatatcctttccaaaatacgtatcctgttcgagaaaaataataatttcggtaaggaaacacagcttgtgattactaatcttacgttggcaggtgcaaatacgagtacaggttcaggcatctttagtaagggtgtttacaaatataataatggctggacctggactaaagcagcagagggttctgctgacgttaccttctctacttctacctcttatactgtaaccgataaatccataaccggagaaacgtcggtagaagaagtgggacagactttttatgtcattccgcagacacctgatagcggagtcaaactctctttcactgtacagttgcaggaacacaatggaactgactgggaaaatgtgggttccgctcaaacattgactaaaacgattgcaacagctcaggcaacatggaattccaataatatttatacttataaggtaaaattaagcgagacgaccttacccggagacgatcgttatgcaattgactttagcgctactgtcgattcctggggaacggacaatactccagttgacgtagattttgcaaattaaactacccgggccgggcggggttgaatgttcccttcccggtcacaatgagaaaacaaattaaaaaaaacggacataaggtatgaataagagaaataacacgatcaggggcgtgttgttgctggttgcggcggcgctgatgttttcctcctgtgcggagactccgggtccggaagaggaggttacggacacgcggacgatcagtttcggaacccccgcgcttacccgttcggccatcgataacgcgggggacatgcagaaggaagaaaacgctttctccgtatggggatggtacgcaaatgcgggcggcacggagagcgggacagtattcaacaataagcgcgttttctggtcggctgccaatccgggctggggctacgagggcacccgctactggcatcccggcctcgattaccgcttctacgccctctatccctcaacagacaagctgggcacgggcgtaaatgcggcatgtgcggtgaacggcacaatcaccattaccaacttcgacgccacgcacggcaccgacttgatgacagcacagcagacagtccaaactccggatgtgctgacgaaggaccccggtcccgtgaccttcactttcgcccaccagctggcgcggctcagctttgcggtaaaagccgtgggatgcgaggcgacggtcacagccttcaaggtgaacggcgtgacctggaaggtcaaccttacctgtccggcatcgggcactccctcgtggagcggtggcgaaaagaccaccgacggggacagccggctgaccaaagccgacgggaatattacggtgtccggcggcaacaccataaccatgctacaggatgtgctgttgcctccccataccgctgccgacctgacagatgctgtcatcaacatggcctaccgtctcaagggcgacacgggggacgaccgcacagctgaggtagaactcgccacgacggagataccccactgggatgcggcccagcagtacagttacaccctgaccgtctcggcatcctcgcttaccctcacgtggaaggtgaagccctgggatacgaaggacaccgaagtgtcgtggggaccggatgaaacgaccaaccaagaataaaaaacagacgaagctatgaaaagagaactgaaatcatatcttgccggatggcttgccctgtacctggcagcggtgtgcctgccgttcctgctggcgggatgtgccagtgacggtgcggcaccctggcctgtggacggagaaaccacctccgtcaccctgcgcatgtcggtggccggagccgtcggtacgcgcgccgacggtacggaggatgagtacgccacgctggaaaaccggataaataccctgcgcgtactggtggtgacggacggtaacaaaattgccgtaaaccacaaactcacgccggaagaacttgccgcccaaacggtgacgatagaaaatgtgcccgtgggcaaggtgactttctgtgtcctggccaacgaggctgccttgggtaaggattacgatacggaggagtttgagcttgtagacgtaccggaccggacatcaaaggaggctttgctggaagaccctgatcgtacgtatttcccgaaacggttctccgaagtgaatatagataaggggctgcccatgagttggattgtgtgcgactacgaggtaaaagcaggctccccgacaggtactcccggggaacctctcgaagcacaattagtgcgctgcgtggccaagctcaatatcagcatgaataacgatctggattccgagatcaacatcaaggcggtaaatttcggcactttcttcggcgacaggctctatcttttcggcgaacagtcgctggatgtgcccggcagtactgcgtacgaagccaagagctatccctatgaaacggaggcggattacatcaaaatccccgcatacggcgaaaagatgctggtatgctacatctatccttcctacgcctggctgccggaaatgacggactcgccctataccatcgggttcgccacgctggcgaaagggacctatccccaaaaggctttcatcaccgagggtgcactgaactccatcgcccgtaatacacaggtaaacatccgtgccacgctgagcgtagatgcccgcctgatcctgaaatatgaggtggtggattggggcaagaaagaaatcaccgttccgccgttcaattaaacaaaccggtatgttattcaaagttatgaagataagattaagaagaatgagccgcctgttgtcggtggcggcgctgtcggtagcgttgttttcgtgtgccgacgaggagattgtgggaggaggtccccgtgtgcaggaagggcttccggcaaaaattgtactgaaagtcgtttccaatgaaaaccgcattgaaacccgtgccgcacagcccgatgagaacgagatgcgggtgaacaacctctatgtgttcgtgttcgacgaggatggaaatgtctgtaaagaaggaagcgggctttacagtaatcctaatacaacaacggatgataatggaaaggttacaggaaatattgtctttacggcccgttcgaaaaacaatgcgcaaattgcgggtattgccaacatcacgacgggcaacgtcaactccacttatgaactcacggaaaaccagctgaaagaggtgaagacgaagccccagttgcttgccctgctggcaaatctgaatgagcagacattggaacgttcgtcacaattcattatgtcaggctgggttacagacggtaagggcaatgagatattcaatatccccggaagcgaggacagcgaaaaaataactgagtttaattgcaacctacagctcaaacgcctggatgccaaagtggagttcatcgtaaaaacggaagttcccgctgaaaaaataggtatatggaaaaactttgacttccgccccaaagactggcgggtggtgaacgtgcccgctcagtcgttggtacttcccaagacggatggcgataccggcggtgagaagtgcgaatacttcgataccaaagagatgccgttcgagagagaggttcgcgatgccgactatatgctggatacttgcagttttgtattctatatgccggaaaaccgccagacacccgtgaagagcataaaggaggcagaaataacccctacacccgaaggcggagagaaggaggttgcagcgcggtatgccctgcgtgaaaagcgggataaggcagcacaggaaccgggtgatgattttagcagcaagccggggcagaaatacgagaacggagccttcacctacgcccccgagaatgccacttacgtggaaatgacggggacactgtcctacgtggacggagaaggctattcggtcaatgccgacgtgaagtttacggtacatttaggttatgtcaacgctgaccccgacgactacaacaccgagcgcaacacccactacacctacaccgtcaccctgcgtggcgtcaacgatatagtggtggaggtgacggcaggagcacaagacgatgagcgggaagaccgccccggctacgagggcgatctgatatatatcgcagaagccaatctgtacaacctggatgcccactacgaccgtgtactgatacacctcgaccgcagcaaggcaatgaaaatgacctggggagtacgtactccgtataacaaggccatctatgacatcaaaggctttgagaatgaaacagaaccgggaggttacatagacggtgctaatatcgaggatgagaatgccggatacggtatcaacgactaccggtggattaagtttgccatcaacgaagattacggtcagacggaccccacaaagttcgtgaaataccccggtgaccataactaccaaggcctggataacgggggaactaagtcgggatatgccccacatccggagaatgcccgtttgctcgacgtacatcagcttatacagcggttgagggatgactatacgaaaaaggggttgacgacaggcacagttgccgtcaccgcctttattgacgagtacgtgtatgtgtgccacccgtgggatctccgccacgatgccaaaaccaactacctgctgggcaaatggcgcgactacgtgggtgccgaagaccggctgctctacatcatcgacggggacaatgcccgcttcagccccgacggggcatcgagcgtgatgtcgtccctgctgaccttcaggcagaaatccatccgcacggtgtatgacgtggctaatccgaatataaattcctgctggggattggagagccgcatggagggagacttagtggatgtaggttccaccataagccggggtacatccaacaataacggtcgtctgaacaccctacgatgcctgttgggagataattacgataacgaagaagttcaggatttgcgttggaccgatgtactgaataccgcagactcgtataagctaaacgacgggcacaaggacgccctgcacgctgtgctgatgcgtaaccgcgacctaaacggggatgactacgtgcagccttcggaaatccgctggtacttggccgccaaagaccagcttgtggacttctacatcggcgagagtgccttagacgacgcctcgcacctctatcccgtcaatcctgccgatcggggcggacatctgtattggcgttacaccaccagcaccgcctacgatggaggacagagcggccgtagtggggcatggggattatatgccgaggaatgtgttgctttagcggcaaccagcggcatgagagtgacagagttgaacaacaggttcacctatcggtgcgtgcgtaacctcggtatcgaccttgccgaccctgacactgaacctatggcacttattccgaaagtgacaagcgcagaaagtgacggcacctacgtgatagactgctctaacctcagccccaaggcacgccgccagagtatggaaaccggtcatctgcccgtgcacaacgacctctcgccttataaccgcccgtacaccaagttccaggtggcgactgtagatcaggattatcccacaccgagtttgtcagttgattttcggggtaatgagagctggtcaaacgatcgcgattgggtcatatatcagaatgacgaaaacgtcacaccgtcggggttccgcgtacccaacctgcgcgaactgctgattatgcagacccgtctgcctcgggaagcgtggaaaacttatcaaggcagatttacgttaattagtccgtggcattatagcagagccatgtacctgagctataccactttcagccggggaacttatacgacaggaggtggagacggtactttcaatggtcagaatggcagaccgaataagggcggtggtttccgtttcaatgccgaggagaactccatcggagcaacgggtgccggtacgggtggacacgaaggctatatccgcgccgtgagagacatccaatagcaggaataaccacatttataataaaacagtagaagaggctgtaccataacccggataccgggattacgttgcagcctctccctgttattttccctgaatgcatggtattttcagcctacaaccgtcggcagcaaattcccccacaggattaccggatcaacggcattcagttgccctgtacacttattgttcattcgctttccatttcctggcagcttccgtcaggcggtatttttgttcagggtgtttggctggtcaggatacagacgttcaatagtgccatcaccccttttacactcatatagtcatcgcccataaattcaatcagttgccgtgcttgggtcgtatttgggtcatacccggttcctgttgattggcttttaatttagctacagtctctgcctgatcagagcattgaaattttccctgtatggttttcttttctatgaacttttcattttggttattgtttctgtatctttgctgtcatcagaagtttttcagcaatccgttcacgaaaaaatatgttgattgttaaagaacaaaaataaacaaatatggaatatcatatagatcccgttgattttatcgtaggaaagaccggaggagaaaaccgggcggtacgcaacctactcgatttatttgcagaaggggctacgattccttttattgcccggtaccgtaaagagaaaaccggtaatatggatgaagtacgaatcggggaaatcaaaactttatatactcagtttcaggaactcgaaaaaaggaaaaatgctgttttagatacgatccgggaacaggaaaaattgactcccgctttagaaaaacagatccgggaatgtcaggatatccggatactggaagatctctatctgccctttaaacctaaaaagcaaacccgggcagcgaaggccaaagcgaagggattggaaccgctggcagctcttctgatgcggcaggaaaacggggatattgcggtcaaggcagcccgtttcgtaaaaggtgagatacaggatacagaagaagctttacagggagccagggatatcatggccgaatgggtaaacgagagcgaagcagcacgtaaccgggttcgccgtctgttggaacgggaggcggttatcacggccaaagtagtgaaaggcaaagagcaggaaggtgaaaaatataccgattacttcaatttccaggaaagtctgaaacgttgcccttctcaccggatactagctatccggcgtggagaagcagaagggattctcaaagtttctttaagcatcgacgaagagaacgccttaaagaatttagagcggatttttataaaaggagacaatgagagtgcccggcaagtctggctggcaatgaaagacggctacaaaagattgttgtttccgtccatcgaagccgaatatatgaccttatccaaacagaaagcagatagcgaggctatccgggtctttgcagaaaacttacggcaactgttactcgcttctcctttaggtaataaacgggtattggctatcgatccgggatttcgtacaggttgtaaagtggtatgcctggatgaaaccggcaaactggttcataatgaaaatatttacccccaccctccccgcaatgagtataagcaagcggcagccaaagtgacgaatatggtagcgacctacgacattcaggccatcgctatcgggaacggtacggccggacgggaaacagaaaaatttatccagacattacgcttcgaccggaaggtacaggtgtttgtcgtcagtgaaagtggagcttccgtttattcggcctctaaaattgcccgggaagaatttccggaatacgatgtgacggtgcggggggccgtctcgatcggcagacgattgatggatcctttagccgaattggtcaaaatcgatcctaaatcgatcggtgtcggacagtatcagcatgatgtggatcaaggcggactgaaagaagcgttggatcgggttgtcgaatcgtgtgtgaacaaggtcggagtgaatgtgaataccgccagtaaatatttgctgacctatatttccggtttaggaccggccttagctgaaaacgtggtggcttatattcaggaaaacggagcgttgaaaagccgtgaagaactgaaaaaagtgaaacgtatgggagcgaaagctttcgaacaaagtgccggctttttgagaatcgaaggggccggaaatcctttggataattctgctgttcatccggaatcgtattatatcgttgaaaaaatggcccgcgatctgggtgtcggcgttcatgaactgatcggaaacgaaacactgtgtggccggatagaacctcaacggtatgtggatgaaaaaacgggcctgctgaccctgaaagatattgtggcagaattgagaaaaccggggagagatccccggacaatggcgaaagtattcagttttgccgaaggcatttcaaaaatcgaagatctgcaggtgggtatggtaattccgggaatcgttaccaatattaccggtttcggagcttttgtcgatgtcggagtgaaacaggacggtttggtacatatttcagaaattgccgatcgttatgtaaccgatcctgcagcagaactggtactgaatcaacaagtgatggtaaaggttgtacaagtggaacccgggcgtaaacgaatcggcctttcaatacgccaggcgcagagtaaagattaaatttaaaatccatagatttatgaaaaaacagttgttttttataatcctgttgggagtagtagaattattggccggatgccgccccgaagggaaggaaccggaaaccggagtaagcatcgggttggcccggcaacgcaaacaagatataagcaatttgcaataccggctgaaattccggattcctgaaaataaacaggaagaggtcatcgggaaagtacagatcacactgaagcaggaaaaagtacagcctgtcgtattggattttcgcgaagatccccacaaagtgaaacaactgaaagtgaatggacgaccggattcgatccggatttcgaatgaacatattgtagtagggaccgattacctgaaaaaaggagcgaatgagatcgagatcgattttattgccggtaatcaatccctgaaccggaacgatgaatttttatacaccttgttggtacccgaacgtgcccgaaccttatttccttgtttcgaccaaccggacatgaaagctgtttttaccttgcagctggatatcccggagcaatgggtagccgtagccaatgcagccgtcgagtccgaaaccctccatgaaggccggaaactgatcgcttttcagccgacccaacccctgagtacctatttattttcttttgtagccgggaaatggcaacaactggcagaaagccgggacggcaaaacgatagtcatgtattaccgggaaaccgatcctcagaaagtggcccagcatacgatcattttcgatcaggttttcgcttctctgaaatggctcgaggactataccggaatcccctatccgttcgataaatacgatctggtgattgtaccgggatttcagttcggtggtatggaacatccgggtgcggtgttatacaatgataaacgcatgttcttagggccgcatccgaccatagaagaagaactgggacggatggaactgatcgctcacgaaacgacacatatgtggtttggagatgccgtgacaatggcctggttcgacgatgtgtggaccaaagaagtattcgccaattattttgcctcccagatgacccggccggagtttccgggagtcaatcaccttctgaacgatttgcgtaatttttatattccggcttatgcggaagaccgtacagccggctcaacctcgataaaacaacctttggaaaacttaaaggatgccggtttgatttacggacagattgtctatgataaagcgcccatcgttatgaatatgttactgaaactattgggagaagaagcttttcaaaaaggtatccgggaatatttgcagacttatttatatgggaatgccacatgggataatctgattactattctcaataagtataccgataaggatctggtggcctggagtaatagttgggtaaatgaaaaagggatgccggaaatttccgcttcgtggcatgaccggaccttggtcgtgcggcaaaaagatccctggcatagaggattgagttggccacaaaatataagtgtagccctctatgagggaaaaaatgcagatacactccagtcctctgtgcatgaagtgactttggtatccgattctgcggtgaccgtttttcagaaccggtctgcggatgagtcctgcatttttctgaatcaaaatggtgaagcctatggctatttcgtactggatcagcggacgattacctatgctttagcgcatttgaatactttcgcgaaagcacctgaaacccgtttggctttattgatcaatttgaatgaaaaccgtctgcacggccgtgtagatggtttggcttttgcccggatgttgatcagtaatttgaaaaccgaaaccgaacctttgattatttctacttcgatcgcctatttgaatgagatggccctgcacggacagattgcaggaagtgaagagcttgaagaaagcctgctcggattagcacgcaaaccgggaggaaaaggttgtcaacaggctgctttcagggctttgctcggaaccttccggcaaccggcgacgacacaggaaatttaccggatgtggaaagaacagaaatcttttaccggcttggctttaggagagagcgattatactaaaatggcttatgaattggctgtacgtatgcctgaaaaatatgaggaaatcagggcgacacaggcgacccgtattcaggaccccgaccggaaaagagaatttaactttattgtccgggccgtagctcctgaaacagaaacgcgggattccctatttcggtctttattgatcgccgggaaccgtcggatagaaccttgggttacccagatcgtcggatatctcaaccaccctctccggcaacagcaagccgtgaagtacatcaggccggctttacaggaattacaggaagtgcagcgtaccggagatatctttttccccaagaactggatttcagctacattgcgcggacataattccccggaagcggcacaagtagtccggcaatttctggaacaacatcctgattatcccgttctgctgaaaaataagattttacaaagtgccgaccatttgtaccgataaaatattcaggcatatacggtgatttcaatggtgtcctttactatttgaagggcaatataaagaatatttccatttcgtataaaatcggagtaagtaccaataaccagttggctttccggtatacttacagagtctggcatttcatcggccagaagttccctgctttacgtcaaacggtcaatgatttcgaatatcatgtgtttattgcagaggaaagaggagacaaataccggtggatctctaccgggattaccatccatgatgcctttcggaaacaggagaaataggattttataactgatttgaaactaagcccctgagttcacgtaaagggataaaacggataggttatgaatgaaaaaaagtcattttatgtgatcggtatgagttgtgccggttgtgctgccaatattcaacaggcattatccgaacgtaagggtgtcatagaagccagagtaaatttcgccgcttcagacgtcatagtggaatataaccctacgcttgtttccgataaagatttgcaaaaaacggtacaggaagcaggctacgatctgttgttggaaaatgagacagagcctgaacaggccgaaattttacaacgagaagcctatgataaactacaccggaaaacgataggagcgttattgctatccctccctgtttttgtgatcgggatgttttttatgcatatgccctatggcaactggatcatgctgggatttaccttaccggtcctactggtattcggaagggattttttcattaatgcctggcgacaattgaaacatggacatgccaatatggatactttggtggcggtcagtacaggagtcgcctttctgttcagtctgttcaataccctatggcccacctattggacggaccggggactggaagctcatatttattatgaagcggcagcagtgatcatcgctttaattttattaggccgtttattggaaagccgtgcaaaatcgaatacttcgacagctatccgtaaactgatcggattacagcccaaagaggtgatccggattctcgaagacggtacggaacaggtgatcccgatcaaagcagtacaacccggagacatactattggtgaaacccggagataaaattccggtcgacggcagtgtcacagaaggagtttcttttgtcgacgagagcatgattaccggcgaaccggtacctgtcgagaaagtgaccggtacacatgtctatacaggtacgatcaatcagaaagggagttttaaattcatggccgaaaaagtcgggagcgagactattttagcccagattatcaagatggtacaggaggcccagggtagtaaagctccggtacaacagttggtcgacagaattgctgctatttttgtacctgccgtaatcggtatcgcagcgcttacttttatcggctggatgattgccggtggagaactcgcttttacacatgccttgctgacctcggtaactgtattggttatcgcctgtccctgtgcattgggattggcgaccccgacggcaattatggtaggtatcggcaaaggggctgagaacaatattctgatccgggatgcacagagcctggaacaattgtgtaaagtacaagccgtagttttagataaaaccggaacgattaccgaagggaaacctgtggttaccgatattttctggaatccggggatagatttacggcacagtatggaagttttattgtttatggaaagccgttccgaacatcctctggccgatgctgtggtactccatctgacggaagaagggataaagacgaatctgaagggagaattcaatagtctgacgggacagggcatacaaggtgtgatcaatggggaatcctattttgtagggaatcgccgtttgctggaaatgaacggaatctcccgggaaagtgaacaggcagaacaagccgatgcttgtagtctggaagggaaaaccgtcgtttattttgccgatagcaaacaagtgttggctttaattgtcatcgccgaccggatgaagccaggggctgtaaaagctatcgaacgtttgcaggcagaaggtattgaagtatatatgctcaccggagataatcggatcacagcccgggccgtagccgatagtatcggcctgaaacatttcaaggcagaagtcatgccatcggataaagccgatttcgtgaaggaactacaacaacagggcaagattgtagcgatggcaggtgacggtatcaacgattcgcaggctttggcccaagccgatgtcagcatcgcaatgggaaaaggttcggatattgcaatcgatgtggcgaagatcactttgattacctctgatctgaatgctatcccgaaagcctgggccctctcgaagcaaacggtcgccgctatccggcaaaatctgttttgggcatttatttataacctgatcggtattcccctggcagcaggcattctctatccctgttgcggttttttactcaatccgatgatagctgccgctgcgatggctttcagttcggtttccgtcgttacgaacagcttacgcatcaaagcaaaaaaaatctgatttcaatttttaaatctcaatttccaattattgggtaaccattctgaagtttaagcgttcgtatgagtgtagttaaatttatcgtcccgataaatttaagtttataaagttttttaagaataggacatgaaaacatttaagtttaaaacgaatttgaaatgcaataattgtgttgccaaggttaaatcacaattggatataacagatgaaatccaaagttggtcgatcgatctgaaaagccctgaccggattttgacaataaaggccaaagatgagaaagctgttgcatcggtagaacggatacttgctgaagcgggctatcttgcagaggtttacccggttgaatcatatataactaaaaacgacaaagctatgaaggacgtgaaaaaagaatccgataaacagtccaagccaactacaatt

SEQ ID NO: 5930 - DNA, 4718 bp, Unknown
  gut microbiota DNA sequence
aagaaggagtgaggtttgggaaaaaaattatttttacgtatcaaatgacatgttttatattttgatattttaaggaatgggaaagatgtcatttttatttcttctgttttcattttttttctcggagaggagtgaagattgaaaaacaattgttgtacgatcggcataccttggaggataattatgaatacaggaaggtggaacggagttttcagtgggataagattgcagggatgatagattctttgttgaattttgaaaatcaggctaaagagttcggagctttgagtaattataaaaaccggaacggccgtgctccattgtcggattcgagtcggaaagacgcttatcgggctatcgaagataaatacggggtgaaaagagatcaatccgttccattttataaaacagggaactgggaagttcccgaacgatatgggcgtgatggagcgttagtatcggtcatccgtgatagtgcgggttttttgttggtgacaccttcttctttcggtggtgagtggtgggtacctgaaaaatatgtagatcgtttgggtggggccgactttcggaagttgatatttatcgaccggacgaatcaaaacctggctactttggagcagggggattctacctggttggtcaggagtatgaacccgataacgacaggattgcatagaccgccctataagagagaaacgcctccgggagtctatgtcattcgccgtaagctggaagcgatgccttttttaagggacggttccattgagcccggaggatttgctccatgggccagccgtttttccggaggagcctacctgcatggagtaccggtaaattatccggactccgttgttttggagtatagcggtacgctggggacaactccgcgttcgcacatgtgtgtgagaaatgccacttctcatgctaaattcatttacgattgggcccctataagtgaagcattggtgattgtatttgattaaaataggaaaaatgtataaagtagttattctaattttgagtctggtgtgtggggtaagagtcggaaaagctgtagaagctttaccggaaactacggtggcctctagttttcagttgtatcaggaattggggttgaggggagaagtgaattttcctgcattcgaacaggcactcaaaggattttcccgatatgcttccggacaagaccgcttgttggtactgatcgattataccaaaccttccacggagaagcggttttatattttagatcttttgcaaaaaaaacttttactgagtacttatgtggctcatggcagaggaagtggggataattatgccgtggctttttccaataggcccggttcgtatcaaagttccctgggattttttcgtaccggtgatacttatatgggaaaaaatggttactctttatttttagatggtttggaaaaaggaattaacgataaagcgagggaacgtgctattgttgtgcacggggctaattatgcagatcctgctgtcttgaaaggccagcagcgtctcggtcgcaatctgggttgtcccgccttaccaccggatatcagtaagcaggtcatcgatactatcaaaggtggggtattgctctatatttacggattgaacaaagcttgaggtatatttactcttttccgaggtcgttttcgcactaggattctaaccagaaggtccggaggatcttatctcgacagaatttccgattctttcagcaaggcaagaggaatgctgaacaacgggaaactataattattctgcttttaagtcgttcgaaatttatagaaatagaatgaaaccgggcaatggtccgggatgaaaagtgatgcgatgagacgataaaattaaagctattgtgccggattgtcggatattgagttaacttactgtgtgtgaaatcgtaataatttttaagtcacaccttttaattgtcgattaattcacttagatttgcacgaattttaaaaacctaatattatcgatttcaacgcatagaaatgagaaaatggagtattgacgattcagcagaactgtacaatatcaacggttgggggctgaactatttttcgattaacgaaaaagggcatgttgctgtaacacctaaaacggatggaccttcgatcgatctgaaagaattgatggaggagttacaggttcgtgatgtggaagccccggtacttttgcgattcccggatatcctggataatcggatcgagaaaatttctaattgttttcaggctgctgctcgggaatatggctattcggctaagaatttcattatctatccgatcaaggtcaatcaaatgcgtcctgtcgttgaagagattgtcagtcatgggaataaattcaatatcggtttggaagcaggctcgaagccagagttgcatgcggtactttcgatcgatatcgatgatgaggccatgatcatttgtaatggatataaagatgaaagttatatcgaactggctttgctggctcaaaaaatggggaaacggatttttttggtggtggagaaattgatggagctgaaaaccatcgctcgtttggctaagaaaatgaatgtgaaaccgaatatcggaatccggatcaagctggctagttcagggagtggtaaatgggaagaatcaggaggagatgtaagtaagttcggggtaaattccagtgaacttttggacgctctcgatattcttgaaaaaaataagatggccgattctcttcagctgattcattttcatataggcagtcaggtgaccaatatccgtcgtataaagacagctctgaaagaagcttctcagttttatgtggagttgaaacggatgggatataacattaattttgtagacataggaggcggattgggagtagattatgacggtacccgttcagcgacatcgaatagtatgaattattctattcaggaatatgtcaatgatgccgtttcttctattgtcgatgcttgcgaaaagaatgaattgccgcagccgaatatcattaccgagtcgggacgttccttgacggcccatcattcggtattggtttttgaagccttggccagtaccagtcttccggctttcgatgaaaatgaagatttggcagaagatgctcacgagctggtgaaggaactatatgatttgtgggaaaatctcaatcagccccgtttgttggaaacttggcacgatgctttgcaatgccgtgaagatgctttgaacttatttaatctgggcctgatcgatttgcgtacccgtgcacaggtagaacggcttttctggtccgttgcccgtgaagtatacgagatggccgaagcgacaaaacatgctcccgacgagttaaaaaagattgcgaagatgttaccggataaatatttttgtaatttctcacttttccaatccttacccgattcctgggcgatcgaccagatttttcccattatgccgatttcccggttgaacgaacagcctacaaagtcggctacaattcaggatattacctgtgattcagatgggaaaatcaataattttatttctacccgtaatttttcctatcacctgccggtacatgaattgagcaataaagaaccctattatttcggagtattcctggttggagcttatcaggaaattttaggggatttgcataatttgttcggtgataccaatgctgtgcatatcaaagtgaaaaacggtgaatatgtgatcgataaaattattgaaggagaaacagttgctgacgttctcgagtatgtgcaatttactcctaaacggatggctcgtaccgttgaagtatgggcgacgacttctgtcaaaaaagggatcatttctcctgaggagggaagggaattcttatccaattaccgctccggtttgtatggatatacttatttagaataataataagccgctttccagcggctttttaattaaatcgtaatatgaagacagaaaaagagaaaatgcaggcaggggagacttattatgctttcgatccggagttaatgaagttgcaccgtgactgtttgaaatgggtggaagaatataaccggacttatttccgggattatactcaaggaggtgaattacttcgtaaatttttaccgaatgcccatccttctttagtgatacaggctcctttttggtgtgatttcggattcaatatttacggaggtgagaatggttttattaattataactgtacgattctcgatacggcccggatttatttagggaaaaatatactgatcggcccgaatgtacaattatatgctccgatgcacccgatcgattatcgggaacgcgcaacaggagccgaacatggcgagcccattacaatcggcgatgattgttggataggaggaggagctgtgatttgtcccggggtgacgatcggggaccgttgtatcgttgcagcaggggctgtagtaactaaagatgtgcccgacgattcaatggtaggaggaagtcctgcccgaatcattcggaaattggcctgataaaggggaagtctggtttggaaggggagcatttactaaacatgaagataaggattcgctttgttgtaatcttcttttttttccgaagttcgcttcataataggtatataatagcaggatggttatgataataatcacaatccataaatctttatgttttctttttcccttaaactgaaatctcatatttcttaatttttatttccaattaaaacggacg

SEQ ID NO: 5931 - DNA, 4114 bp, Unknown
  gut microbiota DNA sequence
gtatatcccccttttagctaaactaaactaaactaaacgaattaaaataccgttgtaatccctacaatggtttattttgaaaactttttattcccacgcaactataatgcactaaaattatataaaatatcagttctttccaaattattaaacatctaatatttttttacctgtgggataggctggtatttttgaatataatctaaggccggctctacagcatcggctatataataaaggtgatcgtaagcagaggaaataaattttgctttacggctgtgctcgataaattcgaaaaacagcttataatatccggcggtatttaaaaaaacgatcggtttattgtgctgacccaattgtttcagggtaatgacttcggttatttcttctaaagtcccccaaccaccgggcagagcgataaaagcatccgcatgttcccgcagcaggtgtttacgttccttcatatcgggagcgacgatcaattgtttcaatccgccggcagcgacaccacggtcacggatacactccggtataatcccggttacttcgcctccttgccgaatcgtagcatcggcaacttcccgcatcaacccgatgttcgtgcctccataaatcaattgccaccctaattctccgatcctttttcctaatcggccggcttctctaaaataacacggctccacctcattggcagaagcacaaaatacagctactctcattttaatttattgggaactattttatcttacactaaacttagcggaccttcggtgctgactgcattttccatcagtaccgaaggtccgctcatctctaccgaagtaataacaattcgttctgacttctttctgctttaagcatcgatagttgcataggttgcattttgttcgataaattgccgtctgggcggcacatcgtctcccatcaacatcgagaagatccggtcggcatcggcagcattttcgatagatacctgacgcaatatccggttctccggtgacatggtcgtttcccacaactgctctttactcatctcacccaaacctttgtaacgctggatatgcaacccggcatcccctttaccgttgctcatttcatttaccaactgttccagttctttatctgtccagcaataccgttgttctttatttcctttcttcacagaatataaaggaggcgttgcgatatacagatatccgttctcgatcaccggacgcataaaacggaagaacaaagtcataatcaaagtagcgatatgtgcaccatcgacatcggcatcggccatgatcacaatcttatggtaacgcaatttttccaggttaacggctttggagtcttcctgagtaccgatcgtaatccccagagcctggaaaattatttttatttcatcgctttcatatacccggtgcatcatagccttctctacattcaggatttttccccgcaagggtaaaatagcctggtaacgacggtcacgtccctgttttgccgtgccccctgctgaatctccctcgaccaggaagatttcacattttgccggatcattatccgaacagtcggccagtttaccgggcaaaccggagccactcaatacagttttacgctgcacaagatcacgggctttacgggctgcatgacgcgcagtggctgccagaatgaccttatccacaattgccttagcttctctcgggttttcttcgagatagttttccagaacggtagatacagcttgtgaaacagccgtaccgacttctgtattccccaatttcgttttagtctgaccttcaaactgcggttctgccactttcaccgaaatcacagccgtcaatccttcgcggaaatcatcgctattgatatcgaatttcagttttgaaagcattccgtgactctcggcataagctttcagggtcgtcgtcaagccccgtttgaaaccggtcaggtgagtacctccttctatcgtattgatattattgacataagaaaatacattctctgaaaaacccgtattataatgcaaagcgacctccacagggattccattcttttctgtcgctatatcgatcgtatcttcgatcagtttttcccgggtattatcgaggtattcgacaaattcactcaaaccgtgttgagaaaagaacacttcatgccggggagcattggtctccggatcgatctcccgtttatcggtcaacgacaaacgaatccctttgttcaaataagccaactcccgcaaccgggccgacaagatatcgtatttatactcggtaacataaaaaatcgtatcatccggcaagaaagtaatcgtagtcccggtgcgatcggtatctcctaccacctgtacatctccggcaggaatccctttgtgatattcctgtctccagatttttccttcccggtgaatttctgcaattaaagttgtagaaagcgcattgacgcaagaaacacctaccccgtgcaaaccaccggacactttataagaatctttatcgaacttacctccggcatgcaatacggtcataaccacttccagagccgatttattctctttggaatggcgtgctgtcggaataccccgaccgttatctctcacagagatcgagttatcttcgtttatagttacctgaatatgatcacaaaatccagccaaagcttcgtctatagagttatctacgacctcataaaccaaatggtgcaaccctttgacattaacgtctccgatatacatggagggacgcatcctcactgcctccaaaccttccagtacctgaatactatcggcggaatactctctttcgtttttctctatctcttcgctcatattatagtttaattgattttttcacaaaacatgcaaatataatcattttccaacgaataaccttagaatttttgatagaaaagaaggcacaaacaattaaaacggcgtatcaccgttttaattgcaaattgacgaattcgacaaactcctggggacgcgaacaactgaaaacatatttcttattaccagtacgaaccagaatcaagttattcatatccgttacatacattgaataattgcctaatttattattcctaaaccgccctatatatccaaaaaaaccatcactcccgaaagtttttatagaaccgtttatatcggacttcgaaatccggactacctctaccacctcgctcaacagtatttggggcgaaccgaataagttttttaccattatttttccattatccgcttttaagcgtatcggcatatagcctacaccgacaataatagcaataaagaaaacaattatcaataaatacttcaaccacagcatcacagtcggccaatttaacgatgctatataaaatcctgtaccgaccaaaataatcgaaacgacaatcgttattgccaatatcccgccgctccaatgaaacggaatggaaatactattactttcgaagcccataataaccctccaattgaattttcagtatatccctaacagcatccaatgcagaaacagaaataggaaactccttttcgatcaactccataagcaagttcacttgcttatcaatcatctccgtgtagaaagcatcgctacttattaaaccattgttctctgtccatattctcaacaccggttcattgacttccatcgctgaacttcgcacacttgtctcggaattaacatatacggcctgatttacagcaactcctgtttcatacgcagcaacagtaccagctccaactgtaatcccagctgcagctgcatatattacagcagctccaacaaaaattagcgcaccagctactactacgacaggaactccagctacagctcgcgttgtaggattatacccatcaagattttcaattagatgcataaattcctcataatcttcatcggtcttaaacatcgctcgaatattctcaggtttgttctcttcattaataacaccgatatatcctttctctgagcacaaagctaaaaatgtctcaatatttttcattttaacagccttcaagatatcgtcatcagcaaacgcaaacaacaatctacgttcagcttcatgaagcaccacattaaagtgtatttctttggacgcaacatactcagtagggttatttgcg

SEQ ID NO: 5932 - DNA, 9976 bp, Unknown
  gut microbiota DNA sequence
atagaggaatcctaaggaaagcatggacaatggaaggttagcctctttctaatcgaaaagcagccggccaagggcatagaagaacagatttttctgcaccggaccctatccgcctggaatggaattttttaattaacacgacttttttaagtgaaagaaccgtgatattccctcaagataagattacaaataacaaaaatttcatgtacatttgtattcaaatatcaggagaatgatctatgggaaaaatcaattttttaattctattgtttgccgcagtactttgttgcaattcttgtaagctttataaagtaacatattccacgacaggagcttccatcagtcctgacgtaaagaccttttccgtggattatttcccgaataaggctcctctggtagtaccttatctaagttcgctgtttaccgagaaactgacagattacatgcgttccaaaacaggcttgagtcaattgaccgataacaacggagatattcgtttcgaaggccagatcaccgagtacagccaacggcccatcgatatccaaaaagatgaaatcgcagcctccaaccggctgacgatcggaatcaaagtaaagtatacgaatacgaaagacgataaatacgatttctcttctacgttttccaactatgccgattactcgaccgacgctgatttcgattccatagaggagagcttgattatagaaatcctggataagattatcgacgacatatataataaggcactcgtcaactggtaatcgatcggcagaagaatgaaaagtgaaaaaatcatagaatttatacgtcatcctgaaaaaatcaacaatgacgatctacgggaattacatacactcgtagaacgttatccttattttcagacggctcgtattctatatttaaaagctttatatcttctgggaggtgtcagatttcgcagcgaactaaaagcttcgaccgtccatcttacggatcataagcaatttttcaggtacctgaacaatcagatcggtttcgaacccttgggttccggtacggcaatccctaaaaattcgctgagtcatattgtcgacgaacgtatccgcgaaatccatggtcataccgtcgttcacagccagggtattccggtctgtcagactaccgaagagacaactaccggatgcgaagaagacatcatacaattcaatctccggcaaaagggaagaaaacggccggaaaacgatgagaaagaaatcatttccaaccctatccgactggacgatgtaccgggaataatcgacgattattccaactctacccaagaggataggtccgaagcgaaccattctgccaccccgtatgcctcccccatccagcccatcgatctgagcggaatacagggcatcgtagatgaagccccccgtcctgaaaataatttctctatcgatgtcgatctggacgaagaaatagcggatgcacaggaagaaaaaccatcggtctctctcgatactcccgaaatcatcagtggcggataccggctgaccgaccagcctcataccgaagaaaccgtcataacagagaaagaatcccggaaatcccgaaagaaaaaagacgatctcatcgagcgttttattcagtctgaacccatcatgcccaaaataacttcggcctcgacggataacagggatctatctaaagaaaatccttatatccaagaggaattattcagcgaaacactggcaaaaatatatgtcaaacaacatctgtacgaaaaagcaatctcaacttatataaaattaagtttgaaatatccggaaaaaagtgtttactttgcagaccgaatcgaaaaaataaaagagaacattaataataaagagtaattatgtatacggcaatttctgttttgatattcattatctgcgttttattgatattgattgtattggtacaaaactccaaaggcggaggcttggcttcttcatttgcttcttctaaccaaatcatgggagtaagaaaaacgaccgattttcttgaaaaagcaacctggacgttagccggaggaatgatgatcctgtgtgtattggccaccttttttatccccagaggagaaaatgcagtaaaatctgctatccaggaacaaatcgaagctcagcctgttcagcaacaaaccatcccgactttcccgaccaatccgggagccggcgaaaatgcccaggaaacaggagctgcaacacccggagaataattccattaaaacttaaaatagaatgtcagtatgtcagtcatactgacatttttttgcttttctgccaaacccttttttcccctattttttatcttttatcatttttcctctatttttcaatgatttacattttctttcctcctcttcctttctgtcgtattttttttggcacaaaatatgataagaaggaaatgttgtaacattcaaccttacaacgacgttgaaatattgcgtattaatttgaaaataaaatcatattataaacttttaaatttttaacattatgacactgaagaccgtacttaacaaggtaattgttgagcctgttgaagcagaaactgtaactaaaggagggatcatcatccccgacacagcacaagaaaaaccccagaaaggtacagttatcgcaaccggtaaaggtaaagcagacgaaccgatggaagtaaaagcaggcgatactgttttattcggaaaatattccggtacagaagttcatatcgacgacaagaagtatctggtcatgaaccaaagtgatatccttgcaattctttaattgtaaattgtaagtaatcccaaaaattaaaatctaaaactaatttgttatggcaaaagaaataaaattcaatatcgaagctcgtgacctgatgaaaaaaggggtagatgagctggcaaatgcagtaaaagtaactctgggaccgaaaggccggaatgtagtcatcgaaaagaaattcggagctccccatatcaccaaagacggtgtcagcgtagctaaggaaatcgaactagccgatccgtatgcaaatatcggagcacaaatggtgaaagaagtcgcttccaagaccggagatgatgccggagacggtacgactaccgctactatcctggcccaaagtatcatcaatgtagggttgaaaaacgttactgccggagctaatccgatggaattgaaaagaggtattgaaaaggcagttgctgctgtcgtaaaacatcttgaaggacaaaaagaagaagtaggtaacaactttgaaaaaatccgtcaggtaggtcgtatctctgccaatggcgacgaaacgatcggtaacctgatcgccgaagcaatggaaaaagtcggcatcgaaggagtaattaccgttgaagaagccaaaggaaccgagacagaggtaaaaacggtcggtggtatgcaattcgaccgtggatatatttctccttatttcgtaaccgacagtgagaagatgatctgcgaattcgaaaatccttatatcctgctttatgacaagaagatttcttctatgaaggaattacttccggttctggaaccggtagcacaatcaggtcgtgccttgttgatcatcgccgaggatgtcgaaagcgaagcattggctactttggtggtcaaccgtttgagaggttctttgaagattgcagcagtaaaagctccgggattcggtgaccgccggaaagaaatgctggaagatatcgctatcctgaccggaggtgtcgtcgcttcggaagacaaaggaatgaaactggaaaacctgactatcgatatgttgggtcgtgcagacaaaataagcatcgacaaagaaaatacgacgattgtcaaaggggccggtaaaaaagaatttattcaggagagaatcgagcagatcaagaaattgattgaaaattcgacttccgactatgataaagaaaaactgaaagaacgtctggcaaaactgtcagggggcgttgccgtcctgtatgtcggtgctgcttctgaagttgaaatgaaagaaaagaaagaccggatcgacgatgccctgcatgccacccgtgcagccagcgaagaaggtatcgtaccgggaggtggtgtcgcttacatccgcgcacaagcagccctggaaggtctgaagggagaaaccgaagacgaaactaccggtatcgaaatcatcaaacgtgctatcgaagaaccgttacgtcagattgcttataacgccggtgtcgaaggtgctgtcgttgtcaacaaagtacgtgaaggtaaaggcgatttcggatacaacgcccggaaagatatctatgaagatttgaagaaagccggtgtgatcgatccgaagaaagtaacccgggtagccttggaaaatgcagcttctatcgccggaatgttcctgactaccgaatgtgtattggtggaagagaaaaaagatgaacctgccgctcctgccatgggtggcggaatgccgggaatgatgtaataaaaaatggttcaatacaaggaagctgtctgcgtttgcagacagctttttttgattaattacccgtatattttttgattagtatcataatacccactactattcgtaggtaatcttttcaattctactccttgccagataattttaagaataatttctccattagccgtaaaatttatcttatttcctgatttataagcactaccacttaaatgattataaccaataaaagtatccccaaaccccgtattgtaaaaagcactattagttacagcaggtacagtgatatccaaaaaaacatctacccgtccatcagaattcaaaccagagattttaacaatcctttgcccaccactttcattagttgactttaaacgaggtaacatgtcaaattgttcagaaactagtgttctaatattttcagattgcatattctgaatatatttcaacactttttctagctcttcaaacgaagttatagctttcaaatttttgactactgacttgtctttcacatttttccacattctcccatccatatttggaaaacaacttatcgtactccattatttctgaagtgtcatccgatatgttttttgaacaagaaatggaaaatagtgatatcaccattaatactaaatacaattttttcatcatttttaaattaatacttatctatttgacaatgatatgaaaacattttattatacccaatagtgaatcctcggaaaatattcggaatatttgtcctcccttttcgggaaaagtttagggaacacaccggcaaaaacggtcttattcctgcgtattgtttaattctttcctaaaaatcttaaaaatataagttcgtaatattttcgtaatctgaatgagtttcctatttttacagtcgcaaaattcggaatcttaaaaaatgcaaaaatggattatggaatctttgatgtactgaagctcatcggatcgcttggtgtattcctttatggaatgaaactaatgagtgaatctcttcagaaactggctggcaacaaaatgaggcagatattgacagccatgacttccaatcgtgttacgggtgtacttaccggcttatttattacagccctgatacaaagttcttcggcaacgacagtcatggtcgtgagttttgtcaacgccggattgttggacctggtcggctctatcggtgttattttgggagccaatgtcggcacaaccatcaccagctggttggttgcggtgttaggactgggaaaattcagcatgagcgatctggctcttccgattatcggttgttcactgcccctattgttttcacaaaaacgttcccgcaaaacctggggtgaaatgttcgtcggtttcggtttgttgtttttagccctgcgttttctgcaggaatcgatgccgaccgatttgcacactcttcccggagtaggagaattcatacaaaaaatcagctttctgggattccgttcctggatgatcttcctgcttatcggtgccggtttgactacgatatttcaatcctcctcggctacagttgctttaactttggtgatgtgttcgaaaggctggatcggttatgaagatgctgcagcgatgattatgggtgaaaatatcggaacgactattaccgccaatctggcagcagcagtggccaacgtacaagccaaacgggcagccctagcccattttatcatcaatgtattcggagtgatctggttattcctgatatttaccccttttttgaacttcatcggagacttgtgtgtcaccctgcatctctcgacttataatcccaaattttcggacccgaaactgttgaacgaagctttctcaccggaagcccgggccggagtgaccgcttctataaatgccgccatgccgcttgtattatctcttttcaacaccttggcaaaggggatcaacgtggctattctgatttggtttaccgaatatctggcccggattgtcagccggattattcctcccaagaaaggggaagaaacttttactttgaaacatatcaaaatcggtttgttatctacgccggacgcctcgcttttccaagccaaacaagagatctccctctacgggcaaagtacgctggaaatgtttcacaaaacaatccaggctttcgatatgccctccggagaatatgaaaaagaattcgattatctccagaaaatggaagacgaaagtgaccaggtggaagttgaaattgccgattacctgaccaaagtttccgaatccagactaacctccgaaaactcccaacgggtacgtgcgatgtttaaaatcgtatcggaagtggaaagtgtagccgattctattttaaatgtcgccaaagcgatttatcgtcgtaacgaacagaaaatcaccttcccggaagaattgtccaataaactcaaacatatgtttgccttagtggatgaatctatcgtcgttatgtgtgccaatctggctaccgaatatacccaggtaaacgccaagaaagcctatgaactcgaacaagccatcaacgattaccggaccattttgaaacaggaacacctgatggcgatcgaagaaaaacgatacgaatattctatgggtattctgtataacgaccttttctccgaatgtgagaaaatcggagactatacgataaatgtcacacaggcaatgaaagaaatcggacacgaagaataaaatttcattacctttgtcactcaaataatattttataagattatggcacaggaagatgtattcaaaaaattagtagctcattgtaaggaatatgggtttgtgtttccgtcttcagatatttacgacggactgggagctgtatatgattacggacagaacggcgtggaactgaaaaacaatatcaaacggtattggtgggaatcgatggtccggttacacgaaaatatcgtaggaatcgactctgccattttcatgcatccgaccatctggaaagcttccggccacgtagatgcattcaacgatcccttgatcgataacaaagattctaagaaaagataccgggcagacgttctgatcgaagatcagattgctaaatacgacgaaaaaatcgagaaagacgttgaaaaagcccggaaaaggttcggggaaaagttcgacgaagccttattccgggagaccaatcctcagattcaggaacacatccgcaaaagagaagctctccacgagcggatgtccaatgccttaaatgccaatgacctgaatgaagtacgtcagattattctcgacgagaaaatcgtctgtccgatctccggcacctgcaactggaccgaagtacgccagttcaacctgatgttcgcaactgaaatggggtctaccgcagaaggagccagcaaaatttacctgcgtcccgaaacagctcagggaatcttcgtcaacttcctgaatgtacagaaaaccggacgcatgaaagtgcctttcggtatcgcccagatcggtaaagctttccgtaatgaaatcgtcgcccgccagtttattttccggatgcgcgaattcgaacagatggaaatgcaattttttgtacgccccggttcggaactggagtggttcaaaaaatggaaaacgacccgtatgcgttggcatcagctcctgggattcggggaagaaaactatcgttttcatgatcacgagaagctggcccattatgcgaatgccgccaccgatatcgaattcaaattccccttcggtttcaaagaagtggaaggaattcattcccgtacggatttcgacttatcacaacatcagcaatattccggtaaaaagattcaatatttcgataccgaactgaacgaatcttatgtgccttatgtgatcgaaacctctatcggtgtagaccggatgttcctgcagattatgtcggctgcttattgcgaagaagacctgagcaaagacggcaaacaggattcccgtgtcgtactgcgcctgccggcagctctggccccggtaaagatggccattatgccactggtgaagaaagacgggctgcctgaaaaagcgcaggaaatcatgaacctgctgaaatacgatttcaactgtcaatacgacgagaaagactctatcggtaaacgctaccgccgtcaggacgctatcggtactcctttctgtatcactgtcgaccaccagactctgaaagaccatgccgtcactatccgcgaccgcgacaccatgcagcaggaacgggtagccatcgatcaactcttcggtatactcaaagaaaaatgcgatatgcaaactttgctgagaaaaatgaccgaatagtcagctcatcgagggatcggtttctttggttaataatcagaatcaccgtcctccgggtatacttcgcgtaagtgctgtgaattctgacgatccggaagaaccctgtcggaataattataatacatagaataaaccccgaaagccagataaaactttcggggcttattctataataattacaccgccatgtaataagcaaattttaaatcgtcatttttcggtaaagttaaatcaccacattataatcgggatcatttgtttaaactattgataatgtcggtttgcttgtcattatacaaaaaatgggttaaggtatatgtcagtttttcagggttcatgccggaagtgttggcttcgaaaataggctccggcttcgtcggaacttctacaaattcctccccattgcgaactctgagaatctcggctatctccatcaggcagcagccgttgaagacacccgtctcaaggtatttggagaaggcttcgacaagtgaagcaaattaaaaattttagtgaagattttcttttgaatttaaacgttctacagtattagttgttgtcgttgttgtatactctaaaatatttgaaccgatagggtcataaataaatccgccatgttcattagatacaacacataatgatttaaagtgcttatttttataactccattctaattccaaatattcataatccaaatgaattaaattattaagctgttgtcttagtgaggtaagcagacttttttctcctatagactctgcaatttctaatcgcttacgaatagaaatgatttcaaatttaggcaacactctttcccgaatgacgcaggaatctccccttgatacagtatctctcatcactatgggaggtaaatgcaaaatagcaggagcattgtaggataataaggaatctattatatcggatttaacagtttgagatccaattattcctttataggtataccctaatagtttcaaaaacgacacatcacccctattttcttcattgaagctattttttaaagcttcgagccggtcttgccaagttgtaggtgtattttgtgaaaaacatacatttgtatataaaacacctgatatcaaaataacaaaatagaataaattgaatgattttttttccatacttttctaataatttttattagttcaaatatataacaatcccaaatcaaaaataaacgactaattatcttatttttccgaacattgagcccaatttt

SEQ ID NO: 5933 - DNA, 19361 bp, Unknown
  gut microbiota DNA sequence
accaatttgagagtgtataatcggttattgtaaaaaaaaaaaaacggctatggccctaaattttcgtaattttgtaaaaatatgatgttgcgtcgatatggaaacgaatccccgattagagcttgcttttaattttctggaatataccgggaccagtatttttttgaccggtaaggccggtaccggaaaaacgacgtttttgcgggaattgaagcaacgttctcccaaacggatgattgtagttgcccctaccggagtggctgcgatcaatgccgggggagtcaccatccattctttttttcaattgcctttcggaccttatgtcccggggagaaccgaagaaaaccgctcgggtgaaaagcgttttaatgccaagttcggccgggagaaaatcaacatcatccggagcatggacttactcgttatcgacgagatcagtatggtcagggcggatttgctggatgctgtgagcgatatgctctgccgctacagagaccggagcaaaccgttcggcggggtacagttgttgatgatcggtgatttgcagcaattggcacctgtcgtgaaagaagaggaatgggggatattgaagcatatttatccgtctcctttctttttttgcagcaaagcattgcagacggtcgcgtatcagtgtatcgaattgactcacgtataccggcagtcggattcggtattcatccatttactcaataagatccgggataaccaggtggatctggctaccttgaaggccttgaacagcagatatatacccggattcaatccggatgattccgaaggatatattacgctgacaactcataattaccaggctcagcagatcaataaccgcaaactggatgcgcttgaaggaagggcttatacctattcggcggaggtgaaagacgattttcccgaatatgctttcccgacagatcagcatttggtattgaaaaaaggggctcaggttatgtttgtgaagaatgattcgtcggctgagaagcggtattataacggaaaaatcggacggattacagcgatcagtgccgacaatatcctggtgagatgcggggacgaaaaggacgcgattacagtaacccgggaagagtggaccaataccaaatacagtatcgacgctgaaacacaggaaatttcagagactgtcgcaggtagttttaaacaatatcccttgaaaacggcctgggcgattaccattcataagagtcaggggttgactttcgaaaaagctattgtcaatgcgggagctgcctttacgcatgggcaggtgtatgtcgctttgagccggtgtaaaagtctggaagggttggttttgggaacacctttacgtcccgaggctctgatcaacgatcaggtggtgaagcattttacggatgaagtttcccggaatcagcccggaccgatgcagttggaagatgcacgcagggcctattatttacagttgttgaaagaactgttcgattatagtggtgtacttaaacgcctgcaacatgtagcttgggtattcggagaacatttgtggaaattataccccgagttaaccaagcgttgccgggaggtcagggagttgtgtcatagcgaattgacggaggtgggagaaaaatttcagatgcagctggagcgtctgatcgaaggggctgcaaattacgataccgatcggcaggtcggggaaaggatagctaaaggagttgcttacttcagcgaacagaccggccggcatatcgtagctttcttagagagtgcacaacccgaaatcgataataaagacgtacgtaaaacagtcggggaagctttggagaaattgaggttggaagtgggggtgaagatagagactctggaggctgtgaaagaagggtttgaagtgaaggcctatttaatggcgaaagcgaaggctgtattggaaaaaccgaaaccccgggccaggaagaccaccgaaaaactggaggtcggagaagatgttttgcatccgaaattatacaatgccttgcgtttgtggcggaaggaggaagcgatgcgtctgggattgccggcctataccgttttgcagcagaaagctttgctgggggtggccaacacgctgccgacaacagggaaagaattactggctataccggggatcgggaaaaaggtcgcggaacgttatggggctgccttgctggaaatggtggatcattaccggctgaatatttaaagaatagaaatttgatatgtggaaataaattttcacatttgtacttcaatgaattactaaacttataaaagaatagataatggaagatatttatgtgctgggtgtggatatcggagggtcacacattgcttgtcagcttgttaatttgagcgactgtagtttgatcgaaaatacgtatgccgaagttaaagtggctgaaaatcaaagtgccggtattattctggcagcttgggaaaaagcgttgaaagagtgtatgggtaaagcggcaggtaagattatccgtggaattggagtcgctatgccatcacctttcgattttgtgcaggggatcgctatggccgatcacaaattcgcttctctgaaaggactgaatatccgtcaggagttgagccgtgttacaggcatcctgccttcttctattttatttacgaacgatgccgctgctttcggtatgggcgcctggagattgaacggaagccgtgaccgccatttgatcggagtgactttgggtaccggtttcggagcttgttttatcgtagacggttgttatgctacttatggccccggagtgcctatcggaggagaactgtggaattatccgttccgtggggtgatcgctgaggattatgtttctacccgctggttcgaaaagcgttttgccgaattgaccggagaggcgattcacggggtgaaaggaatgatcgatttataccaggccggtaaatataaaacagagaccgagcaggtcttccgcgaattttcgaattctttcggagagatcatggtgccctttatgacccgatttaatgccgatatgctggtgatcggaggaggtatggtactttccgaacagtatttcctgcctttgatcggtcaatatatgaaagccaacgggatcaatgcttctatcatgacggtcgccgatacaacgactgcaattattgcgggagctgctgctttatgtgatttgatataaaagaaattggatcagatatttaggtatcgatttagcgatgggctggaatagaaccggttcattaataaatcgatacaaaataaccgaagaacttttatccggagctttccgtataccgtgtgagtttaattttcaaatattgaattatgaatcacggtatcagtattttgtttcgggtaattcccgttgtgatggcatttatttgtttttttctcggcgggtttatttttttgtatggagacgatggagccaggcaggttgccggacctgttgttttttttctgggagctatttgtctggctttgtttgcgactgctgcaactattatccggcaattgatccataaattccatacggttttaaaatatattattcccggtttcggatatgttgtagctttcttaacaatagcatcggggatttggattttcggttttgctgaaaattccaatttcattgtttcaggccatgtcgtggccggagtcggtttgatcacagcttgcgtttctacagcagcaacttcttctacaaaattttatttaataccggccaattcggctaatgcggcgaatgaagtcaataaagaaggtttttctgcaatgacacagaatgtactgatcggtttgactttattgttttccttgaccgcctgggtttgggcgatcgtgttgttatcccggatcggtgaaggggcttattttttggtagccggtactgtgatgggaggattggcttgtatttgtaccagcctgattgctttggtggccagtatcgccaaacagatccggaatacttatggagaaagtgaccgtaaaaattggccgaaattggttttggtgatgggaacggtggcttttatctggggattggtcgttattcttgctatggccgggaatgtggccaataccaccggtttcatcatgatgggcttgggattggtttgtttcagcatctccagtaaagtaattttgttggccaaagtgtggaaacagagttttgctttagccaaccggattccgttgattccggtactgactgctttgttgtgtttgtttttagctgcctttctgtttgaggaaggggtgtatgacaatgcattttttgttccggcccgggtattggtcgggttaggagcgatctgtttttgtttattctctattgtgagtatcctggagagcggcacctctaaaaaatgagagtggatgcaggagaatgaaagatttaatccgtatctttgtaaaaagatacggattttttatggagaataaacctttagcagagcgattgaggcctaagacgctggacgattatatcggtcagcaacatttggtaggaaaagggaaagtgttgcgtaagatgatcgaatccggggtggtctcttcttttattttgtggggacctccgggagtcggtaaaacgaccttggccatgatcgtcgccgaacagctgaaacgtccgttttatgtcctgagtgccgttagttcgggagtaaaagatgtgcgtgaagtgatacaaaaagcggaaagccagcgttttttcaatacgcctaatccgatactttttatcgatgaaatccaccggttttccaaggcacagcaagattctttattggccgcagtcgaaaagggaaccgttaccctgatcggggcgacgaccgagaatccttcgttcgaggtgatctcgcctttattgtcccgttgtcaggtatatgtcctgaaatctcaggagaaagccgatctggaaggcttgatagaccgtgcggttacgacagatttttatctgaaagaaaaaaatatcgtcgttaaggagaaagaagccctgatttcctttagtggcggggatgcccgtaagttgttgaatatccttgagctggtggtgaatgcccagccgggaccggaaatcctcatcgataacgatacggtacgcaaagaattacaggaaaatccgttgatgtacgataaagacggggaacagcactacgatattatttctgccatgatcaagtcgatccggggaagtgatccgaatgcggctttgtattatatggcccggatgctggaagggggagaagatcctaagtttatcgcccggcgtttgctgatttccgcttctgaagatatcggattggccaatccgaatgcgatgttgctggccaatacctgtttcgatattgtccataaaatcggtatgcccgaagccaggattcccttatcggaatgtgtgatttatttagccacctctcctaaaagtaattcggcttatatggcgatcaatgaagcgatggcgacggtgagacaaaccggaaacctacccgttcctttgtatttgcggaatgctccgaccaaattgatgaaagaactgaactatgggaaagattacaaatatgctcatgattatccgggtaattttgtagaaatggagtttatgccgcaggaactgaaacagcaggtattttataaacctcagcaaaatgccgctgaactgaaactattggaacgactgaaagcctggtggaagaagaaatattaacctgaaatgggtgtgtggccctaaaatcctatatatatgaaaatattgaatgaaatgactggacaagagatgttttttttattagccggtccttgtgtcatcgagggcgaagaaatggcactcaagattgcggaacatgtttccgagctcaccgataaatgggggattccttatgttttcaaaggatcttttaaaaaggccaaccgttcccgtttggattcttttacaggaatcggggatgaaaaggctttaaaaatattggcgaagatccggaaagattttcaaataccggtggtgacggatattcatagtcctgaagatgccgttatggctgcagaatatgtcgatatcctccagatcccggcatttctctgccggcaaaccgatttactggtagcggcagcgaaaacaggccggatggtgaatattaagaaaggacagtttttatctcccgatgctatgcgttttgctgtcgataaggtgcgtgaatccggaaatgaaaatgtgatggtgaccgagcgggggacgactttcggataccaggatttagtggtcgactatagaggaatcaagatcatgcagcaagaatgtcaatgtcctgtcgttgtcgatgttactcattctttgcagcaacccaaccagagttgcggggtgaccggcggacaacctcagttgatcgagaccatcgctaaagccggaatagctgtcggagccgacggcatctttatcgaaactcatcctgatccgaaaaatgcgaaatcggacggtgcgaatatgctgcgtctggatttgctcgaaggattgctggagaaattggttcggatccggaaagcgttatgaacgtatttgggaaaataatttcaggctcgatcgcatttttaggaaccgatccgagcctgaaaagtaattcgtataaaattttgttatttatcgtgtttcttgctatacaccaatattttatcgatacgggctccgtccatgtcgacaatctcgaattccagctcgtgccaggagattttctcgccggtatgggggatgtgttccagtagatgcaggatcaggccgctgatggtgttatagtcgtattcgggatacaggcattccatatcgatgtattccaaaaattcgtagaacgagcattggccgtcgaccaatagcgaaccgtcgtcgcggcggatgatttcaggttcgtcgtggctttcggtgatttctcccagcaacacgtctacgatatcttttaaagtaacgattccctggatactaccgaattcgtcggttaccaatccgtatttgatgtgatcggatttcagatgtcccagcgtattgtacacgctttggttttccgggaaaaactgagccggacgtaaaatatcggccagcttgaaatccggttcgtccaaatggctgaaaaggtctttcaggtacaccactccttcgatgtggtccagttcatcgtgggctaccggatacacggtatacacgttctccttcactttattccggatcgattcggcggattcgccgatttccagccaaatgaggtcactgcgatgggtcatgatagaaccgattttacggtcgcccaggttgaaaactttttctacaatgtcttgttctacttcctggatttcaccgtcttcagtaccttcctgaatgattgctttaatttcttcttcggtcactttattttctgtagaggtatgaagaccggtgagccggataactgcttgggtgctggctgaaagcaaccagacgaaaggagaggcgattttggacagcacttccatgggccgggcgatcaaccgggcgattttttccggtgcattcatgcccaggtgtttcggtaccaattctcccaatattaaagtcagataggtgactaatataacgatgattcctttcgctaaagtgaggctatgggcctgggggataccgatcgtttccagccaacgggccagatccccggctaaagcttctcccgaatataaaccggtcagaataccgatcagggtgatcccgatttgtatcgtggataaaaaacgatccggctcattggccagacgcagggcggtttttgcagttttacttccttttttagctgctgtttctaaacgacttttacgggcagataccatggcaatttccgacatggataaaatgccgttaaaaaaaattaatcctaaaataataacgatttccataaataatgtcttattctgtttcaaatataacggtatttcatcaactatctgttttattgacttatttttagagttttttgaaggttattatgaagttttttccaaaaggaaaagatgggatgaagcggaaaaacagaaacaatataccggtgttgatttgtctgtaaagaaagatcggatcgacagagtgaaagaacagatattgcaaactttgagagagcgtaggggcctaaaagtggatttgaaagcgacagaatagaaaccgatgacaatttaaaaatattatgccagtgatatacatatttacatttataaacgtagaattattttttctttctattccgattccggattttatgtcctcagaccggttcgcctggactggtccgctaaggtttcccttcactgaccggcggaactcctcacttcgttcgtcaaacaccaccggtcgggcgttcggaaaacctaaccggactctcgttcactgctccaatggtcttcagacataaaaccctgcatctatcgttagcactaccgggcaaagaaaatataaggaagtttttacaattaaattccggggcagcctatcggagtgggaatatctgactcctttataggaataaacttttacaaaatattgatttatagatagtattctggtttaaggtttgaaaagctctgttatttgaactttatggttttcaggtcctgattagtttaccatgaagtgataacgtcagtcgaaggtgttcgtgttcggggaccattggaactctggcgagtgtcgtcttgctttttctgaacgaacgaccggtggtgtctgacgaacgaagtgaggagttccgccggtcagtgaaagaaagggctagacgaccgacagaagcgaccgggttcccaaacacgaacaccgcagacgaataggtaacagaataatcctacatttagagtaaacatgtattaaatgccaatattatatatctaattttacgactgtaattccggcgcctcccagttgtatttgttcatctccgaaggaagcgacgagcgggttggtgctgagatattgacggatcagttgccgcaaagctcctgtcccggtgccgtgtagtagccttacttctttgtaattgagcataacggcttcgtcgaggaaggtgatcactttttgcaaggcttcttctccgcgcattccccggagatcgatatcgggtttgaaatcgaaacgtttttggctgatattttcccggatattggcatacgaggcttggggctgggtacgggccactttcttggcctgactggccgatgctcttttcagttgggaaagtttagccgtcgttctcagattccctaaagcgataaccgcagttttgtcgttgatttcaagaatttctccgatggctttgttgggcagactgacaaaatcccctttctgtaaagggagttcggttgtggtgccctcggaagccggagttgaagcggaggctttatttttggtctttttatttttttcccggttttgcagtttttccatttttttccgaatccgttcttcttcagcgctggcttgttcggagagtaaccgttctttttcggcctccattttttgccggatttctttggtcttttctttttctgcttgattttcgcggatatcccggatagtctgttcgatggttttattggccgaatggatgatttcctgagctttttgttgggcttctttgatgatttctttgcgtaaacgggaagcttcggtcaattcctgacgatatttttcgactacttcatcgagtcgtttctcattttcgtgaatgcgtctgcgtttctcctcccaatagcgtttgtcccgggcgatgtctttcagatgtttgtcataattgatatgatcttcaccgattttcgaggcggcatcttccagtatttctttaggaaggccgatctttttggcaatttcgaaggcaaaagaagaacccggttttccgatgcataattcgaataaaggcaacatccggtgactgtcgtaaagcatggctccattttcaataccggtagtttccgctgcaaaatgtttcaggttggtgtagtgggtcgtgattacccctttcacctgtttttgattgagggttttcaggattgcttcggctatagcccctcccagcatgggttctgtaccggtgccgaattcatcgatcaggatcagggtattttcatctccgtagcggagaaagtttttcatgttgatgaggtgtgagctataggtactcagatcgttttcaatggattgctcgtcacccatgtcgatgagtatttttttgaaaataccgaaccggcttgcttcactgaccggtaccggcaggccacattgaaacatatattgcaataaaccggcggtttgcaggcatacggattttccacctgcattgggacccgatatcaggataatccgttgggtttcatcaatctctatttttagcgggacgatatttttatcgctatttttcaggctgagccataaaagaggatgccgggcgctgtaccagaacatttccggacgttcgctgaaagccggtacggttgcttcgatatagagtgaaaaagctgctttagcccggacaaaatcgatgtaagccagaaaatcgtaggccggaatcaaatcatcgacgtagggacgcaggtcttcggcaaaccgacggaggatccgggtgatctcccgtttctcttccaattccagttcccggatttcattgttggtttcgacgatctcggccggttcgatataagaggttttacccgtagccgattcgtcgtggacgataccgtttatttttcgtttataggcagaaggcacggggatgaccatacgaccgtcccggatagcgatggaagtgtctttttctgcccacccttctgtctgagcctgttgtaataaagcctgcatacgccgggagataccgttttgttttcgttgaagccgatggcggatatctcccaattcaggggaagccgtgtcttttatgctcccatggcgggatacgatggaatcgaggcgttgcagaatataaggaaataattggatatctccggcctgggccgttaaacgcggataccgttcgtctttgccgtggaaaaaacggactatagccgtcagggattccagcgattgcttgagagcgaccatttcggccacttccagaaataagccttccacccgtactttgttcaaaaagggacgggcgtcgctgaaatgatcgccgggaaattggtcttcttcttccagaatagacataaattcctgcgtctcttccaggcgttcccggatttctgtcggttcagtagaaaatttcatcgcttctaccaaatctctgcccatatcgctcagacagtttttttgaacgaattgcctgatcttatcaaacttaatcttgctttcgaaattttccggataaaccattttgtgcattttattctttatttgacgtttccgcttattgtcaaggtgttttccggttgagagggatcgttggtgatgactgtgatcgatttatactgacgtccggatttgccggtagagtcgaaagtggcccggatggttgtcgattggccgggctgaatttctttttgtcccagggtgacggcagtacacccacagctggctttcgttttccggatgaacaggatacttttccctgcattcgttaaagtaaaatcacaactggttttttctccctgtttgatttctccgaaattacattcttttttatcgaattgtgctatcggcgcattggctttgtcttttttgctcagtttactgaaatcttcactaagttccgcggtaacggataaacggttgctatattctttagaaccgttgacggacaagataaggctttcgtaaacataaccgtagtcattggctttgggagcatcgaaagtgacgataatctttccttttttgcccggagctacttgtgcgggttcgaaagtggcctgcaaatggttggatttataaatgactcctaagctgacagcgtctttgagggtattgtaatattccagcgtatctgtagcgacttgccaggtatatactttcttgaagttgatattgttgtttttgaatttcaaaccattcatattatatttatacaataattccggtttggaaggattatcgaccagatttcctgtcagaatcaattctttacgtgctggatttacattggaataaaccagaatccgcatgttgaaattttccagtaattgcatcggaataaacgtgatttttatatcacaacttttaccggggagaagcggacttttgggccaatcggctttcagtaaactggtcatgggagtgacgcgggtaatgatgaccggttgagtacctgtgttttgagccgtataaaccactgtcatcggctgatcgtctgccagaaggttttttaaagtttgccggggttgctttatttcaagaactccctgggcaaatacggtaaacgtgaataataaagcggatataagtgaaataaaatatttcatgactttggatttttagtattcttatttcagattaccgatcaatttataagtcataatcggattgtgaggatcgttggtcgtgaactggatgattttaattaattttttggcatttccggtttttacactcagattaactttgattttttttcctggtttgaccgtatctctggaagctgtgaccgaaagattggaatctgaagtttttattttacgaatgaccagttccgattttccgatgttttgaatggtgaattcatgggtgtaggtactgtttttatccagatcgttcagggtgtattccgtttccgataaagaaattgcaggagccttttcaaaatcaccgttatagtgggagaaatcttcgctgatcgttgctgcaacggtaatgtctccggttgttttatcgtttacctgcagttgaattttatcggtaacaaatccccagtcgttcttcttggtggcatcgtatttgatcgaaatcgtggctttttgatctttagtcagggtcgtaggactgacacttaccgtcagatggggatgttcactgattacctgaagtcgggcgggtttattttcactattgatcacctctatcttccgttccagtacctggttgttattgatcgcccccagattgatcgtgttgctcgttaattttaatgcccctatattgaatttatactgatcgtacggacctaacggtttccgggtgacattaccccgtatcgttaacgatacgaccgaattggaagcattggaattgactgtaatgcttttaacgaaagcacccggacggttgcgtggatcgaaagccactttgatgctgcctgtttgaccgggagctaccggttctctgctccataccggtgttgtacaaccacatccggcccgtacgttggtcaggatcaaaggaacatttcctgtgtttttaaatgaaaaatcaaaagtcgctttaccggcattttcattgatcgtaccgaaattgtgagaggttgttgtaaaatcgattttagctttctgagcaaaaaccaaaacaggcattagggccaccaacaaaaaaataaatcttttcatccgtcgtaattttatatcatcttctaaatttcatacacaaataaatagggaagattttccctataggctataaaaacctacaaatgtaaaaataattttcaagttgtaccaaccccgttttgagaattcctttctatgatctaaatacctatatttttattacgaattactgtcgcatttctttgtaattccgggaataaagcctatctttgcggcgttttaacgatattaatcatttaaagaattaaaaaccatgtatttatcagcagaaaaaaaagaagaacttttttctcaatacgggaagtctaataaagatacgggttctgcggaatctcagatagctttattttcctaccgtatcaatcatttgaccgagcatctgaaagccaatcacaaagatttcggtactcagaaagcattgatcaaattagttggaaaacgccgggcattgcttgactatttgaaagaccgcgacattgaaagatatcgtgctatcattaaagctttgaatatacgtaaataaaaatacgttttcccaagcccggcgacaaccgggcttgtttctatcctccctcctccctcctccctccgaaaaagaattccgttaaaacattttatttttaaccgttaagttattatgaacgttattgaaaagaacattactctggctgacggaagagtaattacgctggaaaccggcaaattggcaaaacaggcagatggtgctgtgatgctgaaaatgggcaatacgatgttgctcgcgactgtggtttctgctcaggatgcaggtcctgatgtagattttatgcccttgtctgtagattataaagaaaaattcgcctctgtcggacgtttcccgggaggttttacacggagagaaggaaaatcttcggattacgaaatattggtatcccgtttagtcgaccgggcattgcgtcctctgttcccggacgattatcatgcagagacttttgtacaggtgaccctgtattcggccgatgaagaatcgatgccggatgcattggccggactcgctgcatcggcagctttggctgtcagcgatatccctttccatggtccgatctccgaggtacgggttgcccgtatccagggagaatttgtgatcaatccgacggcttccgctctgaaagaggccgatctggatatcatggtcggagctacctatgaaaatattatgatggtagaaggcgagatgaacgaagtttctgaaaaagaaatgctggacgccatcaagtttgcacatgcagctattaaagaacagtgtgtagctcagcaagaactggctgctgctgtcggaaaagaaaaacggacgtattgtcacgaagtgaacgatgaggaactgcgtaaggatatttgggacaagtgttaccaaaaagcctatgatgtggcacggcagtgtaatgcaaacaaacacctgcgtggcgaattgttggacaatgtacgggccgaatacctggcttctctgcctgaagaagagcagatcgaaaaagccatgttggtgggacgttattaccacgatgtggaaaaagaagcgatgcgccggatgattttggacgaaggggtacgtctggatggacgtactaccgaacagatccggccgatctggtgtgaagtaggttatctgcccggacctcacggatcttcgatctttacccgcggtgagacacagtctttgtcgtctgttaccctgggaacgaaactggatgagaaaattatcgatgaggctactattcagggaaaagaaagatttttattgcactataatttcccgccgttctcaaccggagaggctaaagcttcacggggagtaggacgtcgtgagatcggtcacgggaacctggctttacgggcattgaaacggatgattccggaagatttcccttatacggtccgcgtggtatccgatattctggaatccaacggttcgtcttccatggctaccgtatgtgccggaacgctggctttgatggatgccggtgtaccgatgaaaaaaccggtgacaggtatcgctatgggattgattaccgataaagggtgtgctaaatatgctgtattgtccgatatcctgggcgacgaggatcacctgggcgatatggacttcaaagtaacaggaacccgtgacggtattaccgctacccagatggatatcaaggtagacggactttcttatgaaattatggaacaggctttggaacaagcgaaacgaggacggatgcatatcatggatatcatcaccgaaaccatgccggctccgcgtgaagacctgaaaccgcacgctccccgtattgttaccgttactatcgacaaagatcagatcggtgcgctgattggtcccggaggaaagattatccaggatattcaggaaaaatcaggtgctaccatcaatattgaagaagttggtaataaaggtattgtcgacgtttcggctaccaataaggaatcgatcgataaggcgctggcacggattcgggctatcgtcgctaaaccggaagttggtgaggtgtacgacggtattgtaaaatcgattatgcctttcggtgcttttattgaaatcctgccgggaaaagacggtttgttgcatgtctctgaaattgattacaaacggatcgagaaagtagaggatgtattgaaagaaggcgatcatattcaggtgaaattactggaagtggatcctaaaaccggaaaattacgtttgtcacacaaggcattgctgccgaaaccggaaggttatcaggaaagatcagagcgtccgcgtggtgatagaaatgaccggggtgaaagacgggaacgtccggaaagacacgatcgtggcgaaagacgtgaacgtcccgaacgtcgtgaatcacggcctgaaagaacagaagacaatcaggaaaccggtagtgaggaataatggatacgaagtgatttatcgcccggaaccagtctcggttccgggtttttttatcggtgtttgccgcggaggtattgctccagttcttcgatttccggcaaagtgagcgggttgtaattcatgccgctatggatcatgatttcacaggccatttccagaaattcagctttttcaatcgtacttttcaaatcttttccggcgtatacttgtccgtgtttttccagaagtgcagcatcgtgattgagcagggcttcgctgacagccttcgctaattcggccgaaccgggacgatagtaggggacgatggctatttctctcccgcaataacaggggatttctatactgacattgaaattatcgggtttctttttcatgcaggcaatcgtcgtggcataaatactttggcaatgcaatacgacatttacatcagagcggttttgcaggatttgtaaatgaaagccgctttccatagaagggtggataccgtttgtaatttcaccggtcgcgacccggcaaatggagatttggccggcttgcagttcgggaagccaggagcctgttgccgagatcagggcgaattcgccgatacgccaggatagattaccactgctgcaacgggtcaaccgccgttcgccggtttgatgtgcagctgccaggaattgttcaatgtgtttatctgtaatttccataaatccggttactgaaaaggtttatttatcgatgggctaagttaagcaatatgtctgaattcggtggttgtttttcagagaataactcattcctgaatgaacgctgtaacaaaacaaaaataaatggaattactacgatcgggtttgcccagttattattatatttgtaagctacaaacagagtatgatatggagaatagacttacagtgggatttactcatggagatgtcaatggtattggctatgagttgatcattaaaatgatggcagaaaaccggatctgcgaagtatgtaccccggtattgttcggatcctcgaaggtggctgcttatcatcggaaagctttaaatatagaaaatttcagtttgaatagtattcagaatgcccgtgatgcgaatccgaaaaggtgtaatatcgtcaattgtgtcgacgatgcgatcaaagtggatttgggccaggagacgccggaatcggacgatgcggcggtgctggcattgaaggctgctctgactgctttggaccggaatgagatcgatgtcctggtaggagctcctcaagggtgcaattcctttaagcccgcagcgagttgtccggtattttttagcgaaagatatgaaacccgtaatgtcatgccgctgttggtgggtgaaaagatgaagatgggattcgttaccaatcatctgccgttccgggatattgccggaaatattacggtcaacaatatttactataaactgaagttgctggatgcttgtctgaagaaagattttaccatccggaagccccggattgccgtattgggactcaatccccattccggcgagaactgtatgtatggggaagaagagaggaatgtgattattccggcgatcgaacgagcccgggataatgggatcatggctttgggaccttatgcgccggacggattgttcagtggtgtagaatttgaaaaattcgatgttattctggccatgtatcacgaccaggggatgattcctttcaaaacgatagagggtaatgaaggagcggtgttattggcaggattacctattgtatatacctctacggtgcatggtatggcgtatgatattaccggacagggtatagcggatgaatcgggtatgcgtaatgcactttatctggctatcgatgtgtataataaccggcagatgaatgccgagttagcccagaatcccctgagacattacgacatcgcttccaatagtaacgaaagcgatttgaatgtcgagcagattgccggaattgaaaaagagatggaataatacactcccaagttttgacgctgattagcgaggattctgtaaatacctaaataaagtaagatggcatatgaaaatgatcggttgtaatcatttcatatgccatttatttaccgagtgtccctacatagctagttatgaaaatgattatattatctggtgtataagtattttaaaattttttgtattgacataaaataggaaagctaaatctgttattttgcctaaagagtttattttttgataccagtcataaaaatttagtttacaagcagtacaccctattgaatctacatagaccaatattttaatcggttttaacaataaataattgcaatttgtatcccgtcctactatttttgcttgaatatcgtcagggaaaatgatttttttgttggtccattcttgaatgattgtttgtatgtatgcttggtcggtgtttttgcaattgaataataagatagttagacatataaaaaggacatacttcatggttttatttctttatatgtaaaatttgtagatgtagattataatcgttttcctcagcgctcatttccactgcaagtgtatatggatcgatataatgttcagatacttcattcttgtcgtcaggtaacagatcattgacaagatcttccgttacccggtaagtggaatccgctttattgtatagcacctggtaaaactctttcgtcgagccataaaaaagtagtatatacttttcaaaatcgtagcatgtagccaacataaaataatcctgtactcctttatcttcatttcttttcagagctctcggcattgcgggaatcaaattgaaccggtatttcagataggcggaatcgggagtaataaaaaagagcctgttatcatacctgtcgtaataagaaataccttcgtcattataattgaaataatgcggataaagggcttcgtatacgttatc

SEQ ID NO: 5934 - DNA, 2864 bp, Unknown
  gut microbiota DNA sequence
aaacgcccaaataaaatttccggtagtacgctccaatttattgattatcaatacatgattcatatcatcaatcttcggctaatacagcatatcctcttttaaatacaatatttcattttataatcttccccaactcaaaacatttccttatttttggttaaaattatttagcaaagaaaattaaaataaatattagaacatgatggtaattccaatccattccggagatgaaaggaaaagttacaatttcatgatgcgaaagggttggtgtgatatcattaccggaaaacctgacaaaaaggttagtccggagttgtttaaacgataactaatttattttcaaatccatggacgaattaatttatagcgtaaaggaagtattctccgacttcctgcgtaaagaactgaccggatattacaacatcccggaataccaaagaggatataaatggaacgaagccaatatagtggctttattaaacgatattgagaaattccggcaggaaaccggaaacgctgaagctacattttattgcctgcaaaacattaccctggtaaaaaatacaaacgcaaactgtttccatgtcgtagacgggcaacaacgcctgaccacattactgatcctgctctcttttctacaacatgaaaccgacagcactccccttctcctggaaaataagctacaatattctatccggccggagacacacgaattcataacaaaacaggttctcactggccacatctgggaaaaggagacggtccccgaacggaaagaccaatattatatcagggaagttgcccggagcatccaggcatggtttaaagaaaacaccgcaacagacaaaggtaaatttctggaaatcctgctatcccgggtcaaactaattgtcaatgtcgtcgacgacaaagaggagaaaatattttccagcctgaatggcggaaaagttaacctggacggtgccgatctgttaagggcaatcctgatgacccgggcagccaaagaaaaataccacggcacctccgccaccagcgaagtccgtgaattccgcatacgcatgggcatggaactcgacctgatgaacctttggttcggaaaaacagcagattatttcaagcaattcatctcagaccaaaccatcgggatggcacgcatcaaccgctttgattttaccacattgcccataaacctgctctacctgctctattacgaataccggagaaacgaaaaggaatcgctgaatttcagcttctttgaatatggcaaaaactcgaacggcaacccggatgacgaccgctgggaaatgtacctcgaactacaggaaatgtatgccatcctgcaacgctggtataatgacaaagaactgtaccattacctgggcttcctgttcttcaatttcaaagcacagactccattccgcgacatttacacccaatggaaagcattgaattcaagagataaattcctgaaagacatacaacatacgatagccaccagaatgctggacaggtatctggaggaaacagaaaaagcagctccggactaccagaaatgcctgaagacaatgacagaagcaatttctgacttcagggagaactggtacaacaatgacaaggaattataccaaatcctgatcctgctggatattttccggatattggattccaagtccataaaaaaattaccgacagactattttacccgtaaatccgggcagaaagacggggaagacaaagagcatatcctttcccaaaccccacgcaaggataacggggaaattgccacgatcaaaacagactgggaaaaatttgtccagtccgaagatttcaaggatatccggtcccagatgcaggaaatcctgaatcattccgatgcagaattgaccgaacaggaactcacccagctgcaaaacctcctgaattctgccggcctgaattccatcggcaatatggttttactggacctcaggatcaaccggagctacgggaatgccgattatgcccacaaacggactataattttccaggaatatatgaaccagaaatatgtacgtccccataccctcgccgtatttatgaaaggagatatcgatgccagggaagccaccggcatcccgctaaaccggtggacactggaagatattaaacggaatacggataaaatcgccaaagaaataggaaagaatttcaatgcatggttaactcaaaacaattaagatcatgaaaatggaagccttaagtgtcagggatattttaagcacacaagacatcgtcatccccgaaatccaacgtgaatatgtctggggtaacaacaaacaattgctggaacaattcatccgggatatcacaacggccggaacggatataaacgtcggtttcctgtattcctatatgccggaacaggcatcacattccacctgttttctgatcgatggacagcaacggtttaccactttagtactgatcctctattatttatctataaaagaaaagaggcaagctgattttaacggcctgctgaaatgttccggaacgcacatgagcttttcctaccgggtcaggtcgaccacagacaatttcctccggaaattgttttccgataacacatggtttacaggaacaggcatcgaaaaacaaataaaaaacaaaggatggtataccaccatctacgacaacgatccttccatccaaaccatcctaaaatccctccaaatcatcgatgaaaaactgagagagaattccgggcctttatatgatacgatagccgggaaggtccggttctggtactttaacgtaaaggacacctcccagggggaagaactctacatcaccatgaacagccggggagaaatattacaacccta

SEQ ID NO: 5935 - DNA, 2545 bp, Unknown
  gut microbiota DNA sequence
aataatacctgtggttctatgtcggatcaggataaagcggggatcggggccggaatttacgggcacgaagcacaggatgcccagctgtatttcggggactggggttttgattttattaaaatcgattattgcgggggcagttatctggggttgaacgaaagagaccggtataccgatatccgtcagcatatcgatatcgtaaaccggcaggtcgcccttaacatttgccgttgggcttatccgggtacctgggcgaaagaagtggccggttcctggcggattagcggtgatatccaggccagatgggaatcgataaaatatgtcgtcgggaaaaatctttatctgtcggcttatgcaggagacggacattataacgatatggacatgatggtggtcggattccgggaagccagcccggtagggggagaaggattgacccaaaccgaagaagaggctcatttcggtttatggtgtatcatgagttcgcctttgctgatcggatgtaatctggagaaaatgtcggatgccactttagagctattgaaaaataaggaacttttagccctgaatcaggatccgctgggtttgcaagcttatgtcgttcagcacgaaaatgaaggttatgtgttggtaaaagatatcgaacaaaaacgggggaaggtgcgtgctgtagcgctttacaatccttctgagcagccttgttctttcaccgtacctttgacagatctcgagttcgagggtacagtaaaggtgagggatttggtgaaacaccgcgatttgggtaaagtggacggggcgttgaaacaggaagttccggcccatggggcgatgattttacggatcgaagggaaaaaacggatcgaaccgacagtgtacgaagccgaatgggcttacctgcctttattcgatgatttgggtaaaaatccgaatgcagtcagatatactccgcaagaaggtacttccgggaaaatgatcgtcgggtatttggggggacaaccggaaaattatgcagaatggaaagagatatatagcgaaaaaggaggacaataccggatgaccgttcaatatacacagggtgccgggcggcagctggaactgacggtcaatggggaaaaacaggtgttgaaacaactgggggacgataacgggctgcggactgtgactgttccggtgactctgaaacccggatacaatacggtccggatggggaacagttataattgggctccggatatcgactgttttactttgtcgaagtgatcgccttcatgattttttagacttcaaagttttgtatgatatgaaggacttcaaagttttgtttgttctgttcgttttattctgttcacaaggagtatgggctcagaagtgggaggctccgaattggaagaatttctcttatcctgtcattgattttaaagataaggcggccggaacgaagggggctcagatttatagacggatcgtacccgaaccggaagctttcatccaacaacatgctttatgggtagctcagacgctttattggtcggcgacggattctatgccgggagtagagaaaatcgaatacaacctggaggataccgacggtattccggctaaagggggacaaccgccggtggtcaatattttctatagttcccggtgggtggaaaaatcggaggatagccagggagacgataaggtgctctatgaaacccggggagtgctttatcacgagctgactcatgcttaccaattggaacctcaggggatcggcggttataaacccggaaccgaattctgggtatttatcgaaggaatggccgatgcagtccgttatcataatggctttttcccggtggatagccgtaaaccgggcggacactggatggatgggtaccggacgaccggttttttcctggagtggttgaccggcaaagatccggatttcctgagaaaattcaataaatcggctttagagatcgttccctggagcttcgataaagccatgaaacatattttcggcgagcaagtgacgacagatagcttgtgggaagaataccaggctttcctgaaaaaataaaatagctcacgggggacggggtgttggtttatcccctgtctcctgtgttacgctagattgttaccgattgggcagcccggatcggataggttgtcattgttattatttttcctcttcatgaagaggaaaaaccttccggggagtccctctccatgaattttttagctaggatgattttgttttaattcaatttgcgtgctccgtcactgatggttaccggatatactttcggttctttaccgaattttgtcttaaaacgactgatcgctgtttcgatgaatcggtcgtaataagcgtcttttaccaggttaatcgtacatccgccgaaaccacctcccatgatccgtgaaccggttaccccacattctttggcgacatcgttcaggaaatccaattcttcggtactgacttcataaagtttgctcatgccatgatgggtagcgtatatgttttttcctacggtttcgtaatcacctcgtt

SEQ ID NO: 5936 - DNA, 396 bp, Unknown
  gut microbiota DNA sequence
atattcagtaaatgtccctataaaatacaatggcatatgaagatgccccagtataatcacttcatatgtcatttttattgtcatttttctgtattttcccatatactcttataggcaggacatgacgttccggaagaagtctgacgacctcttctgattttttcgttaaaatcatatcatgctgctttcagcgctctgttcctgaccttatctatcatcagtatggcatttgccgtatgtattccaaagaaaatccaaaggatttccgtcttcctgttccgtgcctttatccttgagagtgagtaatgttgcttttgagtgccgaagctgccttcaagcctggtggccctttctttggagagttcacttctgagaacctttctcaaggattcatcc

SEQ ID NO: 5937 - DNA, 2403 bp, Unknown
  gut microbiota DNA sequence
aattgatcattataacgcataagttcatcgtaatctttaatcttcggttccaattcaaaggcgatatctatatcccccaaatccatttgttccggattcagataactaccgaacaataccagtttgctcacccgatatggataaaaatcatcccggtttacttcttctacccgtttcagaaattcttgcatgatccgatctgctttttcacggttaatgggagccatacaacgggctatgcttaaagcatttcctttcaatgtcaaacgatacatgccgttgtctgctggttcgatatatcccttagacagcaattcaccaactaaaccttccgtctctttttcattcaaattgaaacgttctgccaagccatcccttgtcatcaaaccggaatataaaagccgaaaataatccctgattttcaaaaccggaattcctgctaacagttcatttttcgcaattctcataaccccttgaatttataaaaaattacatttattgaaatctctctcccaataaccctccttaatcaccatttataaactaaaatttattaagtcgacaccccacagtcgtttttttatgatcaccgatggatcggtagtacccggagatttttctaaaaggtcatggcgtttatataccattgtacccggaaacctacggtttctgattagtacttcgctgatcggcacatctccgatgctacttggcggaacttcgttcctgataaaaatgccactccagcaccaaaggttcgccaatcagaaatccgaaggatttcacctatccggagtctgcaaggtgacactgatcaggagcgaaataacgctaatccagataaatctacattttgattataagactatttgtttaatgaaatcagccaataatcctttatatttgaagtactaagataacaaaaataaacgagattaccaattttctatttctctcttcagaatgctataaacgttcaaatccacatattgcccgtcagccatcaattccccttcgcgctcaacgccttcaagggtaaaacccaggcggcgggggatggcattgctaggtgcatttccggctgcacaacggatacgaatactgttcattccccgttcgctgaccgcccattcacagagatggcggacacaacgggtcattataccacggccctgatattcggggatcaaccaataaccgatctcggtgcgatgattaatattatcggtgatgacaaaccccaccagtccgcacaattcgtggccctggccgataacaaagacgatgttccgatcagcatagggaagagccagctgttcatttaaaaacgcttcttcgtcagccacctccttcaatccatcgacaaaaggaagccacgtacgcaaatatacccgattatcgtatatcgtctgccagatgatagcggcatcggccaaagtagcttcacggataaaaaaatccggtcctatctgtgcagaatagcctgtttcttccctattcaaggctgacggacatgaagattgttttttcatataaattcaatagtcaggattaacccaacaaagatatagattaatttcagattcagcctaaccggtttcccgagtatttaatcccctctcatcttgcctctgttgatttcacgtatcatccggcaggaacaagactattggcctgaatattttcggcaacgacacttccggccccgataacaccaccttcaccgatagtgactcccggcaggataattgcacctcctccgatccagccaccatcctctatcgtcaccggcaaggcaaaagtatgacggatatattcgctaccttccggtatcccgacaggagtcaggcgttcgtccaagccgacaggatacctagccgtataaatccgtacgtcggaagcgatgagcccccgcttcccgagtgcgatccggttaaaaccgacaaaggtacaaccagtgtttaccaccacccgatcacctatatgaatattacaaccataacctcaactaaaagcatgcccgaccgctcccccctgtaccgatacttccgaacatcccgcacaacaaaacttgtttttcctctttcccttcataaggtaagaaattatacttcatcaataaacaatgtgtttttcttttcagctcaggaaaaacgggaacatgacaatcataccactcaccggccagacatttttccagttctgttttcataagccaaactatccggtttacagtacagtcactatctcattcaccggtttcctgatagaaacacatgccgggaagcgtttacataccccagggagatgatcacgacaggctcctgccatccggtaactacaatcgagatttcacccgtccggatcgaaattataaccccatcaactccctaatccctgtac

SEQ ID NO: 5938 - DNA, 33520 bp, Unknown
  gut microbiota DNA sequence
aggaatggataacgaaatttaaaagcatccgctcgaatttttcaaccaaagattggagattgaattttgattatctggttagtcgtgaaaatgaatataaatggaaattaggtatgacagctttatatcatcaacttgctgatatatactacttgcctggaagtaagcaggatattgataatttctatgtaaatatccatgctaaaagaaattttgatttaggtaaaaagaataaacttttggtgggtttagatctcggattaaatgaaaatttggattcagagatttcatataccgggccggatcaggattccagaattattcaggattttctgtatagagactatgcttatttaagttctgaatattgggaaggaggattgtctttcatttattctaatggtagtcttatgaaagaaaaagcgaatcttttcgtttctgccgtattgaattataaagatgttattaaggatagtccttggtttgggcagagagttgtctgttcgtttagtgtcggattgaatttttaatatcagcatgtgggaatcagggcatttttatggatcgtatgtatttattttctggcaatagcctgtaaggaagagaaagaattttctcttccttatgagaaatatgtgttggaaaatgggttggaggtggtattacatgaggataagtcggatccgatcgtatcggtggctattcagtatcatgtgggatcggcaaaagaaaagccaggaaagacgggctttgcacatttttttgaacatatgttgtttcagcgttcggaacatctcggcagaaatgcttttttcaaaaaaattcaggaactgggcggaacatgcaatggaagtactgctatggatggaaccaattattatgaaacggttccccgggatgcccttgaaaaagtgttgtggatggagtcggaccggatgggtttttttatcaatacggtcactcaggccggcttggaaagggagatcgatgtagtgtcgaatgaaaaacgacagggagagaattgtccgtttggacagagctatgccttgatgctgaaatatttttatccggagggccatccctatagttggcctgtgatcggctcaattgctgatttaaggagtgctacggtagaggatgtaaaagagttctaccggacctactatggtccgaataatgctacattggtagttgccggggattttaaccgggagaagacaaaggaattgattgggaaatattttggcgaaattccggcacaggaaaaggtggagaaagtgaaacctatacctgtgaaactggaaaaaaccaggaaattggtttatgaagatcagtttacaaatgtggcaggtctggatattgcttttccgggagtggaacagtaccatcccgatttctatcctctgcggatgatggccttgctcttatcttatggaaagggttctcctttttataaagtgttggtggaagaaagaaaactgacctcttataccaatgtagctacgtctgcttttgaattggcggggcagatatctctttcggccaaagcttttagaggaggaaatttgaatgatatttataagggaatgcaggaagctttccggcgttttgaaacagaagagattaaagatagcgatctggagcggctgaaaattatgcaggagacgatgatgtataatgtgatgatggctttggaaagtaaaactcaggctttggcccggaataatgtgttcggaggaagtccggaccgcagtgtggaagaactgagcaagtataaagccgttactaaaaaagatattatgcgggtatatcgtcaatatgtcaagggacggcattttgtcgctttgagtactgtacctgtgggggctatggatttggctctgtcaggttctgaaccggtaaatgtggagcaggatgattatgtaggacaaaaattggcttccgacgggaaagcgatcactgatgatgaatcttttgaatttactccgtctgtaatcgatcgttctgccgaaccacctttgatggataataaaccggaaatgaatataccggaaatctggataggacagcttcagaatgggatgaagattttgggaatggaatatacagaactacctgttgttcagtttacgattattctgaattctggtatgctttgtgaaactgctgacaaatcaggggtcgctatgctgactgctgctgtgatgaatagcggtacccggatgaaaactgcagaagaactggaagctgctttcggacaattgggagcgagggcaacaataggtgcttcggctgaacggatgcaacttaccgggcattgtctgaaaaagaatttacctcaggtggtacaattgataaaagagatgttactggagccccgttgggatgaggaagcaatggaactggcgaaaacaagaatgagggaaagtattcaccaaagtgttaccactccgaaaactattgcccggaatgttttccggagaatgatttacagaccggataatgtgctttcacgttcagtatggagatcggaggaaagtattcattccattcagctggaggatttgaaagagttttataccaaacatatatctccttcaactgcaactttttgttttgtcggcggatattccaaagaagaagtgatgtctttattgagacctttggagaacgactggagcgcaaaggacgtgaaagaaacgggcctgaacatgacttatacagctccgccggcaaaaatatattttgtggattatccgggagcgaaacagtcttatattttgttgggtgctccggcgatgccgagaatttcccgggattattatcctgccgtgattgtcaataaaatgctgggagcttcttccaattccctcttatttgatgtcctgcgactgaaacggggatatacttatggggcttattcttcttttgattgtggaaaatatctgaacgaattcagggccacttccagtgtacaggctgcttatactccggaagcaatgttattgttcagggaatgtattgcagattatgggaatcaatttactgctcagacactggataaaacacgggatgctatgttccgggaaaatgcggcagcttttgaaatgccggatgcacgtctggatattttggaagcaatagctgcttatgagttacctgccggatttatgaaaacccaggaacagatgcttcgggatatgactccggagcaagctcaggaatgtatccggaaatggctgaattacgaccggatgttttatgtggtggtgggagatgctgagacacaattggatagggtaaaaaaagccggtttgggagaagtgatagtggtaaataaagagggagtgccggaaaaataaatatagtgattaaatgatagaatatatgatgtgttataaattaatgagtctgattgtggctctcatggttgccacaatatcttggggacaaatatggatggaacccctgcatacaacaggaaagacaagctttgctattgttgcggatttgacaacctggcaaaaatgtcaggctgaaatattacggtatcgggatgttctcgaggcagaacaactgccctcttatattgtagcagaccggtggaaacatccggaacaactcagggagatattgctgaaattatataatgaacaacatctggaaggggctgtttttatcggagatattccgatacccatgattcgtaaggcgcaacatatgacttctgcttttaaaatggatgagaagaaatatccgatgattcgttcttctgtcccgtcagaccgtttttatgatgattttgatctgaaatttgattttctcaaacaggatagtctgaatccgttgatgttttattataatctgtccgctgtttctcctcaggatattcgttgtgacatttataccggacgtattaaacctgtcatatccgaaggtttggataaatatcagcaaatccgtgattacctgagcaaggctgtggctgcacatcaggaagctaaccgtctggatcagtttgtctcttatacgggggaaggttcttattcaaattcgctgacagcctggcgggcggaacaacaaactttgagggaacaattgccgggagtctttgaccggaaaaataatgcccgttttatgcgttatagtatgtgggattatcccaaagatgatgtgattacagtcttgaaacgggaagacttggatatgatgattttccatgaacatgggttgcctcacagacagtatctttcggctgtaccgtctacccacgattatgaacaacatatggaaattttgaaacgggaagttcgtctgaagttgcgtcaggatgcagaagatggaaaagatttccggaaacggatgtgcaaatggtcggaggattttcaggtagatacgagttggtggacaggtattacagatactcagatgatccggcaggattccttggtaaatgtacatatgggcattgttctggaggatgtctcccggattgcccctaatgtccgctttgttatttttgatgcctgttataatggagatttcagggaagacgattatattgccgggcgttatattttttcttccgggaaatgtgtggctgcttttgctaattcagtgaatgtacttcaggataaatcggccaatgatttgtttggattgttggggttgggaacccgtttaggattctgggcccgctataccaatattctggagtctcatatcctgggcgatcctactttctgcttcagaccttcggtggaaggtataaattgtaatgaatggctgggaacagatcagaagccggatttctggttgtctttattgaaaaattctgggcttgctgacatacagaatgtggccttgctgaaattatatcatgccggatttcccggaatctcagatacattgaaaacttattttgggaagtctccttatgcggttgtgcggtataattgtatgacattactggaaaagatcaatgacaggaatttccgggaagtcctcaaacaggcaacaaccgatccttacgaatttatccggcggattgcgattcatcggatgggacaggtaggctcaaaagagtttttaccttatatcatagagagttatgttaatgattatttttctgaaagggtggtatttaatgtacagatggctttggggctttatcgttgggaagatgtccgtatggcaatggaagatgtgcttacccgttcttctgtattggataaagaacgggtacggaaaaatctggagcgggttctgaaaggagaacggcaatacgttgcaatccgggatatgttgaatcctgaagtttctgagaaagaaaaactgatggagatccgttatttgaaaaatgccaattaccatccaggaattccggtctacctttctctggtgaaagatgtggatacatctcctgttatacgtaaagctttgcttgaatctttggcttggtttaccttgtctgatcaaaaagcagatattatcgaagcctgtaaagagattttgcagggaaccgataaaaatacagatatatatcaggaggcagagagaacatataaccgattaacgcaacaaataaagaataaataactatgaaaataatactttttttaagtcttttgatttgggttatcccggggtttgggaaagtaaaaattcagaaacccagaagtcagcatgtaacagcttttgcgattatagtggatgaaatgactctggaaaagaccggaggggctgtagaagcttaccgggatgctctggaagcagatggattgtcgacttatattgtcagtggaaactggaaaaatccggatgaggtgaaagctgaaatcataaaactgaataagcggaaaccagtattggagggtgtggtatttatcggtgacattcctgtggctttaatccggaatgcacagcatatgacaactgcttttaaaatgaatgaagacgaattcccgtttccggagtcttctgtaccttctgaccggttttatgatgatttgcatttgacgtttgattttatttgtcaggattcagtgaatacttctcatttttattataaactacgggaggatagcccgcaacagttgcgtccgaccttctattccggaagaattaaatatcctgaagcgaggggaggggataagtatgaagctattgctaaatacctggcgaaggctgtccgggaaaaaaagagagccaatcttttggattgctttgtttcctttacgggaagtggttataattcagaatgtttactggcttggatggatgagcgtttggctttgactgaaaattttccgttggcctggaaaaattcccgtacagcaaaatttctgaatttccggatggaagattacatgaaataccgtctgttcgatgaactccaaagggatgagatggatgtcatgctgtttcatgaacacggggctcctgatcgtcaatatatttgtgacggacctgctccggctggattgcaagggtatatgaattatattaaatcgtccatttattcttttgtgaaacgggagattgaaaggaaaaaaggtactccggaagagattatggcttattttactaaggaatatgctttgggatcagactttttcaaagatttttctatggagaagattgcagagcagaattctctggagcggttaaagaccggaattgtcctggaagatctgaaggagctgaaaacgaatccccggtttgtgatgtttgatgcttgttataacggttcatttcatgaagacggatatatagccggatattatatttttaatgatggaaatactgtagtaacacaaggtaattcccggaatgtattgcaggatcgctggacaattgaaatgatcggtttgctttcacagggagtgcgtgtaggacaatggaacaggcagattgcgactttggaaggacatattatcggtgatcctacttttcattttaccccttttgctcccaatactttgggtatggatatggttactcataaaaatgaccgggaggtatgggagaaatatctggattcaccatatgcagacgttcaatctttggccttgcggatgttggtagagaatgatgcggataaaacgatgtctccccgcctgctgaccgtttttcagagctcctcttttaatagtgtacggatggaggcattgaaattattgagccgttatgctaatgaagattttgtggaagcgatccggttaggactttatgatgcttatgagctgatacgtagaaatgctgcaatatatgctggtaagtgcggagatccccgcctggctgaagctgtggtagatgttttgttgaatcagccggaatcgcaacgggtgaattatattttgcagggagcattgatgttattgccggagaagcagggagccggggtatatttggcgaaagaggaaaataccagtcagttgatgcaacagttaaataaagatgtagctgataatgtacagaccttggccatgctgcaagatgcccgttctcctcaaaagaaacaaatttcagttatccgttatgtccggaattatccgcgtcatgcaaatattgatgcctatctgtctattattgagaatgcaagtcaggcagaagaggttcgggtgaatatggcagaagcactgggatggtttaattattcctatcggaaaaatgaaatacgtcaggctttggagaatatgctgaaacgtgatcaaatgcctggaaaagtgaaactggaagttgaacaaactattaaccgattgaaatgatatgaagacattacttttattttttctttttgcccccttattgttatgggcaaaacctgagataatcaaaccgaaagtaaaaacgccgacctcttttgctattgttgtggacaagcagagttatgaccgggtaaaatcctctattgaagcctatcgggatgctattgaacgggatggactggctacttatattctggtggatgaatgggagaatccggatgcgatccgggaaatcttaaagaagctttatgctgataaaaaaatgccattggaaggggttgcattggtcggagatgtgccagttcccatgatccgggatgctcaattcctgacgtctgcttttaaaatggatcagaaacgtccctggcagcagtccagtattccatctgaccgttattatgacgactttgatttgcaatttgattttttaaaacaggattctttacagcctttgtatttttattatagtctgaatcctcattctgcaatgaccattgagtcggatatttattccggacgcataaaaccaatggctcgagaaggaaaagataaatataccgtattggacaattacctgagaaaagtggtacgtctgaaagctcagcagaatccattgaacgacttgactatggctcgtggacatggctataattccgagtcccgggatgcttgggcaggagaacagctggcactaaaagaacagtttccgtccttgtttaaaagtggcaattacatccgtttttacgattatgatttcaattggccggccagaattccctatatgacagccgttcagcgggaaactgctgatatagtactgtttcatcatcatggagcagatgatacccaatatctgaacggatacccggagggaagtggggtgaatctttctatagataacataaagcgttatttgaggagtaaggtgttgacggcctatgagcggaaaaaggatgtggaaaaaaccaaacaggattatataaaatcactgggtgtaccttcagaatggctggatgatgctctggagccggaagtgatcagaaaagattcgcttttcaatgcgggtatggatattcatctgagcgatattcatgctatccgtccgaatgcccgttttgtaatgtttgatgcctgttataacggctcttttcatctggatgactgtattgccaatgcctatattttcggggatggaaatacagtggtaactcaggggaataccgtcaataccatacaggacaaatggccggatgaatatctgggactattggcttgcggggtacgcatcgggcaatggggccgtcatgtccattttttggaaacgcatattatcggagatccgacttatcattttgcaaatacggtagatcctgctttagatatgaaccgggcaatagttgtaagcaaaaaggacaatgccatgtggtataagctgttgaactatccgaatgcagatgtgcaatgtatggctttacggaagttgtatgaaaatcatgctcccggattgcctgagttactgcaaaagacttatgaagcttccttgttcggagtagttcgtatggagtgtatgaagttgttgtatcagatgaatagtccggaactggtggatgttttgaaacttgcagtatgtgatagttatgaattggtccggcgttttgccgttcagtatatcgggaatttgggaactgatgaattgatacctgctctggtttatgccttattgaatgaaaacatgtccgctcgtgtaaattaccaggcaagggacgcaatcatgctgatggatatggataaactgaccgcagaaataaaacggcaggccggggcaagtggacattgggtaaataaagaggaagtggtacagcaactcctgagtctggtacaaaggaaccagaattcctggcagagtgcagccggtgtcattagtgatcttacttcttctgccaaggataaaagttttgatatagtccgtcaacggaatcaccctgcagtcggagccgcagaactgttgattgcttttgttttggatagctcccgcgatatgcagcttaggattacaacagtggagacattaagctggtatacgcattctgtaaaacgaccggaaattattgccgcttgtgagcagcttatccgggccaatgaaaatctgcagttggtcaatgaagctattaagacaaagaatcggttgaagtaaacgctgtcaggttttaaacagtgaccgtactcgctattcgtttgagtgcggtcactaatatttattatttctttttgggtttttgtttgagttgagcggggcgcatggacaattcctgagctccgtatttgggtttgtttttcagacaatcgggtagttgttgctgaatttctggatgggtattcagatagtgttccaattggctgaggtaatcgaagtaggtgatggcttcgtcccggtcgggcatgttgtaagccatataccgcgaatattccaggcatttttctttccagaattccggataatctttgtaagtggctgaacgggtcataaagcgaaaatatatacaaagttcttcacggaaagcaccgggatcagctaccatttggtcgatgagccgggcagcttcttcgtatttttcggcactaatcagtcggtcggcctcgtttttccgggtaaggaatgtttttccttcgaaatcaggtagggctgccaattcggcggcatccgggcagtagttacattctttgaataatttactgtctactgcctgggttccgtgaattttgcggtatttgtcgatatcggaacaaagcattttaaacagtttgttgtcccgtccgtggatggatttcacgaataaggcccatactttcggattttccagtgaataacccggcttcgtgatcagttgttcggcacatttttcgctttctgtccggttatagcgggaggctgcataataagcgtaatcaagtaggaattccggtttggtattgcctgctttctgttgttccatcagatagacagaggtctttttcggatccagggccgaagctccggtgaaaaggaaagtttcccggtcttgattactaccggagatatgaattgctttttcggttttgggatttacaaaaacaaaggtggggaaggaagctacttcgtattttttggctaattcgactccttcgcctgtttctgcatcgatcttcaggcatacaaaatgatcgttgtaaaaattacctacacttcctaaggtgaagatgttttcagccatattcaggcaggggccgcaccattgggtatagaaatcgataaaaatcggttttttctcttttttcgccatagccttggcttcttcccagctgcaatgccggaatcggataccttcttgggcaactgcctggaaggcgataaagagactgaacaggaaaattaattttttcattttacttcagagttacaaaaattatcgcagttaaaggggttacaacggtttagtcgttccttttaaccgttgtaacctttgaaactttttatctctcgtactgcggcattcccggattgtaatttaaaatcatttgattaatcgggaagatgtaccgattgtcgttcggtgcaagggtaaaggtttcgccgtctgccgtatgggtgacggtttttttgaatttgtcttcataattgagacgtttcaggtctatcaggcggtggaaacccgtgaaggcaaattcccggcgacgttcgtccaatacgatgcggagcgcttcgtccttgtcggttgctgtcagggctacgttgtttttgatgcggttgtcacgcagtttgttcacatagctcattgcattgtctttggagccgacgcgggcttcgcattctgcggcaatcaacatgttttcgacagtggagaaacctacgttctgataagcatatagaatatagcaagtctccccgtaaaaataatcggtacgtcccatgttgacggtatcgtcggcataaaacaaagcacggcgctggtctgtcgctcctgcaggcaggttacgctcaaatgttgcaagaaaatccttgctgaccggaatggttacacgtccgctttgcagacggacaaatacggcttccggattgtcatccttttcgagcattggtgttccatcgggcaagacgatacgtccccaggtagttttatccttcgtctgataaggacgtaaatcttgcaattggtcgttcagtttcagtgcctcttttgcttcggtgagagcatcgtcataacgtcccatgtagagatacaggcgggcataaaaagagtgaaggctgcctaaatagggatggaataagttaatggggacttctttcaggcttttagaagcttcttttaagtcatcctctatttgtttgtatacttcggcaacagtggcacgggtgtatgtttgatctacaagatcctttgtgatcaaaggaatgccataatcggttgctgccgtttctttgtgataatggcgggcgtagatgttgaccaatgccaggtattcgaaagcacgctggtagagcgcttcggcgcgcaggcgatgtttttctgcatcggtggcatcggtagaggaaagcacgttgttgataatagtgttaaacgtgtaaatacgctcataagcggcattccacaagttgtcatctgaccccggcgtgtaaatctgtccgcctttgaatgagtagagattgcgctcgtggtcatcttggtttgcatacgccaggtcggcagcagaaacggtatcgtccaataaatgcacgtcatctgtcagataaaatgcatctgtgctcatgcagctattgagagactgactggcaaacaatttcacatagtcttcaaaagcttcgggaatagcataccctttcggtttgtttcccaaaaaatggtcgcatccttgacttactatcagtagggtgcagagtatcggataaatgtattttttcattattgtcctcattttagaaattaactgataaaccgaatgtcacatttgccgggaggtgagagccgcgtgagggtgaaaggctgctgccgttccatacttcgggatccaggttgttcctattggcggcccagtaccaaaggttctgtatctgtacattcaggcggataccttgaatcatgtattttttcaacaaatgtgggggaatggtataaccaagagtcacatcgcgcaatttgatgtagtcgcctttctgtacatgtttgtcggctgcactccaaaggtcttttgctttcatggctgcctggttttggaaagcaaaagccgggttgatgtccggattgttgttatcctctgcgcttttccagtaattcatcaggtcgcggtcggcattggaggtgcggtaaataggatgctgtgcaatcaacatgcctgcttttacatcgcgcattacatgaccgccggcatagataaacatgaaggaaagatcaaaacctttataacttaaacggttagtaaatgatgcattgaaacgtggctcgtaagtacccgagtaaactaaatcttccttggtcaaaaggtcggcagattttacaatttctccattcttgttataggcggttggaataccgttttcatccaaaccagcataacgaacgctgaacatggaattcatggcataatttttacgggtgttcagtttgctatagtaactgtaagccgattcatcagaagtctcgacttcaagcactttatttttgttgtatccgaatatgaagttagaagtccatgagaattcattcgttttgatattctcactgttcaatacgatttctacacctcggttgtacaaactggcaaagttcatcaacatggaactccatcccagggtcggatcggtggagaagtctcccaaaagatcactactctttttgttatagaattcgacagagccgttcaaacggttttggaataaattgaaatctactgcgatgttggttacttgggtcttttcccaacgcaatgacgggtttgccggacttttgatatagaatgcactttcgttggtaaagtagttgttcctgtctgctgcggcaatcaggtaaggaccgttctttttagaaacgttaccgttgataccgtaagtggcacgaagcacaagacgatctaaccaattggttttgttttgaaacagaacatagtgggcacctacagaccataaaggtttatactgatatttggggtctgtaccgaaaaggtttgattggtcaatacggatacttccattcacggtcagacggttgtctaaagtataggatgcatttccatagaatgatacataacggttgtccacatgcgagaaacccggagtcttgttcttgaatgagaatgttccgtatatactttgagtgccccgaagcatttgattcaagtcaagcgcgttgatttcgctgtacaccaatgtctgatcatcgtatcccaaacggtagaaaccgttttgagaggtaacgactttccgccgttctgcgccgacaagcacttgtaagtcatgacgctcggaaaaggtgttgttatagttcacctgggcacgcatcgtgtaggaattattgtccgtattggtctgcacaatctgtcctccgacagggatgttgtattttaacgtaccgtttggatttaatacggcagcatcgttaatcatggtttttacatccaaagcatttttcgtgtcatattgcttcgtgaatccggtggtattttccgtctggtaacgcaattcgaggttcagcccgtcaataatcttgaatttggctccgaaattcaagtttaagtaacggctttttgccgtatagtggcgagatgccatttcattgaccggaatataggtctcgtccatcaacccgatacttttcaaacggtcgatttctgcctgtgatttggtattgtacatctggagcggattgccttcgtcgtcacgcaacatataataggaagaggtacccgcattcaacaagttcatacccaacacgccattgtcgtaatcttcggacttattgctgccgatgatgcctgcatccaaagtaaaccacttaaagagattaaacgtatttttgatattaaaacctatacgtttcgttttctgttctcgttcgtatggagcggttccggtgtagtttatagaaaaattgtatttgtagatgtccgaaccaccattaaatgaaaggttgtgttggtgcgtgatagcccttttacgaaggaattcatcaatcacttggttgtacctgtcatgtgtacggtagggtttcaatttcgtttcaagttccgattcgcttaatttgccgtctctccaatccagcaataacaattgcacatcgttttggaaacggttggcatcataacgatttacattcgggaaagtttgaatcaacattttttggaagtccaccaattccgaactggacattttgtttgcataatccctatcggggaggccttgcaatttgatacttccgttatagttgacacgcggtttgcctgttgaaccgctgcgcgttgtgataacaattacaccgttggcggaacgagctccgtagatagaagcagctgtagcgtctttcaatactgtgatattcacaacatccgaagggttaagcacatccaatggcgtagtttggctgcccggttctccttcaaacggaataccatctactacatataacggtgtcttgtcgccattcaaggtagagactcctcgaatctgaatattcccgcggttcgaagtcaatccggccaccttcccttccagacgatccataacgttggtttgtaatttcccttccatatctttgggagagatgatggcgaacgaaccggttgcccgttctttagagatggtctggtaaccggtgacgatgacttcttcgatcatcttcgattccggtttcaggtcgaagttgtagacttcctggttaggcattactttcacttcggcattgctgtaaccgatgaaggaggccaccagcaattggcccgcttctgtcgtttttagcgtgaatttcccatcgacgtctgtagcgacacctactgtagtacctttaaagaaaacactggctcctacaatcggatctccgttttcgtctttcacaaccccccggatggtttgtccggctttagctcctttctgattgccggctactgctgccggagtcggttgtttccctgccggagccagcataatctgatgattggaaatggagtaagtgatgtcggcaatggctcccaattgttccaaagctttgtctaaagatacgccattacattccagattaactttctggttgacattgatggtactcgaggaatagataaacgagtgcttactttgctgctcgatttctttcaatacctcttttaaagattgatttttagcatgaatggtgattgtaggttgctgcgcccacaccgcattccctgacattagcacacataccagcaggaataaaagccgtttcaggtagttgctttttccggctggaatagctgatacatcgtttttcatataaatttggttaatttgtttaatgtatataaaatacacataaaaatgcgaataccctaaatcgatattcgcattttttttcaaaaaattgagtcctgtaatcttaatacttatacagaacggctgttttatcctttatttcaaaccggagcaaggcgacgttatgcatgatttccagtatctgggaaatggattcctcgtgaaaacgggcggtaaatttttgatccagaatttccgggtctttcacttcgaaggtcatgccatgccaacgttccagttttttcaggacttccgctatcggtgtctcgtcgaaaatcaaccaaccgtctttccaacctaggatgggtaaagtctcggccgggacagtcagattgactttttgcctctcttttttctctatccaaattctttcgttgggtttgactttgatttcttcctgtttcgaatgcttggtccgcaagacggtgatattaccggatagtaatagggcagagacattatcgtcgtttttataggaggtcagattaaatttagtccctttgacgataacctgaattccgttttccaatttaacgatcatcggtttttcgggattttttactacatcgaaataaccctcacccgagaaattgatttcccggctgtctccggaaaattgtgccgggcatttcaattcactgtcagaatttaaccaaacgatacttccgtcagggagcgtgacccgtccttttactcctttattggtatggtattccaattgggctaattgctgattttccagaaaatggatttcttgccgatagtcattgaattgatagaatacttgaaaggaaagaagcaggatcaatgaagcggcaatgccataacccaggattcgccggttttgtttacggtggcggattttacgggagtattgtaatacactcgcttccggagctttggtctcgggtaacttacttatgacccatgtgttttttaatcgattgaatttcagtcgattgtcaggatgctcttccagccaattcaggatcgttattttctccccctctgtcgcttgtcccgttatatatttgagtaataactcttcgttcataattattgggaatctttttggtaaatatacacttaaatttacaactaccctaaataaaattttggatttttttgatttaagtgagtaaagggattaatccgaaacacaaaagtatcaggtagtctttcagtttatgccgcatgtgggcgagtgctttagtcatgtggtattcgacggatttgaccgataaatcgatttcctgtgcgatttcttcataggtcatttcctggtcccggctcattttatagattattctcgttttttcgggcagctcagagagggcctgtccgatcagttgttccagctcctgcatttgaacggtatcgaaagtttcgtcggaaagagccgaataattagccatggtttcccgggccgtcaggctatcgctgtatttttgttctgcgatcttttttcttaatacattcaggcatttgtgtttggcaatggttagaataaaagcttgtacgctgaggtccggacggatttcagttcttttttcccataatgtaacgaacgtttcctgagcaatttcgcgggcttcttccggatcgggaagatattgctgtgcaaaaaacagggtacgcgtgaaataatcccggtataatccttcgaagaaggtcacttccgctgacttcaggaatttatggatactattccttaaaggtttcatgttgtttttctcccgtttttatgataacaccacattatcatgaatcgacaaagataaataaaagagaaagaggattttacatcgtattcaaaaaggttgtgaaaaaataataagattcgggtagtcaaataaaaaaaactgcccggttttccgggcagttccctcatggtaaggtgagaaaaaggtttataattgatgaattgttttaagttcggccataccggtttgtacggcttcgatattcatcggtattaaattgtggtgacgggccggaagagatttcttcaaccctttctccaaattatccaggttaatgatcggttttactttcaggaatcctcccaatatgatcatgttgaagattttcggattacctccctcagcagccaggcgggcaccttcgatctgatagatgttgatgtctttccgggtaggatggtgggtaataccgttcggatcgtatatcagggttccgcctgcttttaccaggggctcgaatttatccatagactgctggttgagtacaatggccgagtcgaaggcattcaataccggtgaactgatccgttcgtcactgatgatcaccgtaacattggctgtacctccgcgcatttcaggaccgtaggaaggcatccaggatacttcctgatcttgcatgatgccggaataagccaggatctttcccatagaaagtaccccctgtcctccgaatccggctataataatttcttctgtcataaaaacaataatttacatttttggtctttagtctctagccttttagcttttagcttccagcctttcgcctttagcattctagccttttttttagatgtctttgatgtccccgagcggatatttttcaaacatatgttctttcatccacttattggcgtcgacgggagtcatcttccagccggagttacaagtacctacaacttctacgaaagagaggcctttttgtaaacgggtattctggaatgcttttttcagtgcattttttgttttccgtacagcagcaggtgtctctgcactttgacgggtaacataacaggttccgtcgagttgtgccaataattcggtgatcttcatcgggaaaccattcagtttggcatcacgtccgtatggtgtggtcgaggtcacctgtcccaacaaggtggtaggagccatctggcctccggtcataccgtaaatagcgttgttaataaaaaccactacgatattttctccccggttacaagcatgcatgatttctgcacatccgatagatgccaggtcaccgtctccctgataagtaaatacatatttttcggggtgcaggcggctgatggcggtagctacggcaggtgcacggccgtgagcggcttcagcccagtcgatatcgatataattgtaagcgaatacgctacatcctaccggagaaacaccgatggtctgatcctggatgttcagctcttcgatcacctctgcgatcaatttatgaactacgccgtgagtacaacccggacagtagtgcataacgttgtcagtgaggagtttgctcttttggagtacgaggttttcctcttttataatgtctgttagttccatcttatcgttcctcttaaatcttaaatttatttttcagtgcttccacgatctcttccggagtaggtacaacaccacccatacggccgtagaaatctactttcactcttccgttgacagccaaccgtacgtcttcaaccatttgtccggcactcatttctattgaaaggaaacctttggttttagcgcatagatccgaaatggcttgtgtcgggaaaggatagagggtgatcggacgtaacagtcctactttgataccttcctggcgggctaattggatggatttttggcaaatacgtgcacaagaaccgtaagctacgaaaatgtagtcggcatcctcacaattgagtgcttcgtagcggacttcgttggcttcgatttcgcggtatttccgttgaagtttttcgttgaatacttcctgacggtgtgcttccagttccaaagaagtgatgatatgatgattccggtttttctttttaccggtcagtgcccaatcgcccgatattttttcgatttcttcatctgtccatctcggcgtatagtccggaaggactactttttccatcatctgaccgatcacgccatcggccaataccatagccggattacgatatttaaaagccagctcgaaacccaatacgacaaaatcactcatttcctgaaccgatgcgggggcaagaacgatcaggtgataatcaccgtgtccaccacctttggtcgcctgaaagtagtcactttgtgaaggttgaatcgtacctaagccagggcctccacgcataacgtcgactaccaagcaaggtaattccgctccggcgatataagtgataccttcttgttttaagctgattcccggactagaggaagaggtcattacttttttaccacaagatgcaccgccatataccatattgatcgcggccagttcgctttctgcctgcaataccaccatgcctgtctcttcccatggtttgcgcagcatgagggtttccatgacttcagattgcggggtaatcgggtaaccaaaataaccatcgcatccgcaacgaatggcggcttctgcgattacttcattacccttcattaattttacttctgccattttttcggtagttttatattattctacattttttttatagacagtgattacagagtcgggacataccagaccacagctcgcacagccgatacaagcttcgggatttttcatataagcatagtgataaccctttccgtttacatccggattcagctcgatcactttagtcggacatgctacgacacacagactacatcctttgcaatgttcggtgtctacaacaattgctcctctgaattttgccataatcttaataaattataatttgtcgaatattgatgtaatattattacgctttgttatttaattcgggtataaaattacattttaaaatcaaatccgcaaaaaaagatcaaattattttcattttaagctgaaaactgcacatctccccgaagagtgagaaaatatttagcgtttttttgcacaatctgtttgtaaagtgtgaatctacaaggatttaaaatcatcactccctatgattcgattggggtatgatctttggcaaaccgttcgatccggtctttcaatgtgtccatttggtccagtccgacttgggatacacaagctcttaatccttcccgggtacttccgcatccttttaatgtgatggaagaaattccataataaagaagttctttagctaattctgctcctgtcattcccggataatagatggtaaaatagaaaccgtccgctacgtcttcatgtccgtctttatcgtacacgactttgaaaccggcgtttttgtaaagggtcttcatgatttcagcccgtttgccgtattccctgacatctgtcaatatattgatccttccctcgttggcggctttcaatacggctgctacggcatattgaggggaatgagcggtacctgatgtttgggtatatatcaatttataggtaatggtatatcccagcttgtcggctttatagcgttctttcaaatgttcgtatttcttatggaataaagcatcggaaatacagagcagccccaggcgctggccggcatagctgaataatttcgaactggatatcataaaaatataattatccgtatatttcgctacagtcggttggaaaggagccttacccggatgagacagatccttgcggaaatccatggcaaaataagccaggtcctcgagaataatggtatcgtattcggttgccagtttgccgatgacttgtaattcgaaatccgtcaggcatacccaggatgggttgttcggattactataaacgatgccggcgatattcccccggtccaggtattcccgtagtttagcttccagtttttcttcccggtattcatagatatcgaaggtttgataaggcttgccgatgacttcgagttgggttttctgtaccggaaatcccggatctataaataaaatcgtgtctttccccttatggcattcggtcaatgccatgaaagcgacataagatgcctgcatggcacctactgtcgggatgattccttctggccggatatcgacatccatgaaattttttacaaaacgggaagcttcttcagaaagtaccggataaccttccagcatcggataaaattgggctactccgtgttttaatgcttcgatttcggcttctgttccgatacgggaaggagccagacccggaacacccatttccattcggatgaatttttcgccggtggctttttccagtagattagctatttttaccgtgtcgcggatagaagcatcgtctaaattacttactccgcattgagccatcgtggtgtcaaccagctgtttatcaatcagattattttgcatgatatgatttagtttgttgctttcattttgaaacaataatacaaaaattaattgaaaaaatacaatgatatggtgattttaacttataattaatcaaatttgtatcgtttgcagattaaatctaggtttgatttttcccctttctattccgattccggtttttataccgtcagaccggttcgttaaggctttccttcattgaccggcggaagcgaccgggtctccgaacgcgatcaccgaagacgaataagtacaacaataatgctactttttaaagtagtttcgacgtgttttaaagttgagcttaatcaattttgattgctgtcgttttattttgggggaatccgttgtttggcaaataaaccgatccttaaataaatgaataaacaattttttcccttaaatttgtcgggttaactaattggtgacggagtgaatcttgaattattcatagcaagaagattattgaagggaaaacaaaacggagcggtatctgtgccgattgtaaaaattgcgttagccggtattgcgctaggagtttgtgtgatgctgctttcgatcctgattattaccggttttaaaaatgagataaccactaaattgtcgggatttatggctcatttgagcattacggcttatgatcgtgaagatgcttattcgggaagtgagatcgagctgaacgattctttgttggaagtggtccggagagtgtccgatttaaagcagatgtatgcttatgtgacaaaaccggcgatcttgaagagtaaggaagaaattcacggtgtaattttgaaaggtatggattcctcttacgatgcttctttctaccggaagcatcttcgggagggcgaataccctgatttttttcaggccgaaccttctcgtgaggtgttgatctcagttgctgtggcggctatattgaatgtcagtcccggtgataaaattacggcacattttgtacaagatccgccgagagcacgggtgtttacggtgaagggaatttacgataccggttttaaagagtatgacgaaatgctggcggtgtgtgacatcaggcatttacagaaattgaacaattgggcgccccgggaggtttccggtattgctgtggaactgaacgatatgaaacgcatattagaggtggaggcggagttggacgacaccttgcccatgaatcaggatgacgatttttataaaatcactactttgcgggaaacggctcctcaggtcttcgattggttgaatctgttgaatatgaatgtttggatcatcctgacgctgattgttgtggttgccggttttaatatggtgtcgggtttgttgatcctgattttggataagacctcctttatcgggattttgaaagctttgggatatcggaatatacgtctgaggagattgtttttatatatagctgccggattgattggcaaagggatggtggtaggtaatattttggctcttaccttaggtggtttgcaggctctgtttcggattgtcagattagattcggctacttattatatggatacggtgccgatttatttcgattgggtctatattattttattgaatgtcggagtgttggtggtttcggtgttgatgttggtcgtgccgacgatgttgatttccaggataaaaccgattaaagcgattcgtttcgagtaacgtgaagtaatgaagatgaattttaaagcatatatagaaaaatggattattccgcatcggcgcgggattatgggtaccgtgatttttcacttggtcctggctatttttttattgagtatggaaatttcccggattcaggttcatacggagatggaaatcgttatggataccccgactccggaggagaggcagaaaaaagaggaagagcagcaacgaaaagaggaaattcgtcaaaagacttctcaggaagaggtcgaacgcatgttgcgttccattgctgtcaatgagaatgccgtacagccggaaaagagagcggaagccagtgtacagcaatatgtggacgagattttgaaggagttggaagaagaaggaaatagcggacgttataaagcccaacgcgataaaaattaccaaaaagacagtttgcaaaatgatcgcgataaacgggaacaggaactggattctttgaaatctactttttatgccggtgaaagtagtgtcagttataatctgaaagaccggtatgcccgttttctgccgattccggtatttaaatgtgaatatggaggtaaagttgtagtcgagatactggttaatccgaaaggtgtggtccagaaagctaaaattttggaagatcagtctcagtcggacgactgtttgtggcgggtggctgccgatgctgctaaacgttcgcgttttaatgaaaaaccggacgcccctgcgctgcagaaaggtacgatcacttataattttgtaaagcagtaaaataggttttttgttttttttacattaactttgctatctgatgtgtgatagtgtctgatctgttaattattgtagtgtatgggattattttcttttttattttctaagcataaactacttcgtacgacctatgaagcggaaactttcagagccgtattccgtgaagatgaagaattgtttctgagggtggaaaaaggggaagagctaaaacgttatcgcgagcttgaagagtatgtaaatagtgctcagtttaaggaaagacggaaagaaatcgaacagctctcttataaggacagcgaatattataaagcagaacggcaatataaagctttgctcaaggtgcgtaagttacaatcttatctgttgattgccgattctgaagaattgaaggggtatgagcgggtaaaagctttgcctgaatatcaggagtatcagaagctgaaagtgatggttatgtcggccggtttcgataagaaattacatgccgtcgaatataaagcttatcaggaaattattcgtcagccgaagatcgctgctttgatcaaattagagaaattacgtcgttttaaagaataccgtgaggttaaagatacggatttgccacaaaagtttacgcatttggaaacttatatccgttcggaagaattcaagcgaaacagagcttatctcttgaataaaaaccggtatcagacgaccgaagattatcaattactttgcgaattcgatgctttgaaaaagcgccccgaaatagctaaatatatcttattggctcaggacccttattttaatagtatgaggagatggcaattggtgtttgaagacgatttcaatcagggacgcctggatgaaaccaaatggattacccgttattatgccggagagcggtttttgaacgatacctatggggtgggagaggatatgcagttgtactcaccggataatatcaccttcggtgagagtgcggtttgtctgaattttagaaaagaatcgatcatcggaaaatattgggaccggcaggtaggaatacgggagaaaaaatacgattattcctctgctatgattagttctgccactgctttgaggcagcgctacggtcgttttgaggctaagattaagctgaatcgttgtgccctgacttcttgtttttggatgctgggggatacagaggtgcctcatgtggaaatcatgaagtgtgaggccgatggagtacatatgggaagagtgtattcttatcgtacagcggtcaataaagatatccaattaatcaaagagctggagctcgataatgcctattatattttcactttggagtggacggaaaataaaatggtgtggatggtaaacgatctggtggtgaaagaggaaaccgaacatatcccggacgttccgatgtatgtcgttttctctttgggaaccaataaagaacctctggaaaaacagttacccgcacgtatggaaatagattggttcagaggatatcgtctgaaaagttgaatatgatggggtcggatggctaaaacctgaatttatgacacgacagcttggattgcgaatcggaagatggctaaaagacagattgttgtcttcgggaagggctgtttgtgaattgttttacccccggatatgtaccgtttgcggggaaagcctgatgaaaggtgaagtgtatttgtgtaccgcctgtctggctgatttcccgttttccgatcaggcctatgctattcaggaagatgtgttgttgaatttcgatgccgcttaccggcctgaaaaattattctctttgttttattataataaattcagcccctataaaaatttgatttaccggattaaatatcgttctcatcggtctctgggtatctatctcggccgtttgctgggagagaagattaaaaatgaatgtgaggcagattgtatcattccggtgcctttacatcccaaaagggaaaaagaaaggggatttaatcaagcccgggaaattgcttgtggtatggccgaaacgataggagtagacatttatgacgatgtgcttttcagggttcggaacaatgcatcgcaaaccgggaagaatgcaagcgaaaggcttaaaaatgtcgagcatatttttgagttgcgcaatcccgctaaaattacaggaaaaaaggtattgttggtcgatgacgtgataacgacaggagctacgatcggtgcttgtttgcaggttttggctcaggcagggaatgtgcgtttctctttagggtgtctggctcaaacggtctgattttttcttttcacttttttccctttaactattccccttttgtccgatatagtttatctttgtaaatcgagatctgactgagtaaatagataatagggatgaagaagaacgacgatagagctttcggctgggagtggctggctatgttagttatggcagtagtggtttatgcttgtgccagccggggatatcccgaaggtggacctaaagatacgaccccaccccaagtgatcctcgaagaaccggcctcttttactaaaaatttcgataaaaagcgggtgaacatttatttcgatgagtttgtccagctaaaagatattaacgagaagttcattatttctccgcctcaaaagaaaaaaccgaagcctcgtttaaaggggaaatatgtacaagtcgaatttgtggattccttgaaaccgaataccacttataccttggattttgcagatgctatatccgataataacgagggaaatcctttgggattttatcgctatgtattttctaccgggaatgaaatcgattcgttggaattgagcggacaggttgtgaatgcggaatccggcgaaccggttttaaatgtatatgtcgaattgtattctaatctggcggattcgatgcctttgctggaggtgcctgactatgtcgcccgtacggatagttccggttttttccgtttgacgaacttgaaagatacgatttatcgtgtcgtggcgattcaggacgataaccgggattataaatatacgcccgaagcagaaatgtttgcttacctggataccttggtgcgtcccgtggtgatgactatgacccgggtagatacgttccgggttgtcgataaaatcgtcgggcaggacacaacgatgagggatagtatcgtcacacaggaatatctgggatttgggcctaacaatctttatctgcgtttgtttcaggaaaagctgacccagttgtatatgaccgatgacgaccggaaggaacgggaacgcctcgattttatctttagtattccgggaaagaatgagtttaaggcccgtttgttcgataccttgtcgacggaaccgctaccggaggattggtatgtgttggaacattcggccggaaacgatacattggctttgtggattaaagattctaccgtgtataaaaaagataccttgaatgttatcctttcttacttgcggacagatagtaccggtcggttgacgacctttgccgataccagccgctatacatttaaagacaaaaagaaacccgacaataagaagggcaggaaagacgaacctgaaactccggtgattgagtttgtggaaataaaatcgaatgccggtaacgattttgatttgggtgcccgtttgtggttggaatttaaccggccggtcgacaaggcgggcttggagaatctgcatatatcggagaaagtggatacactttatcagccgctgaaatttaccctggaagaagatagtctgaagatccggcgtatttatatcgatgcttcctggaaagccgggcaggaatatatgttgactttggattctgcttctgtcaacgatatttatggacggcataataacaaactggagaaaaaattcaaagtgcgtcaggaagaattttacgggaagattatgctcaatgtgagtggcgtgcagggacaggttattctacaactctataagtcggataatgggaaatctgagaatggaaaacgttcttatgcagtggtacaggagcaaattatcaaccaggatggacaggtcactttcccgttgattcccgaggggaaatacaagtttagggcgatcttggataccaatggcaatggaatttgggataccggtttgtatttgaagaaccaacagcctgaagaaatcgtttatttacctgtcgaaatcagtgtcaaacaaaattttgatattgagcaggaatttaatttgttgaagccgtataaggatgagagtgataaatagaaggatatgaaaaaaatttggatattgatgttgttattggggggaagcctgtcgctttgtgcccaatcgaaatacccgcctatagaagagttggtatataccggatattataactggggatttatttgggtcaaggctgggcgggtggatttttcgttgacgacttccgaaaaatatccgaatgccgaacgtttaaaagctgtgggttattctttaccttcctgggattggatattcacgatcagggacaccctgatatcgcattttgacaagaatacttttatgccctatgaattttcgagaaaagctcatgaagggaattatcataagactttcgattatacatttcattatgacgattctgtcgtattgggagatatccatcggattggaaaattcagacggacagatacggtgaaactactcggtcaaacctatgatatgctttcggttgcctggatggcccgggagttggattttgataaataccaaaaaaacgacttgattccgatccggattttgatcgatagtaaaatttatgatttgtatatccgttatctgggtgtggtgaaaagcaagattgccggccggaaacaggaatgttacgttttttctcccttgttggttgaaggtgaggtattcaaaggaggcgaaaatatgaagatttggttgagtaaagacgaatatcggcttcctttgatggtcgaagcgaagattctggtcggatcggtaaaggcgattttagatcgttcggctagcaaatacggggattttacggaataagtttaatgtatattttaaatcataataaaatgaagatacgaatattagtcagtctgctggtgttgaccctgagttattttttgttctcttgtaaagaaggtggcggtggccggcggtcagctttacctcctgtcagcggttctacgaatgaactgctcgtcgttatgccgaaaactttgtgggaaggtcatgtcggggatactatcaaggaatttttcggacagcctcaattgggattacctcagggcgaaccggtctttgatttgatcaatcttccgccttctaatttcgaaaaaaatgtccgttttcatcggaatatactgactgtttcgattaaggataaagtcgatacggcttcaatcgtgtttcacgagagtccctgggctcgttctcagaagatttttcaaatcagtgcaccggatgtagaggcattttataaaatcttcaatgccaataaaaataaaatgatgaacgtgtatctcaaggcagaacgtgaccgtttgatcgaggtatacaagaaaataccggatacgaagatattcaatatgtttaagaataagtacgacctcctgttgtattgtcccggaggatattatataaataaagatacttcgaattttgtatggatttcttccgagacccgggtcgatagcaaggggatcattttttttgaagaaaaatatgaacatgaaagtcagatggattaccagattatcctggaccggatgaatgaagagttgaagaaatatattcctgggccccgggatagtacctggatggctttggatctgaagactccgatgactgctgctttttataaatatgacggaattcattatgctttgcttatcagaggtttgtggactgccgaaaatgattttatgggggggccgtttgttttgaatgtcgtattggatgaaaagaatagccgtattatctatatgatgggctatgtatacgctcccgatggtaaaaaacggaatatgttgagacaagtggaaagtattgtaaattctatgaaaatcgatttccccgaggaagaaaagaaataaagggataatgagagagtgcattttttttctgtgtttgtggtgtggaataatcggaggggctgaagccgtttctccgggtattcagcattttgaccgataccggagtttgttggaaggcaaaaaggtcgggattgtggctaatcagactgctgtgctggaaaccggggacggatataagcatagtgtcgatttcctgcgtgatcatcaggtacaattgatacgtatcttttgtccggaacatgggttcagaggagatgccgatgctggggaaacggtgggtgattaccgggatcggcagaccggtttaccggtcatttccttatacggaaagaagaaaaaaccgagtccggcggatttgcagggattggatgtggttgttttcgatatgcaggatgtcggtgtccgtttttatacttatctctctactttacactatgtgatggaggcttgtgccgagaatcaggttccgcttgtggttatggaccgtccgaatccgaatgctttttatgtagacgggcctgtattggaaatgaaataccggtcttttgtcggaatgcatccggttcctgtcgtttatgggatgactatcggtgagtatgcccggatgattaatggagaaggttggttgaaagataaaaagaaatgtgatttgacggtgattccttgtcagggatggaataggagtatgacggtagatttaccccggaaaccttctcccaatttgcccgataaagtgtcggtcatgttgtatccttcggtttgtttttttgaaggaacggtagtcagtgaagggcgtgggacctatactccctttcaggtattcgggcatcccgaattgaaaggtatgccttatacttttgtacccgaaagtattcccggtatgagtaaaaatcccaaatgcctgggattgaaatgctatggcatgaacctgaggaataaatacgatgaggtgagagagggacaacggttacgtgtggattggttactattggcttatcggaattataccggaaaaactccttttttcacttcttttttcgagaaattggccgggacagatcgactcagaaaagatattgaggcaggtaagagcgagcagcagataagagctgcctggcgttctccattggaagagtttcagaaaatcagagagaagtatttgatctataaataaattattgaattagtggattgaagatgaaaaagtcactgggaaaacgggtgttgaaatggactctctggagcctgttagctttagtggtactgattttggtcggtgtcactattgttattcattttatctttaccccggcaaaattaactcctttggtagagaagactgcaaaagaatacctgaatgccgaggtacattttggaaatattgaattgacttttttctctactttcccggattttggaattcaattggacgatgcttctgttatttccgggacattccgtgatagtacggctaatagcgagccgaccatgcaggattccttgatgaatataaaatcttgtctgttgactataaatccgatcgcttacctgactaagaaccgtattgtggtgaaggatttcgtattggaacagccggagatatatgcttatgtagattcggccggtgttcccaattgggatatactccggatagcggcagatacgactactgtagatacaacgatggcggataccactactttcgattcgggaatacgtttgcggaatgttagaatccggaatggaaggcttgttttcgatgaccggaatacgcgtttgtatacccgattgacgggaataaacctcggagtagatggctatctgggcaaacgccgttctcggctgaaactggatttttcaactgaaaacgtattgttttggcaagaaggacagttgctggtcaaccgtttggctttcggaatagaaaccggtatgaaaatcaaccgggattccttattatacactttggagaaagccgtagtcgatgtaaacggtatccgtttcggagccggaggaactttaagaggagataccgtaaatcatactttactggtgaatttaaagtatggaatacatattccgacattaaagacactattggacttggtgcccgatactattctgcataagactgaaaatgtggaggtgcggggagatgtattgtgccagggagagattaaaggtatttacggtcaacagaatattcccttgctgacttctgaatttcggatcaaagatggctttatcgcttatcccggtatgccttcgaaaatcgataccctgaacgtagatctttttgctttgatcgatttgcagaaagaacaggagtcttatgtgaatttgcggaatttctgtatgaaaggtggaggtatcgatatcgatatggcgggcgatgccgaacgcttgttgacagcacctaccctgaaagctgaagtaaaggctttggtgaattttgaagaattgacaaaaatctttcccttggcggatggaattacttgccggggtacgctgaatact

SEQ ID NO: 5939 - DNA, 53097 bp, Unknown
  gut microbiota DNA sequence
atcttactttttagggacatttactgaatatccctaaaaaaaccgcctgttacgacaagcggtttttataaaaagtgatattttttaaatctgatcgaaatcgacgtcgaattcttctttttgggggtcggtgtaggctgctttgggagcttctccgccgatggcggcctggatataagcaacgacttcatctaaaccttcagcaaacttttcaaaatcttctttgtacagaaagattttatgcttctcgaaattttgattcccgtcgttatcgaatctcttcttactttctgtgattgtcaggtaataatcattgttacgagttgatttcacgtcgaaaaaataggttcttttccctgctctcactgccttggaataaatctcttcccgatcattgtccattccttcttttctttcgtatccttccattgtttgtagaaaaatttagttttataaaatagttgcaattttgcgtttcaaatgtaataaaaaaagcttataaaagtaactttttttaattttttttaatcacctccttttttgcttcggaagtatgataattgttaaattctaattttcatgaaaaaccgtttcagcgattttgaataaaagcttatctttgcaggatggaacttataaaatccgttgattgtagggggtagagagataagttcgttttgtctattttttaataagtgattcaaatggagattgttgttagcgggatcagacccacgggaaatttacatttagggaactatttcggagcggtaaaaaattttctgcgtttacaggatgaatataaatgcttttttttcattgccgattggcattctttgacgactcatccccatccgggcgacgtgactgccaatgtacggaagattttatccgagtatttggcatgtgggatcgatcccgaaaaggcagcgatctatgtacagagtgatgtaaaagaagtactggaactatacctctacctgaacatgaacgcttatttgggagaattgcagcgggtgacttctttcaaggaaaaagcccggaaacaaccggagaatgtgaatgccggactgttgacttatccgactttgatggctgccgatattctgattcaccgggctgataaagtaccggtaggaaaggaccaggagcagaatatggagatggcccggaaatttgcacggcgtttcaataccatctatggggtagaatttttcccggagccacagtcctattccttcgggggagatgcgattaaagtgccggggttggatggatccggaaagatgggaaaatccgaaggaaatgctatttatctgatcgacgatgccgctactatccgtaagaaagtgatgaaagcggtgaccgatagcggtcctacgcagcccaatagcgaaaagcccgaagctatcgctaatctgtttaccatgctgaagattgtatcttctgcagatacttacgattatttcaatgagaaatacaatgcctgtgaaattcgctatggtgatttgaagaaacagttagccgaggatattgtgaattttacgtctcctatccgggagagaatcctggcctatgccgccgatacagaatatatggataaagtggcccgggaaggggcggaaaaagcgcgtgccagtgccgataagactatccgtgaggtgcggaaaatcataggttttaattaaagacttaaaaaatgtatgaatatataaaaggccttctggtggaggcgacgcctgcttacgcagtgatcgaatgcggcggagtggggtattatattaatatttcggtgaatacctactctcagattgtagctttgcagcaggtttccttatatattcatcagattgtccgggaagatgcactcttgttatacggctttttcaataaagaggaaagaacggttttccggcagctgatttcggtttccgggatcggagcgaatacggctagtgttatgttgagttcgatgacggtaaaagaaattgccggagccatcctgacagagaatgtaaatgcaatcaagagtgtgaagggaatcgggctgaagacggcccagcgggtgattatcgaattgaaagataaaatagcggtgacaggtagtgccgaagagatgaacttcggcgcttcggtggccataaaagaagaagctttggctgctttggtgatgcttgggtttgtgaaggctcaggccaataaagtattggataaaattatggccggtggaggtgtcaccagcgtcgaggaactgattaaacaagcactgaagcaattataaataaatgtgttgcaaatcattagtgtgaatcggtttgcaaacaatgtgtgtgtgtatgcggtatatcttgttattatttttgataataactcagatggtttttgttttcggttatcctgcgggagaatcggaggagcctattttttccgggcgggttgccgggaccgtttccgataccctgcaatttccgatccgggagatccgggacaatgaaatccggcagactattccatcgtcggcattgtttctcaggcaaccgtccaatataaaagataccattatctatgatccgctgaccaagcgttatgtcgtagccagcctgatcggcggaaagtattattacaaccgcccttttatggaaaccttgcaggatctgctgaaagcccgttcgaaaatgtcgttgtacgaatacaaccggaggcagattcaggaagggaataagtacgatttcaagagtctggtttccgatatacaatttttagacaaaattctgagtccgattttcggtatcaacaaaatccggatcgaggtacagggatcggcagaactgaccttgggggtcaaaacgaataaagtcgataatccgactttgcctatcgatatgcgcaaaacgacttcgctggatttcgacgagaagatacaattcaatatcggcggtaatatcggtgatttggtcaatctcgattggtcgtacaatacagaggctactttcgattatgacaatatcctgaaactgaactacgaagggaaggaagacgatatcgtgaaaaaggtggaggcgggaaatgtctctttacctttaaccggaacgctgatttcgggtggacagaatctttggggattccggacggacctgcagttcggtaaattgtccatgtcgagtattttttcgcaacagaagggggaatctaaagtgattcaattggagaaaggagctgaaaaacaggattttgaagtatctgctttgaggtatgaagctaataaacactttttcctgtcgcgttttttccgggatcagtacgatgccgccttacaaaacttgcccgtagtgaatagcggggtggtgatcactaaaattgaagtatgggtaaccaataaaagttcccgtttcgaccgggcccggaatatcgttgcatttacgggtttggctgaaaataatgtcggggatccgtccaatccgatgttcgatgccggtttgtttcccgccgttcccgggcaggtatatcccgataatcagagcaatcggctgtatcagaccatggtggatcgctatgcaggaatccgggatatcaatcaggtttccggtattttatcccagatcggtaccggtttcaattccggcaaggattatgaaaaattggaaaatgcccgtttgctggatccttccgaatatatcctgaatgaaaaactgggatatatctccctgaatgcggccttgaatgcggatgaggtattggcggtcgcttatgaatatacggtgagaggggaaatccatacagtgggagaactgacctccaatgccccggctgcaccttcgaccttggtggtgaagatgttgagaagtacgacacagagccctaaaatgccgacctgggatttgatgatgaagaatgtctataatatcggttcctataatctgagtgccgaggattttgtgttagacattttgtaccagaatgataaggccggaacgatggtgaattatctgccggccggagatatcgataataagattttattgtctgtgatgaatctcgaccggctgaatacccagttggacgcgattccggacgggcgtttcgattatatcgaggggataacggtctattccaataaagggaggatcgtttttcccgtactggaaccattcggcgggtggctggaaaagaaaatcaatcgtccgggagtcgctggtcagtacgtttataaagacttgtacgaaaagacacaaagcgaagcggaacagaatgccgagaagaataagttttatctgaaaggaagttacaaatcgtcgtcctcttccgagatctccctgggaggacaggacatcgctcagggctcggtgaaagtacttgccggtggggtggagttgacagagaatatcgattatgtggtcgattatacgatggggactctgaagattatgaaccagtcattgctggaagccggtacaccgattacgattaaaagtgaaaaccgttcgatgttcggcatgcaaaccaaaacgctggtcgggacacatctcgactataaattcaacgataaactgaatatcggagcaacggtaatgcatatgagcgaaaagccgttgacccataaagtgaatctgagagaagaacctttatcgaataccatttggggggtgaacgctacttataataccgagtccggttttctgaccactctgatcgacaaattaccttttgtacataccaaagcgaaatcccacctgacgatagacaccgagttcgccaggtttcagccgggtacagcccgtggagccggtggaaacgcttacctggacgatttcgaaggaagtaagatttcgttggatatgaaagggataacgcaatggaaactggcttctacccctcaggataatctgtttccggaaggcaagtcggatagtctggattacggctacaaccgggcaaaattggcctggtatattgtcgatcctattttttaccgcatgtcgacggcgaccccttcccatatccgggccgacaaggaacaacgttctaaccattttgtccgcgaaatccggcagacggaattgttcccggataaggatctggctgtcggggatgtgaatattattcctgccctctcggtggcttactatccgacggaaaaaggtccctacaactttacgaccgatgtcgaccgggacggtaaactgcgtaatccggagaaacggtggggaggaatgatgcggagtatcactaccagtgatttcgaaacagccaacgtgcagtatatcgaaatctggctgatggatccttttgtatatgacaatcggcacaaaggcggagatgtatatttcgatttaggtaatgtgtcggaggatattttgaaagacggccggaaagcttttgaaaatggactgcctgccggaccggatatccgtcatgtggataccacccgctggggacgagtgccgggtgtacagtcgataaccaatggattcgataacaacagccaggcccggcggtatcaggatgtggggctggacgggatgaacgatgaagatgagcggatattttacgcagcttatctggagaccttgcgccggactttcggagaaaattcgaaagtataccgggaggcctggaacgatccggcgggggataattatcatttcttccggggatcggattacgatgctttggaaacacctgtattggagcgctataaacagtataacgggacggagggtaactcacctacagccgatatgtcgcccgaatcttatccgacagcagccaccaccttgcctgatgtggaagatatcaacggagacaataccctgaatgagacagaagcttttttccgctatcacctggaactccggccggagaaaatgaaagtcggcgaaaattttatcaccaacataacgacctctagtgtcgaattgcctaatggatcaaccgaggagatcaaatggtatcagatcaaaataccgctttcggcacatgaatcggattacggcaaaattagccgatgtggcgacgatcagttttgccggtagccggatgactcccgggtttggcagtatagagcagcatgctgctgagatcgaaagggaggatttccgttcgatcgatttttctaccagtgtcgaattcggtaagttctttccggaaaggtggcggttgaggattccgatgtattatgcttattcgcgacaatcgactttaccggaatacgatcccctcgattcggatatccctttggaggtagccctggataatgcagcgaaccggcatttgcgcgattcgatcaaacgtaatgcggaagattatgtgatgcgcaaaagccttaattttacgaacgtagggatagaaagtaaagacggtaaatcgcattttttcgattggtcgaatctgtctctgacttattcttataataaatcctttgcccgtaatgtcaacctggaaagagacctggaaaaaaattaccggggactgatcagttatatctacaacgggatgcctccaatagtggagcctttcaaaaaatcgaaatccaagacattgaattcgaaatatttgcggttgatcaaagactttaatttttattatatgccttcgatgttttcgattacttcggatattacccggaattaccgggaggtgaaatcgaagaatctggataatccgaatttattgatcgaacctacttatgataaggattttatgtggacccgggattatgcctttaaatttaatctgacccggaatctggtggtcgattttcatgcgacgacacaggcacgtatcgatgagccggaggggatcgtcgaccggcagagggaccccgaacgttatcagcaatggaaagataccgtatggaacaatatcctcgacggtgggcgtccggtaaattataatcatgacttttcggtccaatataccgtaccggtcaataagttaccatttttggactggacctctttgcagctaggctattcgacccgatacgattggcaggcagctgcggtgacagccgattcgacgaatctggggaatgtgatccggaatgcgagtgctttgcagatgaacggagatttatcgttgacatcactttacaataagtctaagtttttgagagaaatgatacggccgccccggaaacagcgagggaagaacgtgaagttcgaaaccggaatggataaagtacaaaaaggaaaaccggtcgttgtacggcatcggttgaagaccggcgatatacaagcccgcctgacggctgccgatggaaaaaatatcaaattgggatatgagtcggtcggtaggaacaagatccggatcaattcttccgagactctggaaggaggtaagttgctcgtgaccggaacggaaactccgcatgccggggtgggaaatgcggttgcccgtttttttgtagggatattgaccggattcaagacgctgagtgtcgggtattcggaagataaagggacgacattacccggtttcctgccggaagcccgctggctcggacaacagagctataacggaagttccgctcccgggtttaagttcctgttcggcggtcaggatgagaatttcgggttgaaggcggccgggaaaggatggataaccaccgattcgacccaaaataatcctttcctgatgaatgcttcccgtacggtttatgtgagggctttgttcgagccgataaagaaattgcgggttaacctgacttcgaattggagggtggtgtataccggtttgatcgatttcgcctttatgaaaaaagtattcaaatcgatcagtgtcaaccacaattatatctgtaaatacaatatcggctcgtttgcctctaatctgaaatatgccgaagatgcccgggatctgcaagacaattggatgtcactgttcgatgtgaatctggtttcgatcaacgaacaattcaatcctctgatcagcatggatatggtgtgggccaacaatctgaccacccattgggatatcaaccgtcgccgggatgtgagcctgagcctggtaaacgctcagttgtcggaaacctctggcaacgagatcgttttgggactgggataccggtttggaaatcttcctatcttcctaaaaagtaagcagttgaacaacgatatcaatgtacagttcgatttcagtatccggaaaaacaataccatcatccgaagaataaccgaaaatgtagatcagttgacggcaggggaaaaagtgatgtctatcaaagtatccgcggactatacgtttaataaccggttgaatttaaggctgttttatgaccggaaagtcgatactccttatctctctctttcctatcctaccaccaataccaatttcggtttgagtatccggtatacattgatgcagtagaagggccggcttgtagaattttttcaggatatggctaaccgaaagtattaaatttgcccggcttacattatctttgtaagaaattaaatgagaagatatggaaataaagatttttgtaaataatccgtggcaggagaatacggtggttttatatgaccggacgggggaagccgtgatcatcgattgcggatgttttagcggtgaggaagaacgaagattgcaggattttctgtcgcaaaagaagttgaaacccgtggctttgttggatactcatttgcatatcgatcatatcttcgggaataattttataaaaaatacgtatgggctgagtgctcaggcctcggatgaagataattttctggttgagaacgctgtggagtatgccgctatgctcggagttacggggattacgccgccgcctgccgtagggaagtttttgaaagacggtgatcgggttcgtttcggagagtcggaattggaagtgattgctgtaggcgggcattcgccgggaggactttgttattatagttctgccgatcgattattgattgccggagatgtgttatttgccggaagtgtcggccgttcggatttgcctggaggaaatgcgcgggtactgatagaaggcattcgtagaaagttattgtgcttacccgatgaagtaaaagtgattccgggacatgggccggcaactaccatcggagaggaaaaaagatacaatccctttttaaattaaacggtatgaaaataggaattatagtggccatggggggggaattccgcttggtggaagctttgttgagcgggaaaaaagaacaggaaatacgggggtaccgctatgtgaccggacagttgggggagaaggaaatcgtcttgacacaatgtggtatcggtaaggtatgtgcagctgtcgggactgtcgagatgatccggtatttttcgcccgattatatactgaataccggagtagccggagggattgatgcccggctgagggtgatggatatggtcgtggggaaagaagtggtataccacgatgtgtggtgtgggacaggtaacgaaatgggacaggtacaaggtatgcctgcgcgttacaaggcggacagcaagttattgagtgcggcattgtcggttacaagtgatattgcgttatgtgaaggactgatttgtagtggggatcggtttattaccgaccgggtagctttggaaggtataaaagagaatttcccggagggattggccgtcgatatggaaagcggagcgatcgcacaggtgtgtcatatgtatgcgacaccttttttgagctgccggataatcagcgatacgcccgggcaagtagaaaatcatgctttgcaatatcaggatttctggacagctgcgcctgaaaaatcttttgaaatcctgaagcagctggtgaatcagattactgaataatcaactaaaatcataaatcatgaaaaaaataccgagcttttcaatcgatcatattcatttgttgaggggaatatatgtctcccgtaaggattatctgggggatcaggtggtgacgactttcgatatccggatgaaagaaccgaatcgtgaacctgccttagggtacggtgaattgcacacgatagaacatttagcggctacttatctgaggaatcatccggtatggggagaacggatcgttttctggggcccgatgggttgctgtacgggaaattatttcctgatgaaaggagatttgcaggcgaaagatattgtggaactgatgcgggaaacatttcggtttatccgtgacttcgagggggaagttccgggagccgctccccgggattgcgggaattatttgctgcataatttgcctatggctaaatatgaagccgataaatatttaagagaggtattggaggtcatagaagaaaaaaatatggtgtatcctgaataatattccgctaattgattatatttgtgattatgtagaaaacaaaggtatatctacattagatacgagtaacgcgattttacagtaaacgaaaccgccaattttcaaactgaacgtaaaatcggattatactcacgtgccatgcgtgggcttttccgatttggttcagtaggtgcttggcggtgcctgtttactcagatcaaaagctccacgcatttttaatgaggaggagctgtaaagacggttgcctatggaaaatcttcctcttatttttaaacggtatacttccgaaaacggaggtaaggaattattgggggcggtggagttgaggctcgaattgcccggagagacggatgttcggttggggataacggctattacttttttggtggactggggtgacggtgaatccgatcattcggcagcgcatcattatgaacaggccggatactatcgggtgcgggtggtgggtacagctatcagtcagttggatgtatccaaatgccatctaaccgagttgaagctggataagtgtcccttgctggaaaatctgaactgtgcttataatcggttgatcacgctcgaattggtttgttgtccgaagctgaagcttttgaattgttccgggaatcggttatcggtgttgcgttcaagatgtaaccggggactggtgtatctggactgtagcgacaatgttttgcaaagtctggagttggatgcttgtccggatctgctatacttattttgtttttcgaatcggctgcattccttgtacctgggtgggtgtgacaacctggtctgtgtagataccggtggtaatggtttcgaggcagaggcgttgaatcagctttttagttctttacctgcttttgccgaaggaagagaagccactatccggttcgaacagcccaatggaagtgagcggaagtgccggatggaacttctgcacgctaaaggctggaaagtggtctgagctttattccggttgcagatcgacaggtttatagttttgccggtcgaggcggtcggtggtgttggcacaatgaattccccggtctttcatggctttgtttttgccgatatgtgtttcgggaaattttccgtttttcctgaataatatattgatacccaggcctactaaagccagacctaagagaatggcaacgatgatgaagatggtaaatagcataatattacttttagttgtttatacaaagttactgtataaaaagaaaggattaaacattacttctggaaaaaaaaacttaaaatgtagttttgtttcttaggatttttctacatttgaaacgtgaaaggcagcaaagcgtggttgtaaccgggaataatccggataaaaagttgagttcaataaacatttctgaatattaaatttatttgatgatggaagaatacggaaaaaatgagggatttgacatgaatgaagaccgggaagaggtttattcaaaggcagtgaaagccggcaaaagaacttatttctttgatgtaaaggctacacgtaacaatgactactacctgaccattacagagagtaaaaagaaattcgataaagatggtgtttcaagctatgagaaacataaaattttcttgtacaaggaagatttcgagaagttcgccgaaggattggaagatgctgttgctgtcgtaaaatctgctttagaagggaaattacctgaaactaattaaagaagtaaaaagtaaaaggtaaaaagtgttcatcgcattttttaccttttattattaccttttgctttgtaatatggctaagaaagaagtagttcaagatatttttaatgatatcgccccgaaatacgatttgctgaatcatctgttgtcgatgaatatcgacaaggggtggagacggaaagcgatgagctgcatcggagaacaggagaagggatgcttattggatgttgcctgtggtacaggtgatttttctattgcagcgcaccgggccggagtgaagcaagtgacgggaatagatatctcggaaaatatggtggagatcggaaagaaaaaggtcggcgatctgcatcttgctgatgccattgagttgaagaccggggattgcgaacatatggagtttgcaaccgggatgttcgatgtggtgacggtggctttcggtgtgcgtaatttcgagcatctggagttgggattacaggaaatgtacagggtattgaaaacgggggggaaagtgattattctcgagttctctatgccggagcattttccgatgaaacagttgtaccgcttttatttttgtcatattcttccgacgatcgggggatggatttcagggaataaaggagcctatacttatctgcccgaatcggtaatgaaatttcctcagggcgaaacgttcctgcaaattatgcgggactgtggttttcagcatccggtccggcggaaactgagcttcggtatcgccagcttgtatgtcggagaaaaatgattttttcgtcggtcaaaaatggaaagctccccaaccggccaaaagtgtaaacagcagagtagaaagggataatactttcaattgcgggtccaacccgcgaccttccgcttggactacttttttcaaatggatcagaaagagagggagggtgaaccaaaagataaaatgaaaaggcctgaatccgcataagcccatatagctactcattgcaacgaatgctccgatgatcaggcagaaatgatatactttggctttggagatccccagtatcaccggtaaagtacgtttaccacaaagccggtcgttttcgatatcgcgcatattattcaggttcaatacacctgtcgataacagaccgacagcagtggcaggtagaaagatactgatcgataaccgatgagtcattagaaaataggccccgcagacactgagtaatccgaaaaataaaaagacaaagacatctcccagaccatgatagccgtaagcatttttgccgaccgtgtatttgatggcggcaacgatcgaagcggctcccagcatcagcataatcagtccgtctgtgctcagcaaactttcaaaagcggtggagaccagagcagtcccggataaaacggatagcaggacgaaaagtaaaatcgttcgtttaaattctttcagggacagggctcccgactgaatgctccggatggggcccaaacgctcctcattatccgtacctttttgtaggtcacctaattcgttggccaggttggataaaatttgaagacaaagggtggtcactactgctaatagaaaaggagcccagttgaaataaccttccgaggcagctaaaagagttcctaaaaagattccggataaagaaagaggtaaagtcctcaatcgaaaactggcgatataatattttattttagacattttaagggaataaatatgctgtcgataatcgggaaacaaaattacaaataatttcgggagatgaaaaagagagttgaaaagagttgctgagttattgagttgctgagttgctgagttattgagttgctgagttgctgagttgctgagttgctgagttgctgagttattgagttgctgagttattgagttgctgagttattgagttgcaaaggagggggagagttgataaaaaagattcgagttgttggagaggggggagtggaagatagggtttgaaaggggactgatccttgaaagtttacaaatttttgatgggtgaaccttcggaatagaatccggaaggtagttccgctaatcagaaccgaaggttctccaatcagaggcctcgccgatcaggcttgaaaagccgtcagtcttataggtttgtccggttgatcggcatggtcatacaacgggcgccaccgccaccgcggggaagttcggagccgtcgatggtaattacatatttttcgtaagcacccggattgactttgccgtcgatgaagtcattggcccggatgatttcgaatcctgcatgattcatggcttccatcgtgtaattgttgcgggcgtatcccaggacctgaccaggaccgacggcgaagaaattggctccgctatgccattgttcgcgttcctgattccagtcgtcgctaccaccacaaagtacgggctccagatccatacccagttttttcagggcagagagtaagttcttttcactgcggatactctggagttttccattctggatcttgatgtggacggtttgatagcttcccggattcagaatcagcggttcgaaagccatacatttatcctgatctaataaggtaaataccatatccagatggatgaaggattccggtgtatgaggcagttgctgcacaataatatgttgtgctttttcacttttccggcgaataaactcgtcgatcagcatatcgatcgcctgggtgctggtacgggcgccgtttccgataactaaaatatcgtcgcgggcaatcaaaacgtcaccaccttctatggtacgtactctttgagtactaccggaaatgggaggaatagtcagcgtttgagttttaaattcgggtgtaaaatcgaaaatagactgcatgatcaccgattcccggtcacgaatggaattggccatacgaccgatcaacacttcgttgtacatactcatagaagcatcacgggtgaaaaagaaattgtgcatgggacgtaatgcaaaccagtctttactcaaaaacttcgtcagattgtccttgaccatttctactccttcgatcaataggcgggaaagattttctgcattttcttccagtaattgttctttcaggctgcctttcggagatttttcaccgataaacggttcgatccgctcgatccggtcgagcacttcctgtttgatcttatcgtctttcagaatattacacaacaggtctttgacttcataagtcttcgtcagtttggataaaactcccgaaatttgtttgtattctttccgggcaatcgaaagattgataatatcactgtataaagctctttcagcattttcgggggtcatgttttctacttcttcgccgggagtatggatgatgactccgtttaatttcccgatttctgactgaacgtttacttcaacgattggattcatatgattataatttattttttgcagttatatgaaactactctgtcccttatctgtttcagatacatgacattcggaaccgagggtttcatagattaaaagtttgtattccgttgttttctactttaagtatcgttacaaaaatagcacataaatgattagtaaccttatatttacaggttataattatgcaaaaggcaaaaataattatgcagagaaaaggactatccgagtccggttaaaatcaggcggccggtgatcagataaatgttcagaccgatgatatcgttggtcagagtaataaacggacctgtcgctaaggccggatcgattttcatccggtttaataaaagcgggaaggccgtaccgaaaatagatgcgaagaggataacgacaaaaagcgatagcgttaccgtgatgggcatggccagagtttgcatcccgaaacacaaagtcagcaagaatatgatagaggaacaaatcgtggcattgatcagagctcctccgatttcttttacgatattctgaaagccatgtttcaggctcaatgaattggaagccaagccttttacgacgatggcagacgactgtataccgacattccctcccatggcagtgatgaccggaataaacatcgctgtaaccggaaataaagcgatttccgcctcgtagcgggaaatcatccaggccgataccattcctccgaacagggcgatgatcagccaggggagccgggctttggtctgtgcccagatgctatccgaagattctacatcctgcgagataccggacatcatctggtaatccttgtctgcctcttcacggataaagtcgactacgtcgtcgatggtgattcgtccgactaagcggcctacctgatcgattaccgggatggcgaccaggtcgtatttttgcataatcaaagccactgattccgcgggttcgtcggttttgaccgagataatgtcaggatagtaaagattactgatttttgccgaggtaggggcggtaatgatttttttcagggataaacgtccttttagcttgttgtcgtcgtcgactacatatatattgtatatttcatccagattttcagcttgacggctgacttcccgcagacaggtcaggacggtccagttttcatttaccatcaccagctctttggccattaaccctccggccgtatcctcgtcataatgcaataaatcgacaatatctcctgcctgttcgaggtcctccatatgcgacaacacttcgtgttgctgttcgttaggcatgctcgctaccagatcggcggcatcatccgagtccatattgtcgataaagcgacgggcgatagtttctgccggaaaagattcgataaaatgtactctttcctcttcgtcgatttctgccagtacgtctcctgctttttcgttatccagcaacaagaatacgaattgtgccctttcattattcagctcctccaggatttctgctatatctgcggggtgaagcccggcaatttgtttgctgacctcggtcttgttgccggcatcgatcagttcttccaactgactcagaaattcgtgggttaattcaaattgttgcatcctgaaaattttagatcgtcgttttatgctttatcgccaatgttcctgtttttctcgatatcctggcagagctggaggaagtcggtaataccgagctgttcaggccgtaaattcagatagggagagtcgaatcccggaggaatgatcccgcggattgaattcctgagtgtcttccggcgttgattgaaccctgtttttacgacattgaagaatagtttctcttcacatcccagttccacgcgttcgttccgggtcaaccggatgactgccgatttgactttaggaggcggatcgaaaaccttctcccctacggtgaatagatattcgatgtgatagaatgcttgaagaaagacacttaaaataccatatgttttgctacccggagaggctgcaatccgttcggccacttctttttgtatcatacagaccacctgacggaccaaatgccggttttcaatgatccggaagaaaatttgcgatgagatattgtaaggtagattgccgatcacagagaaaggttcctgataatattggcggatatctgttttcagaaaatctccgtatagaatccggtcctgatattccggtaattcctgatgcagataatcgatcgattcctgatcgatatcgatggcccggaccgaaaatgccggattggcgaaaagatggcgggtaagtacacccatccccggaccgatttccagtatatcccgggtgacaggaagtaaactatccgtaattttccgtgcaatattctggtcacgcagaaaatgctgtcccagactttttttagctctgacaatactcatgttacaaaagtatacaatttcggcggaaaacggtttgggcatgggcatatttttgtacatttgcaaacaattttataaaccgattttcgtatgcaccctcttgtaaaaaatacgataaaattttttttatttctggccgtatcggcctttttattctggttggtctaccgggatcagaattgggatgaattgctgacagtgcttaaagaagatgtgaattatttctggatcggagtagcttgtgttatggggattgccagtcacgtcagccgggccctgcggtggcagttgctgaccgcatctatggggtataggatttctttcgggaatagttttatgggggtgatgatcggatatttcgccaatttggctatcccgcggatgggcgagtttacccgttgtggggtagtcagtaaatatgaggaagttcctttttctaaattattgggtacggttgtgaccgaacgggtaatcgatatgatgattttattgttcctgaccttgattgtcgtcattacccagtttaaacaagtcggtatttttttagataataatcaggagattgaagagaaggtggtgaatatgttccattcttcatggatgttgttggtgttggttgttttggcggctgtcggttggttgttttggcggttgatccgtaaaactcgttttaaagaacggattcattctttttttaaaggactgaaagaagggttgcttagtgtgaaagatgtgcgacacaaaggattgttcgttttttattccttatttatctggttgatgtatttcctgatgttttatgtctgcttcttctgttttcagtttacttcgcatttgggggcactggtcgggttgactattttcgttctttcgagttatggtatggtggctcctgtacagggaggtatcggggcctggcattttatggttatagcagctttgatgatttatttgccgcataccccgaatatcgaaagcatggccaaaacttttgctctattgacccacggtacaatgacgttgttatatatcgtggtcggtgtgatttgtgtaatcttgctgccgctttataataatgccgcaggaaaacagggaaaggatcggaggtaagttaattattttgactatgggcacagtgaatttgatatatgattattttccggaactgacggaggagcaacgggaacgttttgctcgtctggaaggtttgtatcgggaatggaatgaaaagataaacgtgatttcccgcaaagatatggatgagttttgggtacatcatgtgttgcattcactggcgatcgcaaagatcatccgttttgctcccgggactcgggtgatggatgtcggtacaggaggaggattcccggggattcctttggctattttgtttcctgaggtaaatttctatctgatcgattccatcggcaaaaagataaaagtcgtggaagggattcgggatgctttggggttacagcatgtcaggaccgagcagatccgcgtggaaaatgttgcggaacaacaggattttattgtcagccgggctgtgacagcttttcctgcctttgtcaaactgattcggggaaagatccggaaggactcggcccattccctggacaatggagtgatctatttaaaaggaggagattttgaggaagaaattgcacctttccgttctaaagtgaaaatctattccattcctgactttttttcggaagatttttttgaaaccaagaaaatcatctatttgaagaattagttctttcaatatttttttatttttgccgtactatatgaggtgtaaagatgaacaggaaatattgaccttgattagttgcggtaatccggatggactaaaaagcctttttgatctttattataagcctctttgtatttttgctatgaactttctggattctttcggtgagtcggaagatatcgtccaggacttgtttgtgaagttttgggaaaaatataaagataaacagttcgagggatcgttgagggcttatttttttactgctgtccggcataattgcgcgaaggtgttaaaattgaagaaccgctataatttacagttggaagaggaatatatcgacgagccggtgtattccgaagaggagtttgagggagagtgccggaaattatatgccgaaatagcccgtcttcccgaacaatgccggaaagtgttcgagctgatcgtattaaaagatatgaaatacaaagaagtggctgactttctcggtttatctgtgaataccgtaaagactcatttggcccgtgcattgaaacaattgcgcagttctcttcaaattctgcttgttttcttacttcggaaatagcgatcggggtatcgctgaaaagccttgggggacaggttatccgtaaattgccttttcgggtaaattattttttcgaaaaaaaatttcatttcattcacccattttaatctttttgagctttaggtaatagaaacgttttctaaataaatcgtctgtgcgcaggataaatttaaaatcgaaagcaatgaatgaagaggaattagtctcttatgtggttcgctattgtaaacatgaattatcggaagaagaataccggtttttacaacggtggttggaggaaaaacaggaaaatcggcaaactttccgggaatgggtgagaacttatagacaagggcgtaaggtggggtgttgggatgggattcaggaggagcaggcctgggagcaaatatcctgccgtctctctgcctcgccccggaagagacgtcgcttatggaaggaatggtggaaacaagttgcaatactgatccttttattgggtagcggattattgtattattcgttgcaacagttacaggaaagtcgggagaccgctttgtctcagatcgttccgggtagccgaaaggcggtgttgcgtttgtcggatgggcgggaagttacactggaaaaagagactacctgcgtattgaccgaggaagacggtacccggatttcagtcggagggcaggagcatatcgtttatcaggctgtaagccaggaacaggaaaaattggcttataatacaattaccgtgccccggggcggggaatattccctggtattgtcggacggtacacgggtgtggctgaatgcggaaaccgaactgacttatcccacggtttttggcaagggagagagaaaattgatgctgaaaggggaagcttgtttcgaagtagtaacagatacagcccgtccttttattgtcgagagtttctacaatcgcgtcgaggtgttgggtacgcgctttaatgtttctgcttataccggtaaaagtgcggtgaaaactactttgttgaggggaaaggtcaaagtgtcgaatagaaaaggacagttggtcttgtcaccgggcgaacaagccgtttgcctggaagaagaaatagaaaaatgtgaagtcgatgcccgggctgtggctgcctgggtagacggaacttttgaatttgaaaacatgtctttaggcgaaatcaccgatcaattgggacgttggtacgatgtagactttgtatttgccgatcagcagttgaaagcaatcacttttacgggagctgctacccgttatcgtgaattggattttgtgttgcggatgctggaagaattggctcgggtacggttccagttagaaaataaaacgatccgggtttcgaaaatttgaatctactaaactacaaaattatgaaaaaaagaagaaaaaatccatccggcatacgactgattgtcaggttgtgctgttttttcgtatttgtatcgagcttgcatactcaggcaaccgtgtgggctcaggggaaagtgaccgtagagctgcagaataaaacactcggagaggtgttgaaagtattgaaagaacaaacaggcgtgcactttatgtataatactcaggaggtgaatgtcgggacgaaagtctctgtatccctgaacgaagcccggttagaggaggccttacaatcgatctttcaggggttaccttatcgttacaatcaggtcgaggactatattttaattactccgaaaaaagaatcggaaacccagcagaccgatatgcggacagtgaaaggaaaagtagtggattctaaaggagaaccgctacccggagtatctgtggtggtaaaaaatacaacagccggagtagcaacggatatagagggaaaattcgagatccgtttgaattcgggagaagagatcttagtgttttcttttgtgggaatgcgtacacaggaagtgaaagcgaataaagataacctctatgtcgtgatggagagtgtggccgaattgatgcaggaagtgatcgtgaagaccggttaccagaatatcgagaaacgtaagctttcttcttccgtctttactatcgatggtgatttggtgcgggaaggagctgctttggggttggataatatgttgcagggaaaaattccgggaatgaatgttatgggatcttcctcgactcccggagctgcaacgaaaatcagaatccgcggatcttcgacgatttcaggtaaccgcgaacccttgtgggtagtcgatggatttattctggaagatcccgtacagatcagtgccgaagaattgaatagcctcgataacgtaaacctcatcggaaatgcgatttcttcgctgaatccacaggatatcgaacggatagacgttttgaaagatgcttcggctaccgctatttatggggtaaaagctgccaatggagttatcgtcattaccactaagaaaggaaaaatcgggaagccccgggtgaggtattcaatgaatttatcggtcaatgaacgaccggaatacgacgggctctaccggatgaattcgaaggaccggatcgaggtatccaaggaaatcgaacagaggggattgtcgttcggtactcctccggccagggtttcttatgaaggtgctttgctggacctgtacgaccggaccattacttatgaagagtttcagaagaaagtgaaaagactggaagaagtgaataccgattggttcgatatcatttaccggacctctttttcacaaaaacataatgtttctatttcaggtgctaacgataaggtaaattattatttttcaggtggtttacagcatatccccgctacggtgagaggtaccggtgtaaaacagttcaacggcctgatgaaactgggagtgaatctgctttccaatctgaaaatggagttgcagatgagagcgtcgaccgacgataaggattacctgcattcttctttgtctccttatcagtatgcctataatacttcccgtgcgataccctgttataatgaggacggtacgttggcttattacaacaagacgcagggctatgaattcccgctacaatacaatgtggtgaacgaaatgcaacatacggggatgaatatcgaggggacgacgttgaatttcaatgctaatttactatgggagattattcctggattaagattaaccggcgccttgagttataatcggtcgaataccgatcaaaaagaatggttcgacgaacaatcttacgcggctgctcagctcagaaattataattacggactggaattgcccgatagtgacatttggcgtgaacagcaatgtaagttgccttacgggggagaactggtgaatacggatacccggaatacttcttatactgcaagggcacaagtggattattcttttcaatttctggaagatcatcagatcacggtggttgccggtacggaggcacgttcgtctaaatacaaaggattgaaatcgacggaatacggttatttgcccgaccggggagaaaaatttgtagagatcgacccggtgcagtggccgaaatatggtgatctggtgaaaagtcatccgaatgtgatcaccaataccctgaccaatgtgatgtcatggtatggaacattcacttacgactatatgaaccgctatatcgtcaatttcaatatccgggccgacggttccaataagttcggacaggataagagtaaccgttttttaccgatctggtcggtctcgggccgatggaatctgcacgaagaagccttcctgaaagaagtgatgtggatgaatatgtttgctttccggggatcatacggtattcaggggaatgtctcacccgatcagacaccgaatttgttgatccagctgggatccttcgatccgatttcgaaacagtatatttcaaagttatcgaagctgcccaatccgcaattgcgctgggaaaagacgacttcgtggaacttcggggtggatttcgctttcctcgataaccgattgaacggtagtgtagaagtataccggaagaaagggaaagatcagatcatttccaaagaagtggcttcgacgaccgggagtacgactatgcagctgaatgccggaaacctggaaaataaagggtatgaaatcgtgttgaatgtagtgccggtgaaaacgaaagatattacctgggcactgaatatcaatggggcccggaatatcaataaggtaacgaaatccgggattacgacggattacggatacaaggaatatctcgatggatcggctgttattccgggagaagccctgaatactttttattcttataaatatgatcggttggatgctaacggcttgcctacttttaaagatatcgaagaaaccgacggtatcacccaaacggagatgtttgccaaggttttcgcctattcgggtacccgtataccggatattaccggtgggttcggtacggatatctcgtataagaatttagctatcggaggatttttttcttatagtttggggactaagatccggctgaacaacttgtataatgattccggacagcggcttccgcagcctcagcaaaatatgaatcaggcgtttgtgaaccggtggaaacaacccggtgatgaaaaccgtacggatattccggtattgacgaccgatccgctggatatgtacggattggggatcgaccggaaaatcaagattgccgataatggctgggagatgtacaataagagtgatctacgggtggcttcagggaattatctgcgcttaaaaaacttgtatgtgcggtataatttcagcgatagaatctgtcataagatccgggcccaaatgatcagtgtgcgcttcgaggcgactaacctctggttactggccgataaaaaattgaaaggacaggatccggaacaggtgactttgggaggagtttctacacctccgacttcttcatatactttgggattagatatcactttttaaatagcagactatgaaacgatatataagattattaggggtattactgatattgttttcctcttgctctgattttttggaagagaaatcacaggatttgattattccgaagtcggtcaaagattaccgggagttccttttcggtgaggcctatatccgggatgaaacccagatacatacttacctggacatcatgacggacgatgtgaaagaaaatatcaagggtagttttctggggggagatacccgggccagcggttatggctactatacctggcaggccgatccggagcagacggtttccggagcgatcagtgaagataaggcttgggagacatattatcattctatcctgatctgtaacattacgctggataatatcggggatatcagcggatcgaaggccgagaaagaagacttgaaggcagaagcttatgctttgcgggcttattgttattttatgctggtgaatttgtatggacaaccttataatcaggcgacggccgaaacggatctcggagttccggtcaacgatgtggtagggatggaagaccggaagtttgtccgggagagtgtggctgaaatctatcggcagatagaaagcgatctgaaagaagcgattacttgtttcaaagcctccaacctgacgaagacctgtttccgctggaacctgccggctacgtatttgttggcttcccgggtgagcttgtataagaaagagtatgataaagccatcgaatatgcgacgtatgtgatcgctgcacaacctcagctctatgatttgtcggcaatgagcgacgatgattattttctgaatgaaaagaatcctgagatattgtttacttatggctattatctggtgagttattatgcctggctggccaaatgtaatttcccgatttccgacgatcttcaggcattatacggggataacgactggagattgacgcatttcttctataaacggagagctgtttatacggcccgaaaatcggaaacttcgggaactaccggcatatacggatatgctttccggacagcggaagcctacctgaaccgggcagaggcttatgccgggaaaggagataaagacaaagctttacaggatctgaaaaccattcgggaaaaacgcctgaaagtgtacgaagaggtacaagcggtgactaaagaagacgtcatccggagggtaagggaagaaagacggcgggaactcagcttcgaatttcatcgctggttcgacctgaggcgttgggaccggccccggatagagcatacctttacacccgatatcaagcaacccgatgtcgttgaaaaatatgtactcgaaaaagacgatccggcctataccttgcctttaccccggtcggtagtggaatatgatccgacactggtcgacaatccccgtccacaacgggagaatcagaatgttaccggagaaaattgatcatatgagtctcgacaatgaaacctttaacttaaaacgataattgttatgaaaactagatggttgatatatattctgttaggtgttttcctgagttcctgttataaagaggagaatatcgagggagaagaagacgagcccaagtacaaggtggaagatagtgaagaccccctggatcactttatttatgggttttatcatgactacggtgtatttattttatatgattatgaggaagtcgattatcgatggaatatgagtaccgtattggatgtggaattgataaaacaaacggataaggttactttgaacgaaggtttggcctatttggacaacgttttgttccaatattataccgatgattttaaaaaacattatttccccttcaagattttactggccgattcagtgcaagtgcttaaaaatggtgtatggtacccggatgaaccggcgacagcaggcttgagttttctgggaatcggtcgaatccgtaacgggataggtgagattccggccgatagcctgcttgaattgagaggaaaggtacaggctgctttctgggcgaattttttatacaataatgaaatgatggatcttcccgaagctttctggaatatcggcgaggattattacgggggaaatctgaagttggtggatgggaatagcgggctcaaacccgatgagatcgatatgaagaaatatggattctgggaccgtgaccggacggccgataatgggaccaactactgtatggctcctaacaaaacgctggatatcaatcaatttatcgatatggttacgacccatacaaccgcggaaatggaggcattgatcgctccgtacgatcggctgaaagataaataccatttattggtaaatcaactgaaagaagtgtatggagtggatattcaggcaataggaaatgatcaatattaataaaacgagaagtatgaaaaacagatttttttatttcgtgattcttttattggctgtatgtttatcggccaatgccaatgattttaagaagaaacgtaaaaagcaagagacgactccggctttggccgacgccttgaagaaagaaaaaacggaggacaaaagctatgataaggtgattactaaagaagcccgcacgaagaagggactgatcaccttacatatggtgaaaagtacattctatatggaaataccggtgaagttgatgggaaaaccgatgttgttcgccggtagggtggcggagatcagcgacaataaggatgtggtggccggacagatgcctcaggatccgatgctggtggaatggagctgcgatgaggaaaaagtctatctccataatgtgatcagtagatcggtatgtgatgaaaacgaaccgattgcaatatctatggaacggaacaatctgaaaccggtcatccgggcttttccgatcaaagcattcagtaaagattcgagtgcgatggtgatcgatgccactaaattgttttgtgccgacgaacggccggtaagtccttttattcctgcctctcccttcgatgctttgttcggtatgaaaaagatgaaaggggtttttaaggccgatctgtcgtcgatcctcgatttcaaggctttcccgcagaatatttctgtaaaaagccgggtggcctatacggtcaacggtactccttttacggctatcgtccatttgtcgatgatacagctgccggatgagccgatgcggcctcgtttactcgatccccggatggggtatttctccgatcggaaagtgttgtattccaccgaaaaagatcagagcgagaagatcgcttatgtcaatcgctggcgtttggaacctaaacccgaagaactggaacggtataaaaaaggggaattggtagagccggctaaaccgattgttttttatgtggataacgccctgccggctaaatggaaaaaatatatcaaattgggtatcgaggactggcaacctgctttcgaagcgatcggtttcaaaaacgctatcgttgcccgtgatttcccgaccgatgatcccgatttcgatcccgacgatatccgttattcctgtttccgctatgcgacgacgacggtggccaatgcgatgggaccgtcctggaccgatccccgttcaggtgaaattattcaggcatcggtgtatatgtatcacgatgtgttgaaattgttgcacaactggaagtttgttcagacagctcaggtcgatccgaaagcccgggctgccgttttcgacgaagaaacgatgggagcgagcctgcgctatgtcgcctcacacgaaatcggacatacgctgggattgatgcataatatgagggcttcttattcgataccggtggattcgctccgttcccccgcttttactgcaaaatacggaacgacgacttctatcatggattacgcccggaataattatgtggcacagcctgaagataaaaatgtacgcttgattccgcccctgttgggtgtgtacgatatctttatgatcaaattgggatatgctccgatttacgatgccgaaacaccggccgacgaatatgctactctgaataaatggattcaggaaaaagcgggcgacccgatgtatacctatggtgaacagcaaatcctgggaaccctggatcccgcttcccagtcggaatcgctcggggacgatgcggtgaaagccagccggtatgggattaagaacctgcggtatatcatggaccatctggtggaatggagtgcaattgaaaatcggccttatgatcagaccagtgagttatattacgaactgaccaaacaataccaaaggtatatgggacattgtatggcctacatcggagggctgtatctcaaccatccggtagccggagatgagcagaaaggatttgtacccgtgtccagggagaaacagaaagaggtcgtgaaatttttcttcgacgaatttaaagaacaacccaaatggatggcgaagaaagaaattatgacccttttcgaaccgaataatgatatggtcgctaatttgcaggcaaatctgcttcgtaatctattgaacagttctacactcggaaaagtgggcatgaatgccaaatattccgagcggccttatacccagaaggaatacctgaacgatttgtatcagggggtatggaataagaccgaacaagggaaagccttggattattacgaccgtaacctgcaatacgcttatgtgcaatatttgttaaaagaactggaactcacgaaggatgcggagaagtcgaaagggctctctttggaattattgactgaagaccatttgccgtgttatggctacgagtatcaccggcatgcccggcaaatgtctgccaataccaaaatatcggatttggggatcagttctaaaactttgtattacgggcaattggtaaaactgaaagagctactgaagaatagacgccattctgcttcgggagacgacaaagtgcattatgattatttgtacttcgaattgaatagtgtcctaaaatagggattccgggacggacctttcgtcctattttcgggacgaaaggtctgtcccggaatcccaaaacctatcttttttcagataattcaaaataattaccggattatcgttttcgttcaattgttcattaagtcgtttgagtgggtcttgaacaatctgtccctgattctcaaggtattcacaccttgctttgattagcatgacttcccaccattcgacacatatatcctgagacattcctctaacaataagcatggggacgatattcgggtcaacggaattgatttcggcaaaaatgccctgccggctattcttattccaaaacagataataattttttccacctatcgcattttcaacaatcagattattctcactttccataatgtttacaggcaccacatatttgcgtcttatccactcctcctgtaattgtgtattatttttagttttccggttcgccaaataattctcgggaatttcctgtttcggtatgtaaattgtataaagaatagagtatatctgaaaaccgggaaatacgatgagccagaaataacaaagtgtcatttagcggatagatattttgaatcccggagtccacttcctttccgtcagaagaggggatcagaacggccggccggatatttatcttcgataaagccggtacctggagtcagaaatacaacctggtatgggatgaattactgggattgaatatctttccgaaagaagtcgctcagaaagagatcgcttattatctcaccaaacagaatctttatggattacctttggattctcgccgtacgtatacgaaatccgattggatcatgtggacggctacgatggcaccggatgtcgtgacgatgcagaaatttatcgctccggtgtataaatatgccaacgaaacaggcagccgtgtgcctatcagcgattggcacgaaacacccgatgctaaacaggtcggatttcaggctcgttccgttgtcggggggtattttatgccgatgttgaaaaaggagctgatgaaataaagaactttttgtgttatcctaatttgagaaaaggttcctggagattagtgcaattttccgggacctttttctgtttataccgacatctgctagtaatcgtacgaacgatgtatcggtagccaggtatagatttccaattacccgtaaattaaggaagaatgtgtgataaaacttttgttatccggggaatgaggctgaaatagaagttggtttaaatcggtttataaagtttctggtctctgtcgctatcctcttgacgaaacctccggttccggtcattcgtttcaacagctgtaaaaaagttccagcaaggttcaaagacttaataagctttttatatactaattacactaggttgtgtaaatcattttgagagaatcagaaattttgtaattgaattttatattatttattgttaataggaatatttctattaaatttgcaactgttgtatagttgtaggctgagggtgtttattccatcagttcggagggaagcgttttttctaagtcggcaaaaagattacttgaaaaatgattaaaacgtgccgttttaatttagttttttaagtttataaagttgtgcttcggcacttaaagttcatcgactccggtatagtatctttcgggattttgttcgggatgacatcgctggggattgttgaaaagtgtcgtaggggctatgaactttatagattttataaactaaattttccggtacgataaatttaaattcttttggaggtatgacaatgtcgtttaccggggtaaacggcatcataagttatctcaggagaatattcaggaacactcagatggaagttttaaatttagtactggtctatttgcagaatcttatgcatgccgatgtgactattcataaagaggaaacagatcaggtttggtttaatgaagcccggagtataagtgactttaacagtcatttgatgatcggggagattatgtgcacttcgtttttagcggattgggtcgaacgggccggtaaagatccggtgttgatgaaagtgattatggaacgctttaaccagtttaatcaattgtatcgttatgacgacaattttggctggacccatcggtatctgacaatccgcgagcagggagccctgcttgccctgaacgatttgcctgcagttacccgggaaacgatcgcccgttatctgattttacagcatacctccctggaacgtcagcaaaaattgttttattgtcgcgaatcgtttctgaaacaggagtataaattgagattgactccgacagaattgttggaactttcgttgtctttgctggcttccggaaaattggaaggtgatagtaaaagtgtcacacaaatcggtacggtgcgttttttggccgattgtctgggactcgatttcccggctaattatgattcgctgatgtatcaattgaaggagagagaacagctgactaaatttatggacgaattacgccaaagcctgatcgcttatctgcgaaagaaaaatggttgattgtaagcttttgagaatgaataggggggatataggggaaaattatgtggccgtacactatgataacgattatacttgtcgtatatttttgtattattattacagtagtagaatgacgactgtaattgcaattcaaagtctgaggaatatggccggaataaaacgacaaaagcaaaattcaacaataacagagatacagattgtctatcgttatagggggaaatgcagggaaacagattgggaggaaaaggtgttgaagtggttacttataattgccttgctatggttattcgattgattattaaaatcctgcgggtaggttttagcctgacccgcaggattcgaagtttatttttccagctctttccagactaaagcagcagctccgtaaatggcgacattcttagtcagtttagaaggtaagattttgactttattgctataaatcttcaaaagattcatttccatatgatcttttaccggttcgaaaagcaggtcgccggctttggccaggcctcccatcaggaagatggcttctgggctggtgatggcaacggcgttggccaaagcttcacccagcatttttccggtatatttgaaagtattgatagcgatcatatcgcctttttgtgcagcttcgcttacgattttcgcattcatttcattgaaagggatggatctcaattcgctcggatagttatatttagccatcattttataagcggtgcgttttactcccgtggcagatacataggtctccagacaaccgctacgtccgcaaccacattggcggccgttgggagaaacgatggtatgaccgagttctccggcaaagccgtcgtgtccgtaaaccaattcgccgttgactacgaatccactacccagaccggtacctaaagtgaccatgatgaaatttttcatcccttgggcaccgccgtaaatcatttcaccgatagctgcagctttggcgtcgttgttcagataaaccggcagttcgggatagtattctttcatcatatcgcacaaaggaatgacatcgtgccagggcaggttcggtgcaaattcgatcgctcctttgaagtaattaccattgggtgctccgattccgattcctacaaagttgacttcctggcggataggatccagtactttttcgatttccagatataattctttcagataatcgttgatatcttcatgtttagctgtcgggatgttcccttctgtaaggtagttcccttctctgtcgataaaaccaaaagcggtgttggtaccaccgatgtcaatccctaaagcgacgtcttttttcatgatcttgtgatttaattagtagtgcaaatatagccctaatatttaaaaatcaattctcctccccggacaatttcggcattttcgagctggaaattgtcgattcgtaacccgttcggttctattttccggataagaacctctatggaatgccggctttcgactttgagagtgaaagtttttccctctgtcggtttgctccggatctacctgaccgttgtatccggaagtgccgatgaacagattgaccggaatatcctgccggacatgggctgaagactgtaaaaaaggattgcaacgatagaaaatcaactgattttcatgtccgtgttactatttctgacgatttatttccggcattgtttttagcattattcaaaaattctttcgggggaactccgaattgttctttaaaacatttcgtgaaataagaagaagaactgaacccgaccaattcgtagatttcgttgatccggtattcttgttgtaaaagcaattcggcagccatcttcaaacggattgtcttcaggtagtcgttgggcgacatacctgaaattcctttgattttccgatagaaattcgaacggctcatacacatgatttctgccagtgtgtcgatagagaaagtaggttcctgcaggttcttttgaatttcagcatccagacgttcgataaattctttgtctttgggcgaaatagccatcgtttcggctgtaaccgtccatctccggcatcatgatatcgctgactaccagatcgacgtttgtttcctttagaatggcgagtgcctctttcccgttccgggccatcaggatgcggtaatatttattcaattgttcggctgtcaggctcagcaattcggtgttgtcttctgttaaaagaatactatagctgcctttcccttcaagagtctggagttctttgcccgtatcgcttaccggagaggtcagcagttccagttttacctgatcgtcttcttgggtattttcttgcaacagaggaatatggataataaatgtagttttctgtgtctgttcgtccaggtaaagcctgccgccatgtttttctgccagcaatttggctaagggcaggccgataccggttccgccccggctgttgtccgtttgatagaagatttcaaaaattcttttcctgtccgaacggggaatgcccggaccgttgtcggatacccggatctcgaaatattcctgctcggtttgtaatgtcacttcgatcttatcgtgggcatatttcagggcattgctcaagagattgctgatgatctttgtcagtgcttcttcatccgcacagccgatataaggagttacgggcaattggacatccagggcgatattttttaactgggctgccggggcaaaacgacttactatgttgtgaagtaattcgtttaaattgtattttctcagtttgagtttgaattcatttgtctctgttttcctgaaatccagcagttggttgatcaggttgagtaaaaggtccgtgttttgattcatggtagtgaggtatttcctcgtctcttcattgccgtcgccggattggataatactttccagaggcattttgatcaaacttaacggagtacggatttcatgggctacttgagtgaaaaagtttattttggtttgataggtttctttttcctgttgttgcctgtattgtttcagtaattcttcgtgttgcctcttcacccgcttggaccaggacctgaaagtcataatccccaggaacaagattaaaatggtataaaacagataagcccagctgcttttccagaaagggggaagaatctgtaagctgatcgaggaaccttcggtattccataagccgtcgttgttcgaacctttcacccgaaaaacataatctcccggttggaggttggtgtatgaagcttcatttttaccatcggtatagatccattctttatcgactccttccagcatataggcatattcattcttgtccggagcctgataactgagggaagcaaaagtaaaactgaaggtattctgatcgtagggcagcgtaatcgcagaagtttgagtaatggatcgggataaaggagagtcaggagtatcgggccctatttcctgattgaaaaggctgaaccgggtgatgactacttccggaatataagtattttcccggaaatcttcgggatagaaacagttgaatccgttgattccgccgaaatagagcttgtcgtcgtgagcatgcagggaagaatggaaattgaactggttactttgcaacccgtcggcttgcgtatatagtttccatttccgggtctgaggattgatcgataataatccggcatttccggctatccataaatttccggctttatcttcttcgatggcataaaccaccggattaggcaatacctggttttccggatcgaaagaagcaaaagtttcggtatcgtaatcgaatgtacacaaaccggctccttctgtcccgaaccagatattctgccggctgtcttcgaaaatggtgatgatactgttactggttacagatcctttttggtcggggttatagttgtaatgtgtccagctcttatccgggtaatgatagcggaaaaggccggtattataagtcgcaatccacagattgtttctgctgtcttccaggatgtcgtagatgtgggaagtggttccgacatcggtgatgagtgaaaaatccccggtggatgaattgtaacggtttaatccccaggctgttccgatcaggatagtaccttcccggtctttgtatatggagtaaatactgttgtcactgatggttcggatatctccgcgcgtatgctgatgattgacgacccgtccggtggtaagatccaggatgtccaggcctcttgaaaaagtgcctatccataatttcgggccgtcgaggaataaagcatggatattgtgatagctgatactggctccccgggctcccggcagatagctcttaatctggtttgttttcgtgttcaaatagttcaaaccaccgtcttctgtagctatccagatatttccctgtgcatcttcacaaaattcactgatggctttaccggagatagatcccgattgataacggggaaaataagattggaaaggtttcaggttacggggcagataattcacccctcccaggttggtggaaatccagataccgccttcccggtctttgaagatattgaaaatagactgatcactcagacttttcggattcgaaggatcgtccattcgtaaaaactggtgggtcgtccggttgaaaaggtacagcccgttgtccgctcctacgagtaattcggtatccgaatacacaagaatactacggatattggtcacattggtcgtgccgaactgagtggggaaagtatgtattcgattacttttcaaatccagcatgttcaggctgttggtgccgagactgaaccataaggtatcgttgtagtaataaagtgcattggtttcgttattttgctccgtagtctggaggtcgggagaaaaggaacgtttatagattccgttaggggcgaaacaaatgattccttcctgccgggtgccgatgtacatatcccctgaaccggaggaggtaatggatttgataaaagaagaatgttgtgtattttgaatcagagtgttggtctggggagtatagataaacaatccctgtccgaaagtagctatccagattgagccgtcgtggctctgctctatatcgtaaacattactactgattaatactccgtcttccgttttattgtcgaaaaattcaaactattcctgctgtgaattgaaaatgtatattccccggtttgtacctacccaaagattttgtctttcatcttcgaaaatggtccggacaatattatttcccaaagaagtactgtctttcgggatgtggcggaaaattttgaagtttttcccgtcgaaacggttcaaaccgtcactggtaccgaaccacataaaaccttgatgatcctgtattgtataccatactgtattgtgagacagtccgttttctacctgatacttgacaaaagaaaattgattgtaagcataagatagtacggaatgtaaaagcacgaaaaacaaactaagtatgattttcataggtacatcttagtggtttaaaactgtttttacaaagtaaacaattgattttggattctgcaagagcaggaaattgttctctatttattctttgatttttagagtcggatatatttagttaatctgttggtatttagtagattatgtattttatacaaacgtgtgcatggtcagattttgtaaaaaaaagaatagagattgctattttcctttaaaaaaaatagattactttgtaatatacaatagctgcaataaaaattagtaaaaagatgaaaagaataaaaaatgtattgattttttttctggctatggtaatgctaggagcttgccgggataaaaagtctgaaaaaaaagaggaggagaatatacagcaagaaaatacatttgtaaatccgctgaaaacggaaggtgctcaatgttgggcgaattattacgatggttggtattattacatgcaggaggcggtcgatcggttggaattgtggcgtacccgggatattacggatttggaacatgcggagcataaagtgatctggataccgaaagatccgtctaatgctcatcatctgtggggacctgaaattcatcccattgcaggcaaatggtatgtgtattatgctgcttccgacgataatatggataatcatcaattattcgtattggagaatagttcggcagatcctttcgaaggtgaattcgagttgaaaggacggatcagtacggataagaataacaattgggcgatccatccgaatgtcttcgaacaccggggagaatggtatatgacctggtccggttggcagtcccgtcgggtgagtaccgaacaccaatgcatttatatcgctaagatgaaaaatccctggaccctggaatccgaccgggttttactttcgaagcccgagttcgaatgggaacgccaatggatcaatccggatggaagtaaaacggcatatacgatttatgtgaacgaatcccctcagttttataaaagccggaaaggggataagattttcatcttttattctgccagtggtacctggacttgtttttatgcggtaggaatgttgatggccgatgccgacagcgatttgctggatccggattcctggacgaaatcaacccgccctgtgtttaaacagtgtccggaaaataaggtatacggaccgggacatgtcagttttatcccttcacctgacgggaaagaggattatcttttatacgacgcccgaagtgtagaaaacgaccctgccggttcccgggattccagaacaccccgtttgcaaaagatcgaatgggataaggacggaataccttatttaggtgtacctctaccgctttctgtccgcttgaataaaccttcgggtttatgagtgaacgtcgggggcgaaatatagaataagtgtagaataattttggaaatcagaaccgtagaggtgtggttgttcagggagacgaatatacaaaatatgttttaaaaaatatagaaagattgtatttctaactttttttttgaatatctttcgccatcgtttgattggtgtattttgaattataatttttacatatggtaacaaggagagattttattaagaaaagcggcttggctatagctgctgcggcgatgagtggttcccctttgaaggctatgatgggaaataacggacagggaagcggtgcttctgcagctgccgacggttatgtatgccaacgtccgaaacccgaagaacgtcgttttacttcaaaggccgttgaagaagtgatcgccggaacgaaaaagaaattgaaagatccgaaactggcctggatgtttgaaaattgtttcccgaatacattggatactactgttaattttaagatgatcgacggtaaacccgatactttcgtgattacaggagatatcgatgccatgtggttgagggattcaggagcacaggtgtggccatatgtagctttgtgtaagaaagatgaacaattacgtctgttgattgcaggagtgattaatcggcagaccaagttaatccagatcgaccgttatgccaacggttttactcatggagcggaatcgagcgaatgggcgaccgaccttaccgagatgaagccgtatgtgcacgaacggaagtgggaaatcgattccctgtgctatccgatccggctggcttatcaatattggaaagtgaccggtgataccagtgttttcgatcaggaatggaaaaaatcgatggcgttggtgctgcaaacgtttaaggaacaacagcggaaagacggacacggaccttataaattccaacggaagaccgaacgacaactggataccttgaataatgacggttggggaaaccctgtcaatccggtgggattgatcgtttcttctttccggccttcggatgatgcaacgactttcggtttccttattccttcgaatatgtttgccgttgcctcattgaaacaattggccgagatttcgaataaggtgtcgggtgacagtacttttgcttcacaatgtatggctttggccgacgaagtgcaggccgctatccataaatatgctatcgtaaaccatccgaaatatgggaaagtatatcccttcgagatcgatggcttcggtaacaactactttatggacgatgccaatgtgcctagtttgctggcgatgccctacctgaaaactatctctgcgaaagatccggtttaccggaatacccgtaaattggtctggagtcaggataatcctttctttttcaaaggaaaagcaggcgaaggaatcggtggccctcatatcggttacgatatgatttggccgatgagtattattatgcgtgcatttactgcggacaatgacggtgaaatacgtcaatgtatccggatgctgagagatacagacggtggtaccggatttatgcacgaatctttccacaaagataatccgactaaattcacccggcattggttcgcctggacgaataccttgttcggggaattgattgtgaacctggtggagaataaaaagatttcactactgaataatctataaaaccaaatacttatccctgtattccggtataggaaatagggggataaaatttgaaactacacttgatttttaacagaatggaacaaaagaacaagtttatttacatcttgcccgtaatgttcggttttttcattatgggattctgtgatttggtggggatttctgtaacttatgcgaaggagcagttccagtggaccgaaacacaagccggctttttgccgtcaatggtatttttgtggttttttatcttgtctgtacctacagccatgttaatgaaccggataggacgaaaaaatacagtattattgagtatgctgttcactttcgccggcatggtattgcctttcattgatttcagtgaaacctcctgttatgttgcgtttgccttattgggaatcggtaataccattctgcaggtatctttgaatccgttattggcgaacgttgtacagggaaaagggttgaccagtagtttgacggcagggcagtttgtaaaagccatttcttcctttgtcggaccgcttttggctggatattgttcggctgctttaggaaactgggcgctgatgttcccgatttatgccgtggttactttgatttcctccgcttggttgttcctgactccgattcagagagagaaggtcgaaggagaaacctcctcttttcctgcaactttaaaattgctgggagataataaaattttattgttattttttggtattttgtgtgtcgttggcttggacgtgggaatgaatacattgactccgaaattgttactcgaacgagttccggggatttctaccgaaagtgcaggatacggtacaagttggtattttgctgcacgtacgataggtactttttgtggtgctttcctgttggccaaattatctgaaagaggctatttccggatcaatatgattattgctatgattgcggtttgtgggttgtggttcgctaccggccaggctgcaattcttactttggtttgtattatcgctttcgcggcttccagtatcttcgccgtggtttattctatggctattcaggcacgtcccgaaaaagcgaacgaaatttccggtttgatgattacgggggttgccggtggtgctatcgctcctccattgatggggatctgtgccgatgctgtcggcggacaaggtggttcagttattattatcgctatttgtactgcttacctgttattctgttcttatggaattaaagtagctaagaaataagttgaatattattgaatggcttttaactaaaagtcctggagaattgaagattcttcaggactttttatttacaggaggagtctgccgctctctattttttcttccggcttctgcctaccacttgaatactgagttcatataggaaatagagaggtatagagaccagtaataaagtgaagacatccgaagttggggtgatgatcgctgctatgaccaggatacccactaaagcatatttccggtattgtttcagcatgggagcggtgatcagtcctaatttagacaaaaaataagcgataatagggatttcaaaagctgctcccagcaataacgagagcatggtaaaactgctgatgtaggaagagatcgatattttattgactacaagttcactgacctgataggttgccaaaaaacggaaagaaagcggaaagatcacgaaataattgagtaagatgccggtaataaataggaaaaaccccggaatcataattttcaggcaggttttacgttcggcttcatgtagggccggactgataaaaccgaacaacaaataaatgatgtaaggagaagcgagcaacaaaccggcataaaacgcagtgctcatatgaatcatgaattgtgaggtcaactggatattgatcagctctacatgaaagtcttctacttgcagggaaggcatggaaaaatcggccgccagtcggttgaaaaaacgatagagaataaaatccgaccgctgtggagccaggacgatatcgaaaagtaattctttattcagaaaagctatacaagccaaaaggataacggctatggcaatacgaaaaaatacctttctgagttcatccaaatgatcccagaaagtcatctctttctcatttgcttcctgcatgcttttaaaagttgagaattactttttatcgttattatcgggattcaaatcattttcaacgccattcatgccgtctttgaaactttttactcctttccccaaacctttcatcaattcaggtattttccggcctccgaaaagtaacaacacaatcaacgcaataaaaagaatttcttgtccacccaaaccaaaaatcaataatctttccattttttaatttatttatcgcacaaatttaatgatttctcccggatttttctaagcttatggttattttagaactatttttgttcattacgaataagagatcgtgattcaattgctatactccatgctaaagtttatgaaataatttttgggagatattgattttatttctatttttgcaatatatttcaattccatccgactctgtgcggatgattatacttacaaatcaataaaatccatagcatcatttctatgtatgacattctggaactaaatgacaaattgctggcagatttgcggcagattgctaaaacgttaaatatcaaaagagtagagtcttataaaaaacaagaactaatctataaaatattggatcagcaggctttagtggctgctcagtctgaacctgttgtagagcctgctgctcccgaagccgctgctccggttgaaaaaagagagaaaaaaccgagaatccgggtagttcgtcccggagtagagaaagtaggtgactctaaaggtggggtacaaaaattcgcccgtcgcgaagagaagaaaaaaggagaagtaaagaaggaagaggtgaaaagcgaagagataaagaacgagaaaccgctgcgtgaagaagtaaaaaaggaaactctaaaacaggaagaacctaaaaaagaagaacgccgccgcgaagatttccggcagaatcaaaataaccgcgaagaaaaatggagcggaggacgtaaagaatttgcccggaagcctcagaataatcccccaaaagagcgggctaatcgttttgtacatgaggatatcatagaaaaagatctggatttcggagatgtgatcgaagaagaattcgataaagaaaattacgattaccaaggtgaacgcgaaaacgatacgatacaaccggaattagtagaagtacaggaaaaccggtatgaggaaaaccgtcaggaacctgcgattggaaatggaaacggaaatactaatccgaaccggatgcggttcgataagcgcgataaatattatgaattcgaaggtattattctgaattcgggtgtattggaaattatgcccgatggatatggctttttgcgttcctcggattacaattaccttaactctcccgatgatatctatgtttcgcaaagccagatcaagttgttcggtttgcaaaccggagataccgtagaaggaacggtacggccgccgaaagaaggagagaagtattttcctttgatcaaggtggaaaaaataaacgggaaaactcccgatgcagtccgggatcgtattcctttcgatcacctgactcctctgtttccgaatgagaaattcaatattaccggtaatggaaaagctaccatttctacccgagttgtagatatgttcgctccgatcggtaaaggacagcgcggtctgatcgtcgctcagcctaaaaccggtaaaaccgtattgctgaaagagattgccaacgcgatcgctgcgaatcaccccgaagtttatctgatcatcctgttgatcgatgaacgtcctgaggaagtaacagacatggcacggagcgtaagagccgaagtcatttcttctactttcgacgaaccggcagaaagacacgtcaaggtggccaatatcgttttggaaaaagccaaaagaatggtggaatgcggacatgatgtggtgatcctgctggattctatcacccgtttggcacgtgcttacaatacggtatcgcccgcttccggtaaagttctttccggtggtgtagatgccaacgctttgcataaaccgaaacgcttcttcggagctgcccggaatattgagggcggtggatcgctgactattttagctacggctttgaccgagaccggctcgaagatggacgatgtgattttcgaagaatttaaaggtaccggtaatatggaattgcaattggatcgtaagctttccaataaacggatttatccggctgtggatattactgcttccagcactcgtcgcgaagatttgttgctcgaggaatataccctcaaccgcatctggattctgagaaactacctgaccgatatgaactctgtggaagcaatgcagtttgtgaaagatcggcttgaaaaaacaaaatcgaacgaggaattcctgatttcgatgaatgataaataagaaattaatttcaatacttttttaaaagtgccgggaggtttttacttccggcacttctattttttgtggaaaaattcttttttactttcagattgtaagtcaaaatatactcttacaataaaatatgctattcttatcgttttttactgctcatttgtatatttgtaataagtctaaatagcactttgttgataaaattgcaatctccagattgcaatatatttatttttcttctatctttgtatggcaaaattgtaagaatgaacagtttagtatcgacacatatagctcttttacaggatcgggtatcttctatccggcggggattgatggaccggatcgatcggaatagccgtctgattgcggtaaaaggaagccgtggagtaggaaaaacgaattttctgctggattacagtaaagaatatcatccgcaggataatacctgtctgtatgtgaatgtcaacaatctgtttatcgttaacgacggattgtttcattttgtagagcatttttataagttaggagggaaagtgttgttgttggatcaggcccataaataccccgagtgggataaagaattgagggcttgttacgatgctttccccgatttgcagattatttttacggcttcatcaatcgtcaggatcaaatcgaatgcctatctgaaagggattgtcgatatgtataatctgagtgggttgtctttccgcgaatttctggaattagaaaccaatcagacttttccggtttattcttttgcagatatggtcgaacggcatgaggaaatcgtcgaggatatcctgaaacatgtacgccctttggcttattttaataattatctggaatacggctattatccgatttatctcgaagagaaatcacacatcgattatttgctgaaaaatatcaatctgacactggaattcgatattccctatgccagccagatcgagttgaaatatttagtgaagttgaaacaattgctgtatatcgctgctaaagataatacctgtaatgtgaatatcagcaagttgagcggactgatcggcgtgtcgagggctactgtgctcaattatctgaattacatgaaaaatgcgcgtttgctgactttattgtatgatacggataatgacgatgattgtgggaaaaagccaaaaaaattgtatatccataatccgaacttgctgaatgcagtctgtctggaggatgtggatacgactgtgttaagaaaatcgttttttctgagtcagttatgtccgatgagccgtattacttataccgaacgtgccgattttttggtagacggtaagtatcggattgcggtttgcggagaaggggaaggacagaaattcgattcctctttggtagttatggaagacatgatcgaacggggcaaagggaatataatgccgctttggttggcggggtttacttattaaggttaaaagctataggctgagggctggaataaatatagagtaataacaagataaattggacaccggaaaaggggttcaatttggaattaaataaatttaattttataacgatggcaaaagagaaaaaatttatcacttgtgatggtaacgctgctgctgcacatatcgcgtatatgttcagtgaggtatcgtgtatctacccgatcactccatcttcaccgatggctgagaacgttgacgaatgggcggctaaaggaagaaagaatatgttcggggaaaccgttcgtgtcattgaaatgcagtctgaaggcggtgctgccggtgctgttcatggttcactgcaagccggtgccctgactactacctataccgcatcacagggattgttgctgatgattccgaatatgtataagattgccggagaattgttgccttgcgtatttcatgtaagtgcgcgtgctttggctgctcatgcattgaatattttcggagatcatgccgatgtatatgctgctcgtcagaccggattcgctatgttggcttcaggttctgtacaggaggtaatggatctgtctgccgtttctcacctgacagctatcaaatcacgggttccgtttgtgaacttcttcgatggtttccgtacttctcacgaaatccagaagatcgaagaattgcagatggaagatatcaaaggattggtggatatggatgctttacaggctttccgcgatcgtgcactgaattctgaaaatccggttacccggggaacagctcagaatcccgatatctatttccagggacgtgaagcttcgaataaattctatgatgccgtaccggatatggtggctgactatatggataagatcagtgcgatcaccggtcgtaaatatcgtccgttcgattactatggagctgccgatgcagaaaatatcatcatcgctatgggatcggttaccgagactatccgtgaggtgatcgactatgagaatgcaaacggtcagaaagtgggtatgattgcagttcacctgtatcgcccgttctctgctaaatattttatggaagctgttccggctacggttaaacggattacagtgttagaccgtaccaaagaaccgggagctaacggtgatcctttgtatctggatgtgagagatatcttctatggtcaggctaatgctccggtgatcgtaggtggacgttacggtatgggatctaaggatgttactccttctcagattattgccgtttacaaaaatatggaacgtaacgaaccgaaaaaccagtttacgatcggtatcgaagatgatgttaccttccgttctctgcctgctgaagcagatgttaaaatgactcctgccggaacttatgaagctaaattttatgggctgggatccgatggtacggtcggggcgaacaaaaattcgatcaaaattatcggtggagctaccaataaatattgtcaggcttattttgcttacgattcaaagaaatcaggcggttttacggcttctcacctgcgtttcggtgattgtccgatccgttctacttatttgattactactcctgatttcgtggcttgtcacgtacctgcatacatccatatgtacgatgtattgaaaggacttcagaaaggtggctctttcctgttgaactctatctgggatgaggaagagactaaaaaacacctgccgaaccatatgaaacgctatctggcagaaaacgagatcaatttttatatcatcaacggaacgaagaccggccaggaattagggttgggcaaccgtacgaataccataatgcagagtgcattcttcaaaattaccaatgttattccttatgaagtggctgtcagcgaaatgaaacacgctatcgacaagtcatacggtaagaaaggtgaggccattgtcaatatgaactatgcagctgttgacgcaggaggtaaagaaggtaacctgataaaggtaactgttcctgccgaatggaagaacctgccggatgacgagatcaaacacgatgaaaaccgtccggaatttatccgcaatatcgtcgatgtgatgaatgcacagaaaggggatgacctgcctgtcagcgcattcaacggttatgaagacggtactttccctgccggaaccgctaaatttgaaaaacgcggaattgctgtaaacgtgcccgaatggcaggtagaaaactgtatccagtgtaaccagtgtgcttatgtttgtcctcatgctgctatccgtccgttcctgatgagcgacgaagagctggctgcagctcctgcaggtactcaggctaaaccggctatcggtaaagaattggccggttataaattccggattcaggtatctccgctcgactgtaccggttgcggtaactgtgccgatgtatgtccggccaagaccaaagctttggtgatgagaccgctggaatctcagatggtggaagaaaaccgctgggaatatatggataaaaaagtaggatacaagaaaatagttgaaccgaataatgtgaaaaattcacagttcactcagccgttgttcgagttctccggtgcttgtgccggttgtggtgaaactccttatatcaaactgatttctcagttgttcggagaacggatgatggtggccaatgctaccggatgttcctctatctatggaggttctgctccttctactccttattgtaccaactatgagagcggacgtggaccggcctgggcgaactcattgttcgaagacaatgctgaattcggattcggtatggccgaaggggctaatcgtctgcgcgaacgggtaaaacggttggctgaagaaaatctgaatagcttctctgccgatactcaggcggctatcaatgcctggatcgaagcttacgaagacggcgacaagaccctggctaccagcgatgcgatggctgctgctttagctaaagaaacagctcctgccgctaaagagctcctgatcctgaaaaactactttacgaagaaatcacagtggattttcggaggtgacggatgggcttatgatatcggttacggtggtgtcgaccatgtcttggccagcggtaaagatgtaaatattctggtggtagataccgaggtttattccaataccggaggtcagtcgtctaaatctactcctgcaggtgctgttgctaaatttgctgccagcggtaaacgggtgcgtaaaaaagacctgggtatgatggcgatgtcttatggttatgtatatgtggcacaggtggccatgggtgccaaccaggctcagtatatgaaggcgatcaaggaagcagaggcttatcccggaccttctttgatcatcgcttatgctccttgtatcaatcatggtctgaaagccagcatggggaaatcacaacaggaagagaagaaagctgtagaatgtggttactggcagttgtaccgctacaatccgatgcttgaaatagaagggaagaacccgttccagttagattctaaagaacccgactatacaaaattccgtgaattcctgatgggagaggtgcgtttcaactccctgatgaaagctactccggaagaagcagaacggttgttccaggcaacggaaaacgatgcgaaatggaaactgaacggctacaaacgtttggctgctatggaatacggtaagtaaatccgggcgagcctgtttataagaaagaggtgttggaatcgacaagtcgatttcgacacctttcttttttatttttcattatatatattatatatttgtaatccctctattctgtgtccggccttgtcaaagtgagtatttattttgcggaatggtagggataccatcggttcggcggtggtgaaagatgggatgttcgggttcgaggggcaagtttcagaaccgttttacgggtacatttccattgaaaagaaagacggagagtggggaggtaaagcctttagcctgtttgtcgagaattcggatatccggatcaatggagggaagatttgtttaaagtacgaatcacaggatcacagtcggaagacctgtataatatttatgtaacagatagattccttgtatgaagagcggaatgaattgtatacgagatgtggagcgtatattcgggatatttatacgaaggtgtattttcggaaaaatgtatcgctccggggatcgaagtggaaaaacaaagtcaggttttggaagaaaagctggccgagcgttgtaagttggccaaaggaaggccctgcgtcgacttcaaagtggtggatgtgaacggaaaagaggggatgttttccgattatgtgaagccgggtaagtataatatgctggaagtatgggcattgtggtgtggccattgccgggtggtaattccacactgaacctcgatctgctgctggaaacgctttacggtgaatgatgccggtaaggtatttgtaaggggggtgacgggtttgtcgttccctgtttaattataaattcagaaaatatgagaacgatttgttgtgtattcttgtttttctttttatgtgcgggaggatatgcccggaaaaatactcctgccggacagattttccggacaaagccctgtttacaaagcctgacgggaaatggaattacggtcagctggctgactcatgtaccggtatacagctgggtggaatacggtacggataccctggagctggagaaagcccggacgatgctcgacggacaagtagtctgtaacaattacatccataaaatccgactggaaaatctggaagccggcaagacctattattaccgggtttgttcccgggaaatcctggaatatgcagcgtatagcaaaaccttcggcaatacggctgtttcgccgttttattctttccgggtgcccggcgagcgggaaaccggttttactgctcttgttttcaatgatattcatcaggagtttcagacaatggcagccttgtgcgaacagataaaagggatagactatgattttgtgatcttcaatggcgatatgctcgatgctccgggagatgaagatgaggtcgtgaaggcattctcgttttatcatagcctggtcggagctacggaaaaacctgtcttttatctgcgaggcaatcacgaaatacgcaatgcgtattctcttcacctgagacggttgttgtactatatgggcgagaagacttacggtgctttcaattggggagatacccggttcgttctgctcgattgcggagaagacaaaacggatgagcattgggtgtattacggattgaacgatttcagtggctttagagatgaacagacagaatttttgcggcgggaattgcattcgaaagcctttcggcaggccgggaaaaaagtgttggtgcatcatattccgctttggggaaacgagaccgattacacgccttgccgggaattatggggcgatttgctgaaaaaaaatcctgtcgatgtatcgttgaatgcacatacccacgtctatgcttaccatccggccggcagtctgggtaatccttgccccatagtggtcggtggagggtatgaattggacgaagccaccgtcatgatgttaaccaggaaaggagatatgttgaaattgaaagtgttggatacgaaaggacacattttgcaagaacttgaattgtagacgattacttaaaatggaaaagcttctcgtatttatatgtatttttatgagataaatgaggtaaaagcgacgtgtggtgattcctggataaccgatcaggaggaagctttgtttttatctgtgtatgaatggataatctggatagactaattgagaaattcttttattttttgtaatagagtttgtgcttttatcggttttgataagtaaccgttgaaaccgttttccagaattcttttttcatcttcggtgaaagcataagccgttacggcgataatgggaatatcggccgatgatttacgaatttccgaagtggcttcatacccattcatttcgggcatcttgatatccatcaaaataagctgaggatgatggctttggaaaaacgctacggcttctcgtccgttttgcgcatgaatcaagcgataggtatgctttaaaaggatctcgatcaacagataattactcgcattatcctctgctacaagaattaaaggcctatcgtcaatgacatctcccatatagattttatatcctaagtgcttaaaaagtggtgaaaataatcacaaagtcaaaggtacgattaa

SEQ ID NO: 5940 - DNA, 764 bp, Unknown
  gut microbiota DNA sequence
ccttcaaacaactccttttcctgtacaagaacctttctgatgatggaaagacgcttctggtaatcctgggtatatcggagtgaggttccatgttctctatggatttcatccctctgtatgaggagcttttcaaggagtctgatcatacgacgcttgagcatccttgtccttgaagccttcctctttctcttcttgcagtaggacagataggacttcgccacatccgcatacttgttgcgcggacgccttatacccaaatctctgcaatgaaggcagatttgcctgtagagccattccagactttcccaaaggagtttcatatccgtaggaaaacgcatatggctctcatagcatgtggcatcggtcatacagacgtgaaggctgtcaagatagggtttccagtgtgaagccagcacttcctggagggaatcaacatcaagacgggacgctatctcattgcggatggcactgactatcttgtagttggttatgggaaaggacggatttatcataatcccgcagaacatctggtagtgtatgttcccgttaagatgttccaccagctgcctgtcagagaatccggtgtacgccttcaggaccataagggcgatcttcgccgaaggactgaagatgttcctgcgtcccagtcgctgttccgacaggcccatggtctttgccatacgctcaaacggaaacaccgaatgaagcctgccaagctcactctcatgaaaactcttgcgatatttttctataatatcaaattc

SEQ ID NO: 5941 - DNA, 179 bp, Unknown
  gut microbiota DNA sequence
gcgatatttttctataatatcaaattctgtaaagcccaaagtagggtgaatttccgaaatattttgtatcttagccatatctttgttggggaatttcccccgttttggattccaaaccttatttgcgggggaatacctaaagatacaaaaaagccaactaattcgcaacattttgtgta

SEQ ID NO: 5942 - DNA, 4815 bp, Unknown
  gut microbiota DNA sequence
gtaaaataactgtagaaatagttggattttcgataacggaattatagaaagcattggaaggtattgtaacatctgttaatccactcaaatcaacacgttttagaatgggtaatgtgttgagaaaatcatagtcagttttatttaaagaaccggtaattgttatttcttctatcaaatttatactttctacaggtattaattgactgagagttccgggaacagatacatggaaaacatcgttcatggattttgattgttgggtaatcaatattgattctgaatacattctgtattgatcttgtagaagtatagttgcggaacgttcttcaacgttttcattgggttgtacgacaaaggaaatgacttcgtcccgcatggaacttctactggttggcgccaaacttaaccacgattttgcttcgtccggaatgtttattatatattcgatattcgttgtaagttcgacatctactattcctccttcatatcccacggaataattttttgttgttatgctaataattccgtttataaaattaatagaacgtattacggtatttcctttatcatttgaaattaagactagaacttcactatctacaatatcatttggagtcgtaatttcaatttttccttgagagtaatctattgtgtttatgagtgcgcgataaccatcttgtgctattgcctttattatcgtgtttttgtcagaaccaattaacttgtaaccaatgatataagttgtatggggggaggcacatatatctttagatatatcgaattggatagaaagcggtttgtatttgggaatagaaattgttgtttgattaccggttaatgttatgtacacgtaatcgtcatcttcggttatttcttggaagaaatttccctcgctttcccctgtcgctttccctaattgtttccaactgttttcattgtcatacgaaacgtaccagtatcccccttctatttttaaaagaggggtaattccgttttgtccgggcttgccttcctctcccgcttctccactttctccgtcagttccttctgccttgactttttggttattgttatctaaaagccaagtgccgttcagcgtccagtaatagataccgtccgtgtcttgtcttatcccgataacaggagttattccatcttcccctttatctccggtagcttgtcctaggaggctccagtttgtcccgtggtcaaaggacacgaaccagttcccgagttcgattttgaattgtggcgtgatgcctgctgccccttgttgcccttgatctccggtagcttgtcctacatcttcccacgaggcgccattgtcccacgagatcagccatctgccgctttctatctttaatttaggtgtgatgcctgccacacccggtaatccttgatcgcccgtggcttgtccggcatcctcccacgtgctgccgttatcccgtgataccatccacctgccgttttcaattttgaatcgtggggtaatgccatcttctccttttttcccgtctttcccgtggtagatggtgatcggtcggtttttcatgaacgtaatcgtgtatccgatggtgttgcctccttccgtgatgggggtaactcccgtgatgtaatcattttgttgcagcgcactgacgattgtctgcatagacgagatgtttgtgttcatctgtgcgcacaacttttcgagggaggtgagcctcccgtctaaatctgcgatttggtcacgtaactcactgtcatcgaaatcgtccttgcagcctgccaaagcaacgcataggaccgggagccataccaagtgccggcacttgaaaaaataagtaaataaattccacatacaaccatgcttttgaaaccctgattccctgaaggtaaattatataaaaagaaatagcgtgggaactctcagtttatcctcttttaggtatcgccaaacaccttgttacaaataaacagtcaccccacgctaaaccatatatagtgtagatgactatatggcaagcatgagcgtttgtaccgtttatccttgtaacttaaaatttggcgattttaaaagagaggataaaactaaacgcctttcaatacattgttttcgtctcgattactctaaacgaattacaaatataaagaataattagcattttacaaacactcacgggggtgaccgtattacaaatttataataaacgttagaataaaaagaaggaaaccgtgtatttttaattttatgctaatgtgaaatacggtgattctcttgctttttcagttgtcacgggcgtacgaattcccgttcatctgcctgtcatgtattgtatgatgcgatagatgatcgaaacatgatcagtaggtgatcgataggtgtttcccggaaggggaaaaataaggaaggagaaatgttgaatttttcggtgtgataatgtgtgtatatttcccgaaaaaatatatctttagcaaattaaaaaatttattatggaatggttgatcgtattgatgctgattctgatcggggcaatcctggtggtattggagattttggttttaccggggattaatgtcgccggaattctgggatttatcagtattattgccggagtatatttcggatacgcgtattatggcggagtgacgggccatctgattttggcgggtacggttgtcttcggtttcgggatgacctggtatgtccttcggacaaaaacctggaaaaggctgagcctggatacccgtctggaagggacggtagaggggattggggattcggttaaggccggagattgcggagagacgttaggacgcttggcacctatgggaaatgtaaaattgggggatatggtcgtggaagccgaatccagatcgggctatatcgatgcccatcgtccggtcgaggtcgttaaagtattgagaaataaagtaattgtacaattaaaaacagtttgaaatggaaaacagcagtgttattttgttggtggtcgccatagccggaggattgttcctgttatggattattttgtatctgattcctgtcggtttgtggttccaggcattagtatcggatgtgaaaatatctttattacaattggtgttgatgcgttggagaaaagtgccgcctacggtgattgtcagtgcaatgatcgaggggaaaaaggcaggtatcgaattataccgggatttgctggaggctcattatctggccggaggccatgtggcccaggtggtgcatgctttggtatctgcttcgaaagccaatatcgatctgacttttcagattgcaactgctgtggatctggccggtagggatgtattcgaagcagtacaaatgagtgtaaatccgaaagtgatcaatacacctccggttacggctgtcgctaaagacggtatccagttgatcgctaaagcgcgggtgactgtccgggccaatatcaagcgtttggtcggtggtgccggtgaagagacggtgctggcccgggtaggagaagggatcgtgtcgtcgatcggttcgtcggaatcccataaagcggtgatggaaaatccggattttatctccaaagtggtgttggataaaggtttggattccggtacggcttttgaaatcctttccatcgatattgccgatatcgatgtgggtaaaaatatcggggcaggtttacaaatcgaccaggccgaagctgatctgaaaatcgctcaggcgaaagcggaagagaggagggcgatggctgtggccagagaacaggaaatgaaagcattggcccaggagatgaaagcgaaggtgatcgaagccgaagccaatgtgcctctggcgatgtcggaagccttccgttccggtaatttaggcgtgatggattattatcgcatgaaaaatatagaagccgatacacaaatgcgggaatcgatcgcaaaaccggctgatggttcaaaaaagaaaccggataagatcggatgatgagaaaaacgtaaaatttcggttgagatcaatcgtttggtatagagtgaccattggaaaacaaaattcctttggtcactttttgatttttttaaactttataaatagaatttgccagtaataaaaacaaaagtaatgatatgccattggcaataaaaacaactgtaaggtttgctgcaaatcctaagaatgccatattcatgacaagcacacaaaaagcccagcctccggctgaagttttaagcataatgccttcccgtttctgtttgaactcgattccgaacatgatttcaccagcaattaacagacatatacagacgatgattgccattataagtccggtgtcagtgtcctctgaacctgccaaaaatccccatcctattaaaaggccaatgcctaaaacaatgatactttttaaaatattgattttcatatctgacaatctgattaaagttcacttacttctttgagtagtttccaggcggacataccttgcctccaaagcaaggtgtccggtttgactttttcttgccgaatcatatcttgtaatgcatgacgacttaacggtcccacttgtttcccttcaattaccacataatagttcgggacaggcatggaattgcctgttcccgggattgtcatctgatgaatacaagtgtttactgtattcatcatttgctgtgcgacagctatacttaaaccgaattctatcaaacggtcaatcgaactgaaatcattcatgattttaagcatacatgaaatagatgttaccaataatccatacaatgttccaaattgacattttgaccgtatatttggtgcgcattgattttactgtcagacaaatcaatgctaatgccaatatggcgatg

SEQ ID NO: 5943 - DNA, 2916 bp, Unknown
  gut microbiota DNA sequence
gcaacctcttttcaagaatggttacccgaggtcgtttaccagcgtcttcgtggagggttggagcaatttgggaaaaaggcccgagggttcatcacggagaatgcccttctgttgggcgtggagagccggacttcttctccattgagaataccgagggagaccgaaaagatggtgcatcctgaaattgtcgggttatacccttgcggggaaggagccggatatgccgggggaattgtctcggccgcgatggatggagaaggctgtgcagaggcaatttgttaagaaacaagaagggcctgattggttataaccgaatgtgttaaagtgactttgtttttttgataaaaaatttgcattgatcaagaaaatatctacatttgcgaatgtataaagaatttattagttctaatcctaaaactgtctattatgaataaagctcaattaattgacgcaattgctgaaaaagctggtttgacaaaagcagattctaaaaaagcattagaggcttttgtagctacgatcggagaatctttgaaaaaagatgaaaaagtagcattggttggtttcggatctttttctgtatctgaaagaagcgcaagagcaggtagaaatccgcaaaccgggaaaacaatccaaattccggcaaagaaggtggtgagatttaaagctggtgctgaattagaaggccaactataattaccatttaagagatttaaaagggggtgttttgaggacaccctttttttgttcatcgacaagttgtaggtttttcagttgcaagttgcgaaaaacggagaaaaatgaacttgtaacttgcaaacttgtaacttttaacgtgacgaagtcaccttaaaatagcattatgcatactgtaaaagaacaggttgagtatcttagagagtttgtgacggactataaaaatgacttgttccgtcggttaattgcggaacgaacaagttatgtcacgatggtactcgaagatttttaccagcaacataattgtagtgcagtgttgcgttcgtgcgattgttttggaattcaaaatgtacatgtaattgaaaatacgaattctttcacggataattccgaaatttcgatgggagctgccgattggttgacggttcatcggcaccggaagagagagaataacacggtggagacgatcgagatgttgaaatcacagggataccggatcgtggcaacaactccacatgaacgagatacttttattgatgatattgaccttcacagggggaagatggcttttttcatggggacggagttgacggggttgtcggatgacgtgttgtcgagggctgatgagttcgtgaaagtgcccatgtatggttttacggagagttataacgtgagtgtgtgtgctgctttattaatgtatagcgtggtacagcgtttgcgacagacagatatagattggcatttgccggaggaggaacgctatcaagttttgtttgcttggtacaagcgttcgattaaggcttcggctcagatattggaacgatttaatcataacaagtgagagatgtattatttgaaatgtaaacactgtaatcacctgaacgaggtgaagtccgagtacttagtggtatgtggtttgtgtaaccggaaactggaggataattacaaggattggaaagtgaaacatccggagaagtcgtttgaagactttcagcgagaggtatgcctgacagaagaacaggtgaagaaaggagatacgataaaaccaaccggtaagagagggaataaaaagggggtgattgccgggggaatagggggaatactggtgatgttgatgattttgcttgtaataaaggggatgaaggatagttatgacgagttgtatggagatggtgatactccggtgttggagcagcaatggtacacggggacatacgcgggaggtgcgtctcttgcgacccccaaggcaatgaagtccgtggggaacgtgatgaataaattgcccgaggaggtgcgtcctttggttaaagagatgcaaacttttagttataagggaaacggattggaattcatgtatttatataccgagtacactcctgaagttgggcaggttgatttagagggtgctgtgaatgggggattgaatcagttgaagaatcaacccggggtattcgatttgaaaaatgatattgcttacgtggaggagggtggtttgagcggggtcgttatgcagggaacatacgtgcaaagagggacggaatatgaatttaagattactttatacacgcccggattgaaactttatcaatttatttccagtaataagaaaggagatgacacggctagaggtgttgtgcgtcgaatatatgattcgttgaaaatcagcggacatggaacatcagaaacaggaggtgcagaatgaaagaacaagtgtatttattggaacagtttgacgatataaagatattgcgttacgatgtccccgcttttgagggattgtccttgcgggaaaagttatttgtttattacttgagtcgggcggctttggccggaagagatattctctgggatcagaataataaatataatcttcgggtccgggcggctttggaaagtattcttcgggcatatcaaggaaaccgggagacagaagagtttcaggcttttctggtgtacgctaaaaaagtgttttttgctaatggagtacatcatcattactcgatggaaaagtttaccccttcgtttactcccgaatattttaagtcacttcttcgggaagtgggagcgcaacagttgtatgaggaagtagaacgtgttatctttgatccggaatatatggcgaagcgggtggtactggacgaggggaaggatctggtgcaggcgtctgccaatcattattacgagggggtgacgcaagaagaggtggagaaattctacggg

SEQ ID NO: 5944 - DNA, 443 bp, Unknown
  gut microbiota DNA sequence
tggcacgatttttagagaaaatagctccggtaagagcataagctgatgacttatccagaatatctaatgtttcatctactttttccggatcataaacgtaaacggttaagatcggaccgaataattcttcccgcatggtaatgtaatccggtttaaaagcttggataatggtcggttggataaaatatcctgcactcatatcgtaatgaccgccgataatcacttctgcatcttccgatttgtttgctgcatcaattgcgttagacaatttaacgaaagaggcctcgtcaataacagcgtttacaaagttcgtgaaatcttcaactccaccaacttttatgttggccatatcctcttgcacgtagttttctacttcgggccagatattggctggaatgtaggcgcgtgaggcggcagaacatttttgtccttgatactcgaat

SEQ ID NO: 5945 - DNA, 822 bp, Unknown
  gut microbiota DNA sequence
ctcagttggtagagcaaaggactgaaaatccttgtgtccccggttcgattcctggtggcaccacttttaagaaaagaaaaacgatgtaaatccctgaatttcaaagaagttcaggggcttttcatttccaagaataagcaaaataagtgggattaaagcaaactgtacgtccttattcgggggacggttttagaaagccctgaatgttccactgcgcgatagctacttcattcttttacagcacgttgcactattttacataacagagtcctcggttcgatttcctaactttgtatcattaaaaattgagcagtatggaaagaaaaagattcagcgttttgttcttcatcaagagaagcaaactgttaaaaaacggggaagcgcccgtgcgtgtgcgtgtcacttatgaccgcttatatgtggaactccaacttaaacgaagtgtaaaagtcccactttggtcgcaggacaaagagaaatcaataggcaaagaccgcaattccgtagaactaaaccattacattgatgccttgcgtgtgaaattctatcaaatctatcaagatttagaactggagggaaagattatttctgcccgtgccatcgtaaaccgctatcagggaaaggacgaaactttcaagacattatataatgtattcaaggaacataacgacaactgccggaaactaatcggaacggattatgccgacattaccgtaagacgttacgataattgccttaaatacctcatggaactggtgaaacgagattataaggtagatgatattctactacgtgaagtaaacggggaattggtgcgcaatt
